United States Patent Application Publication US 2006/0134663 A1 - sequence listing, part 73

SEQ ID NO: 190004 - DNA, 1486 bp, Homo Sapiens
gacccaagtggcaaagccttgcctctgaagcggtcacaatttccgtggtacagcaggccctttcccgtgaagctgagaagcaccacatgcttgctgtgctcccacaaatctgttctgatggagttttcacacttggacagatttaaagctgctcctctcaaagtcttgcactgtggcctctggctgctacctggattttccctggcagactctgcgggatatgggtgggcaccgcagcgtgtgggagaggcgctgcatggggcgggctggagtgcaagccagccagaagactgtggccaaggccatggtggaaggacccgggggcagggcctgtgacgatggcatccttggagacccctgctttggcagaggagtcagcgctgaaggagagcacatggacaggaatagggacaggggttataattcccaaggagttcgagctcatggccccagacagctttgggctgctggatttgtagggtgaagccatcaaagaggagccggccagcagcacagtcccactcgctccttttgacaaggaggtagacgatgtcacactactaactgcagagggctttagggacggcgaggtcagcaactttgccactccctgggtcccaccactggaatctccgtttggaccgcctggaggggctaccagagtcaacttctgggaaacaggcatttttttccctgctgaacttgggacgggtcggctggtggcctgtcccacggagggaggctgtatgccagggaccaggctcccagaaacagaactctggactggtgttcctcccgaggaagagctgccagaagaaaccccatgtttggagattgagctggcaaagggattattcttgtaagatgagcctgcagagctgactgaatgtggctttgctggatggctcagggcagaagaggacgaggctggggtcttgtgagagctgctgctggaggctgacaggcctcctgaggtggctggtgcagagggatggaagccctggcctttggccgctgtcttcactaactgcaggagggaacgatgacactgtgtgggagaagcctttgggccttggagcttattggcaaatggagatgggggcgtgaagtttttctgctgctgagtgccggcatgaaagactttgacctgggggccaggcacaggaactgccacttggggcccgtgagacgtccgtggcaagctgtggtgcttagctttggactgatgtacttctggcaggcccttattgaggggagcctggcaggacagctctttgtagccagaactctctggttttttctcctgagaggactgccccagtgccagagcctgttctgccagaaaattgaggggtgactgcagagagctagctggtggtggagcagaaggactaggcttcgcaaagttccttttttcttctgtacataaaacgcctccaactttttctgcaggtgcttttgagggtgcaggcagcatgaatcccaa

SEQ ID NO: 190005 - DNA, 1340 bp, Homo Sapiens
gatctttagctgctcgtgcagcaggtacttacggtgggtctgcttgatcttctcctccacctcccgccccaggcgctgctgcagcttgctcagttcaaattccttcttcagcagaggagagggccttgtacagccgcttaggaatattggtctcttccaggacgtcctgcagctcatgggactcggccccggtgagcgcggcgcccatgtcgctcaggtagatggggttgtccaccacccgctggccagcctgcatcatctgcagcactgactccctgtagagagggttcaaggcaatgatgtcccggatggtcttcacgatctctgcagtcagggctttcacctcctccgtgacctggaagtcctcgtggacaacgttctctacctccaccatgagcacctcagccgggagctcaggggtgggctccatcgccagctccgccgggtgcctggcgctcagctcgtcctccgcctccttcttgccccgctttgacttcctgcggggcttgtgcttgttctccgcctccggctcctcgggctccacctccagctgtctgctgatatggactcttctgtgtcccatgacgatcatgcgcagcttgtccccaaggtcctgcatctcatggatctgggcaaacgtccccgtgtggtagatttcatccaggctctcgaccacatccgactcattgctgtcatctctctttagaaagacgccgacataaggctgggcgagacgaactttccttctcagcagctcaaccaacttcttatttttaacctcgataatcttgataaagcgcgggaacaccgggttgcgggtgatggcgatgagcggcaggtgcggaaacacatcggggatcgtcatgggcgtgagcgccgttatgaccgggccttccccggcgcccgcgctgccccccgcgccgccggctccttcctccgcgccgccctcggaggcgtcctcgccccccgagaatgcgcctccgccgcggctgctcgcttcccaaaacccccgccattggcccccaattgccgggcctcggccccacagtgcccaaggaggagaggcgtcgcaggtccgctggcctcggagcaaccacgctcctgctgcagtgggaacccgccccccggcggcggccagcatcggccgccgcagcacccagcaccgcgccgctccccacagtcgcacgtagccagtgctcgccgccatagcccggccatactggcggctcacacaactcgcgtcatttccgctcgccgcgaaacgcacgtgacgcccggcgcgtgcctcggtacccgatgggcgcgtggctcgaaacagccgcttcagggagctgggccaa

SEQ ID NO: 190006 - DNA, 940 bp, Homo Sapiens
ttgggagaccggctcggtctctctctctcccagtggactagaaggagcagagagttatgctgtttctcccattctttacagctcaccggatgtaaaagaactctggctagagaccctccaaggacagaggcacagccacacgggagtgaaatccacccctggacagtcagccgcaatactgatgaagctgagaagcagccacaatgcttcaaaaacactaaacgccaataatatggagacactaatcgaatgtcaatcagagggtgatatcaaggaacatcccctgttggcatcatgtgagagtgaagacagtatttgccagctcattgaagttaagaagagaaagaaggtgctgtcctggccctttctcatgagaaggctctcccctgcatcagatttttctggggctttggagacagacttgaaagcatcgctatttgatcagcccttgtcaattatctgcggtgacagtgacacactccccagacccatccaggacattctcactattctatgccttaaaggcccttcaacggaagggatattcaggagagcagccaacgagaaagcccgtaaggagctgaaggaggagctcaactctggggatgcggtggatctggagaggctccccgtgcacctcctcgctgtggtctttaaggacttcctcagaagtatcccccggaagctactttcaagcgacctctttgaggagtggatgggtgctctggagatgcagacgaggaggacagaatcgaggccctgaaacaggttgcagataagctcccccggcccaacctcctgctactcaagcacttggtctatgtgctgcacctcatcagcaagaactctgacgtgaacaggatggactccagcaatctgggccatctgcattggacccaacatgctcaccctggagaatgaccagagcctgtcatttgaa

SEQ ID NO: 190007 - DNA, 911 bp, Homo Sapiens
ttggctatcctgaaccccagcaagcctgaaacagctcagccaagcaccctgcgatggaagctgcagatgcctccaggagcaacgggtcgagcccagaagccagggatgcccggagcccgtcgggccccagtggcagcctggagaatggcaccaaggctgacggcaaggatgccaagaccaccaacgggcacggcggggaggcagctgagggcaagagcctgggcagcgccctgaagccaggggaaggtaggagcgccctgttcgcgggcaatgagtggcggcgacccatcatccagtttgtcgagtccggggacgacaagaactccaactacttcagcatggactctatggaaggcaagaggtcgccgtacgcagggctccagctgggggctgccaagaagccacccgttacctttgccgaaaagggcgagctgcgcaagtccattttctcggagtcccggaagcccacggtgtccatcatggagcccggggagacccggcggaacagctacccccgggccgacacgggccttttttcacggtccaagtccggctccgaggaggtgctgtgcgactcctgcatcggcaacaagcagaaggcggtcaagtcctgcctggtgtgccaggcctccttctgcgagctgcatctcaagccccacctggagggcgccgccttccgagaccaccagctgctcgagcccatccgggactttgaggcccgcaagtgtcccgtgcatggcaagacgatggagctcttctgccagaccgaccagacctgcatctgctacctttgcatgttccaggagcacaagaatcatagcaccgtgacagtggaggaggccaaggccgagaaaggagacggagctgtcactgcaaaggagcagctgcagctcaagatcattgagattgag

SEQ ID NO: 190008 - DNA, 744 bp, Homo Sapiens
  misc_feature (207)..(353): n is a, c, g, or t
  misc_feature (355)..(371): n is a, c, g, or t
ttggctttgctatggcttttgttatcacaccaaaactatgcaattggtacatggttgtttaagaagaaaccgtatttttccatgataaatcactgtttgaaatatttggttcatggtatgatcgaaatgtaaaagcataattaacacattggctgctagttaacaattggaataactttattctgcagatcatttaagaagtaacannnnnnnnnnnnnnnnnnnnnnnnnnnnnnnnnnnnnnnnnnnnnnnnnnnnnnnnnnnnnnnnnnnnnnnnnnnnnnnnnnnnnnnnnnnnnnnnnnnnnnnnnnnnnnnnnnnnnnnnnnnnnnnnnnnnnnnnnnnnnnnnnnncnnnnnnnnnnnnnnnnngtaacaaaaggaaattatttgtttttgaaataccagttcaactttgtggattatttttcctctgaaggaaaagaaaaggcttaatggttaggatttttaagtattcccaaagatctgaagggtaataaaatgtactggattttttaaggtggtaccaaaaatgaatgtctgtcatatatttatattacaaatacattatatttatgttctattcatcttttgaatgtttagtatgctattaagtcattctgaatctttgtatttgcttttgcaaataggtatttcaaagctcttttcctaactggttaagtaaaataaaaaattgagctttctagaatatttgcctaattgggaattaaaaagtaaaataata

SEQ ID NO: 190009 - DNA, 1360 bp, Homo Sapiens
  misc_feature (146)..(161): n is a, c, g, or t
ttggaaaaagccaacgcccttttaagaaagttatgtccatcagtattcctctaacttcattttctctcgtttcttcttccctcacttttctaagttttcctttattaaccccatttttctttagtttgtttgcatgcttccttgcnnnnnnnnnnnnnnnncctgggtatgatagagaattagtcccattctctaagtatgtaaatcaaggagtgaattttcaagtagacaaaaatgatttacagcatccttgcattcgctaccgatctctgcttttgttagctcttgtttttagctgggaaaaagccaattaccgccattttaacgtttcaggtgttcttaattcattttgaaacgctgactgatgaaaaaaataaggaatatcctctatgaattatcctgaactggcttataatatattgtttgaattcctgttatgagcttctgtttctttaacaatattttgtaaagtgtgtttcacataacagcagataatcaccagaatgggagtgaatgacttgtggcaaattttggagcctgttaagcaacacatccccttgcgtaatcttggtgggaaaaccattgcagttgatctgagtctctgggtgtgtgaggcacagacagtcaaaaaaatgatgggcagcgtcatgaagccccacctcaggaacttattttttcgtatctcatatttaacacaaatggatgtaaaactggtatttgttatggaaggggaaccaccaaagctgaaagctgatgtcataagcaagaggaatcagtctcggtatgggtcttctggaaaatcgtggtctcagaaaacagggagatcacattttaaatcagtcttaagagagtgcctccatatgctcgaatgcttaggaatcccctgggttcaggctgctggggaagctgaagccatgtgtgcttatctcaatgctggtggtcatgtcgatggctgcctcaccaatgatggagatactttcctttatggggcccagactgtttacaggaatttcactatgaatacaaaggacccacatgttgactgttacacaatgtcatctatcaagagtaaactaggtttggatagagatgctctggttggattagcaatacttcttggctgtgattatctcccaaagggagtccctggagttggaaaagagcaagcattaaaacttatacagattttgaaagggcaaagtttacttcagaggtttaatcggtggaatgaaacatcttgtaactctagtccacaactgctagtcactaaaaaactggctcattgttccgtatgttcccatccaggttcacctaagatcatgaacgtaatggatgcagattatgtaaaagtgataaatat

SEQ ID NO: 190010 - DNA, 1509 bp, Homo Sapiens
gcgcgtcgtccccacagattgctcatttagaaagtggatgtgtgggataacatgtccagtgtgtccgaggagagaagaaaaaggcagcagaacattaaggaaggactgcagtttatacagtcaccgctgtcatatccaggaacacaggagcaatatgcggtatatttgcgtgctctcgtgagaaatctttttaatgaaggaaatgacgtttatcgggaacgtgattggaacaactcgataagccagtacacggaagccttgaatatagctgattatgcaaaatctgaagaaattttaatccccaaagaaataattgaaaaactatatataaatcgtattgcctgctattctaatatgggtttccatgataaagttttggaggactgcaatatagtcctcagtttaaatgccagtaactgcaaagctctgtatcggaaatctaaggctttaagtgatttaggaagatacaaaaaggcttacgatgctgtagcaaagtgctccttagcagtgcctcaggatgagcatgtaataaaactaactcaagaactagctcagaaattgggatttaaaataagaaaagcgtatgtcagagctgagctctcattaaaatcagttcctggggatggggctaccaaggctttgaaccattctgtggaagatattgagccagatttattaactccaaggcaagaagcagttcctgttgtctctttaccggcacccagtttttctcatgaagttggaagtgagctggcctcagttcctgttatgcccttaacttctattttgccactacaagtggaagagagcgctctgccatctgcagtgctggcaaatggaggaaagatgcccttcactatgccagaagcttttctagatgatggagatatggtccttggagatgaactagatgacctgcttgattctgcacctgaaactaatgaaactgttatgccgtcagctttagtcagaggaccccttcagacagccagtgtctctcctagcatgcccttttcggcatcgctgttaggaaccttacccattggtgcgaggtatgctcctccaccctccttctcagaattttatccacctttgacttcatccttagaagatttttgttcttctttaaattcattttcaatgagtgaatccaaacgagatctgtccacctcaacttctagagagggaacaccgcttaacaacagtaattcttcccttttacttatgaatggaccaggtagtttgtttgcttcagagaatttcctgggaatttcaagtcagcctagaaatgactttggaaacttttttggaagtgcagttaccaaaccatcttcatcagtgactccaagacatcccctcgaaggaacccatgaattgagacaagcttgccagatctgttttgtaaaatcaggccctaagttaatggatttcacttaccatgctaacatagatcataagtgtaagaaagatattttaattcggtaggataaagaatgttgaagataaatc

SEQ ID NO: 190011 - DNA, 1190 bp, Homo Sapiens
ttggatcaacgtcatcaaggaagaggccttaacaagggatggtcccaccattgttcatgatgagtatggagcagtttcagcaggaatgttatgtgcccttaccaccctgtcccagcaactggagaatgaaaatgctgtggatgttttccaggttgcaaaaatgatcaatcttatgaggcctggagtattcacagacattgaacaataccagttcatctataaagcaatgcttagcttggtcagcactaaagaaaatggaaatggtcccatgacagtagacaaaaatggtgctgttcttattgcagatgaatcagaccctgctgagagcatggagtccctagtgtgactggaatcctgaaagggcacttaatttgtaaacttctgaagactgagaacttttttgaggccttttttgccagactctaggttatacaataacccagttacttttttacactgataaaagttttgatatttattttttgccattttatgtcttaatggtatcctactgagcatttgcacctctgttcatttcacacagtgaaacgcaattttacctagtttgcactatatgatcagtgttactgcctataatcttatacaacagcaaaccctgatgtgacattccatgacgacatacatgctacttttttttagttcaatacagtgaaggtctttgttatgacagtgaatattgcttttattattattattgctgaagtggttgcattctactagcaggcaatgctgtacttttcttcagtcctcctctcctttttattttaggcactgttcaatactgtatgccttctgtattttaatggagtggatagcattgttttcttttacagactagcaggctactgggacctaaaaaggtctgttaatgtcatggccttgaaacagttccatttatgctggttaagagatcccttaagaagttagaaggcttaagaactgcttcatgtgaacatcccttattagttacaaagttatattcacagttttttaaaaatgtgtcaaaataaaggataactctgtattacagctttcacagtagctatgtggacaatgtgttatttccattttgactctctaaaatagctacatcctaaaatcaggctatctttaacaatagcaagatagcatattatatacaactcagttatgagaccctttagttattc

SEQ ID NO: 190012 - DNA, 947 bp, Homo Sapiens
ttggcggggaacgcggattcgcattcccaattttaggtggcagtcgcaacccatactattcggacagatggcacagaaaccgctgcgcctcttggcttgtggagatgttgaaggaaagtttgatattttattcaatagagttcaagcaattcagaagaaaagtggaaactttgatctgctgttgtgtgtaggaaatttctttggctccacccaagatgctgaatgggaggagtataagactggcatcaagaaagctcctattcagacatatgtgcttggtgctaataaccaggaaacagtaaaatatttccaggatgctgatggatgtgaattagctgaaaacattacttatctgggtcgtaaaggtatcttcactggaagctcggggctgcagattgtgtacctcagtgggacagaatccttaaatgagccagtaccaggttatagttttagtcccaaggatgtgtcttctctgagaatgatgctgtgtacaacctcccagtttaagggtgttgatatcttgctcacatccccatggcccaagtgtgtggggaactttgggaattcttctggagaagtggataccaaaaaatgtggttctgctttggtttccagtcttgccacgggcttgaaaccaagataccattttgctgctttggaaaagacctattatgagaggcttccatatcgaaaccatatcattctacaggaaaatgcacagcatgccacccggtttatagctctggcaaatgttggaaatccagaaaagaaaaagtatctttacgcgttcagtattgttcccatgaagctaatggatgcagcagaactggtaaaacagcctctggatgtcactgaaaacccttacagaaaatctgggcaggaagcatccataagaaagcaaattcttgcccctgtggaagatcagcctgtcagtttttctttgattt

SEQ ID NO: 190013 - DNA, 1310 bp, Homo Sapiens
  misc_feature (792)..(805): n is a, c, g, or t
ttggcacttacactccaggaacttgcaccacaagtggctgcatagccactcaggaaggccatctgcaaccagcagccccgaccagccttcccgcagccacctggacgatgatggcatgtcagtgtacacagacacgatccaacagcgcctgcgtcagattgagtcaggccaccagcaggaagtagaaactttgaagaaacaagtccaggagctgaagagtcgcctggagagccagtacctgaccagctccctacactttaatggagactttggggatgaggtgatgacccgttggcttcctgaccacctggccgcccactgctatgcgtgcgacagtgccttctggcttgccagcaggaagcaccactgcaggaattgtgggaacgtattctgctccagttgttgtaaccagaaggttccagttcccagccagcagctctttgaacccagtcgagtatgcaagtcttgctatagcagcctacatcccacaagctccagcattgaccttgaactggataagcccattgctgccacttccaactgaagctcagtgacctgggtgggcagtggccaagctgctgttcctatgacaggcccactcaacctgggcagaccgagaggcccgtgcactttggaatgggagcgtggaaccacctgtacagagtgacagatttgggatgcaccactggattgtagattgatttttctttcctgtccccctactccctccctaccttttccatcctcctcctctgccttcaaaaaaggaaactttcccttggttgtcttaannnnnnnnnnnnnngatggaagaccaagggttgccaggcccactgtaactgccgagctgcctgctgtcacgtgacactgagggatggcttgtttcttccgggtgggaggatggtggtcagagccaggagtatggagatctgagaccgtgagcagggaagaaagccagtgctaacatgcaaccattcctcacgccaccgccacatcagagctggttgggaaccctttgctgctggggaggctggaagcatattccccaagagcactgccctgggcatcatctccctcctgcgaggagctgagccagtcccctcacagatggataaatgaggctgatgtttggagggagaggcacacggtaaatggcatccccttatgcgcctctttgggaaaggaaagtggatgctcctttgaggcaggcgagggctgggagtgggtagccgtcatgttgtcccccgtgggatcccattttaacttgacccagattgtcttgggctccttttactttcaggggctgcttt

SEQ ID NO: 190014 - DNA, 1362 bp, Homo Sapiens
ttggcgaagactttgagaaatcccttagtgcccaggaggaaaagattacagcattagatgaatttgcaaccaagctaattcagaacaaccactatgcaatggaagatgtggccactcgccgagatgctctgttgagccgccgcaatgcccttcacgagagagccatgcgtcgccgggcccagctagccgattctttccatctgcagcagtttttccgtgattctgatgagctcaagagttgggtcaatgagaagatgaaaactgccacagatgaagcttataaagatccatccaacctacaaggaaaagtacagaagcatcaggcttttgaggctgagctctcagcaaaccagagccgaattgatgccttggagaaagctggccaaaagctgattgatgtcaaccactatgccaaggatgaagtggcagctcgtatgaatgaggtgatcagtttgtggaagaaactgctagaggccactgaactgaaaggaataaagcttcgtgaagccaaccagcaacagcaatttaatcgcaatgttgaggatattgaattgtggctatatgaagtagaaggtcacttggcttcggatgattacggcaaagatcttaccaatgtgcagaacctccagaagaaacatgccctgctagaggcagatgtggctgctcaccaggaccgaattgatggcatcaccattcaggcccgccagttccaagatgctggccattttgatgcagaaaacatcaagaagaaacaggaagccctcgtggctcgctatgaggcactcaaggagcccatggttgcccggaagcagaagctggccgattctctgcggttgcagcagctcttccgggatgttgaggatgaggagacgtggattcgagagaaagagcccattgccgcatctaccaacagaggtaaggatttaattggggtccagaatctgctaaagaaacatcaagccttacaagcagaaattgctggacatgaaccacgcatcaaagcagttacacagaaggggaatgccatggtggaggaaggccattttgctgcagaggatgtgaaggccaagcttcacgagctgaaccaaaagtgggaggcactgaaagccaaagcttcccagcgtcggcaggacctggaggactctctgcaggcccagcagtactttgctgatgctaacgagctgaatcctgtatgcgggagaagaacccattgtgggcagcactgactatggcaaggacgaagactctgctgacgctctactgaagatacacgaagctttgatgtcagatctcagtgcctacggcagcagcatccaggctttgcgagaacaagcacagtcctgccggcaacaagtggccccc

SEQ ID NO: 190015 - DNA, 1657 bp, Homo Sapiens
ccagcgcagttactgggtagagcaaaaataaaaggttcattttcctctgaaatagcaataaaaacaaggaaaacattatatttgtatataaaggatcaatgctggtcttaagaataatgtcatcagaaacccttaaatcgagaggcacacaacgggtttccacttttaaaaaataaaaggaaagtcaccagtttatttaaatggaggaggtgctcacacccctcaaataaacttaattcattttaacatcactagcaaaaatcacttagaaactgtacaaaaataaaaaagttaacacatttaatcctgcaaggtttttgtaaggactggaaggcaggcttttgaagcagcatttgggcatggctgggggcttctttggtttgatctaacacacataagagatggaacctattccagatgacagtttcaaatttcctgcacatttgaagacaagataagaggccagtatacaaacttccggtgtgctgggcactgggactgtatgtgctggactgaaaatcttacaactgctttaagctttaagggtgaggggaagcaagccttgcacttcctccatcaatttcactgacctctcgtgttaggggagactacagagggtagtagcacattctcgtgcagtcagaaggccacttgaggggtgggggacaatttgttcttttagaatctggtacctggctgaccttgtttaagaacaagaaaacccttccagaaatggaagccttttgctacataccaaagcaaagtacgtactatttccaagaggaaaaatacccagttgcatctgaaaatggaaaacttaaatggaacgaattaacatttaaaaggggctatgtaaactttgtgctactcaaatgaagttcaagtattacttctgagctgtttaaagatcactgaactcatccaatattctgatgataagagtgcaattcacatttgtgtttctgaacaaataaatcacaactggctagaacacaacctgtgcaatcagaatcttcgtctgagttaaagacatgctacatatttcaacatgttcaaagttaattcataccacataattaacagctttgtatatacgacaaaggtgaaagggtctagcatttgtttgaagcacaccattacagtttgtataacaccctttacactacaaagtcttttagtcaaaagctacttagagacaaaaatgcactttgcattacttgaatacaaaaggagacaaaactatccttttcccccaagccatgttgggaaatattgctgacctcgtcctttgaagcctgcaggatggttatttcttcagtttaacgttattacactgctaagaaaatctgtataacatctgcatatatcaaggattttaaaaaatctgatatgattttagagtccgcatgaccagtcacgtgacctgctcaagattgattagcaccgttaaataaacacacatatatgtatgtatgtatgtgtaagtatatgtacacacacacatctatgtatgtaataaatctttgctaaaaaaacttctaaccataagctcacccaggacgaggagcctgttgaaccgatgagatgatggataagatggatttcacgataatattggtctattttgtctctcttcagtttgcttgttttatttacc

SEQ ID NO: 190016 - DNA, 942 bp, Homo Sapiens
ttgggggttccggtggtggcagaggtgcttgtgtttttgtcggtacaggagagtcgctatggcggcggtggattcggatgtcgaatcgctgccgcgtggggggttccgctgctgcctctgccacgttactacagccaaccgacccagccttgatgcccacttgggaggcagaaagcaccggcacctggtagaactacgagctgcgagaaaggcccagggacttcgaagtgtgtttgtcagtggctttcccagggatgtggattctgctcagctctctgagtacttcctagcatttggacctgtggccagtgttgtcatggacaaggacaagggagtgtttgccattgtggagatgggggacgtgggtgctcgagaggctgtcttgtcacagtcccagcacagcctgggaggacatcgcctgcgtgtccgcccacgggagcagaaggagttccagagcccggcctccaaatcccccaaaggagcggcccccgacagtcaccagctggccaaagcgctagctgaggctgcagacgtgggggcacaaatgataaagcttgtggggctgagggagttgtccgaggccgagcggcagcttcgcagcctagtggtggccctgatgcaggaggtcttcacagagttcttccctggctgtgtggtccacccttttggctcttccataaatagcttcgatgtccatggctgtgatcttgacctcttcttggatctgggtgacttggaagagccccagccagtcccaaaggctccagaatctccatcgctggactcggccctggcttccccactggaccctcaagccctggcctgcaccccagcttcccctccagattcacaacctcctgcttctccccaggattctgaagcccctggactttgaaacccctttctcctccctggcgccccaaactccggaatctgccttgg

SEQ ID NO: 190017 - DNA, 1035 bp, Homo Sapiens
  misc_feature (379)..(406): n is a, c, g, or t
  misc_feature (425)..(490): n is a, c, g, or t
  misc_feature (760)..(768): n is a, c, g, or t
cccagaacccctcttccctactatccgtgctccaaggttttttgttgctgggaaagggtcttggggtatgaagtaaataaagaaaagcacaactatatgggattaggagatgatccagttctaccactctctcgtagaagcttaagattcaaagctaccgagaagagagggagttctcgttgaaagattgcacagtctgaagaggctggaacaaaaatgaccaggagagagacacagccttgtctccagagaaattgttcttgtggtttcccaaagacaaaaaagtgatggttttaaacaatgggaaaaatgggaatgaaaacaggtacttggggaaactgaatggatcttatcaaacaatacagggtcacaagcacgnnnnnnnnnnnnnnnnnnnnnnnnnnnngcgcgcgctctgaggctgnnnnnnnnnnnnnnnnnnnnnnnnnnnnnnnnnnnnnnnnnnnnnnnnnnnnnnnnnnnnnnnnnngcgctctctctgaggccagccccattgctacctggcctccatcttagggtgcacccaaactcagcagtagttgtccctgaggagttcccaagagggtttgggaaggaggtggggaaggaggctggaaggcccaggaagcctccctgccctctccccagctactgagtttcagaaaaggctggaaactcagcatgtgaggagcatccaacatcatacaggggatagctatcggcaggaagatggggacagaagacagggacctctgaacannnnnnnnncctttgaagggaaaagatttgggagaagagaaaaggagggaggaacccgtacacgatagttttacattattggatgagagaaaatctgaaaactggggggtgggaggtgggaaaagaaagacagcgagaagcagggaagggactgaacatggaagcagcatgtccagggcccggtgtccggcgcgacacacttgggagttaagtccactttactggccgtcactgcgggtccgcacacagtacagagtgtttcttggtttcacccaa

SEQ ID NO: 190018 - DNA, 1336 bp, Homo Sapiens
ttcagtttaaacataaaagaaaaagagtgcctatcgtttttaaaaatggtcaaccatctctactcgtctattagtaaactctgtgtcaatttttaaggtgaaaaatacagcagaaatacctctgatgtgttctaaacctaagtatttctctatttggactttaatttgcaatggaagaggacatattgtaacctgtaccagtccaacaggcagatgtagccactgccacctttggttgacacacactgtggggcactagatatgaacaggtaaaactgtaaattttcattttatgactttgtgtgtttgatattttatgttaatgcatcatggtattaacactctttttccttacagttttgtctcatactaagaattgttttagtgttttcatttaaaatatgttgccaatatgttgaaaatgctgtactgatgcatatataacattttacattgagtttaaattgggttaagcacaaataaaaccactttagtttacatattttaaatttcagagttagagactacaaagcaggaaaacacctttaaaaagaaaggcaaagcataaacatctaaaaacttgtattttatgaaatttctcatgagtcttccttttgaaactgtatttgagtaaaggaagagggatctgaatgtttctacagactggctgcataatatattgctttcccataacaaaaatatgaagcactcattatatatgaagtttactattacaatgtggctacatttaaaaaattatggtaaagagggatagggaactttcagaaagctatctgaatgaaaatgtttgagaagaactgtttttaaatatttagagcagaagagattagctggaaatgcagggcagccatctcaacatctgtaagtatctcttgaaagagcaaactaaagagacaatgtcacagggataacaccctacagagaaatataaataaatgctaaagaataaagtttttagttgaagacacattctttaaattttaaaaattatgttacttaataacttggtacaaagtgcttgaccatgttgacattaccatgaaaatatctcatagctgccaaaatacaaaactataggagctgtcttctgctctaatggtaggaaggtgactttaattaagtattagtcttctatttacaacctgttagtggtagcagtaataatttggttcatttacaaatattatcaaagcttattcatttccaagatctaaacaaacacaggtattactagatgatggccattttatcaaagaaatgtttttaataataaactctccaaaacagaagaaagagatcaataatggccacccaa

SEQ ID NO: 190019 - DNA, 2110 bp, Homo Sapiens
cccaaccaaattgtaggaatcaagcatgatgtaagaattattatccagagaaaaagatggtgatttctcggatgataagactgtctttgtaaaactggtgcatatcaattagtcccatcctcacagctcaccttcaaaccacagggcttgtttctggctatgttaaaaggaccatcctctgaggaaagcagagaagaggaaactccattatccttacagtgaaacgcaaccactgcagaaaaactccactggtaaatagaacacagtttaataagtagattggatatgatctaactataaaatttaggtaacagagtaagtgtttacatgtggcaggaccggaaaaaaatcatgacattttttcttatccccttgtacccctcccactgtcattatgctattaccaacaacaacaagaataatgtttcaaattttcctctcatcaaaaaatgagagaaaataacgagggaagtgtttttgttctttttcgaacagtttcttgaacacctccaataccaatcactcacaaggtgtctgtgcaaatctatttcacaggatttcaaggaaattgttaactcacaaaaaaatccttaaatgaagctattttggagttctgtatattatttggaaaggagggaggaaaagggtggtggtggtaaagtagaggtaaagtagtacaatccagccaaacaaaatgttaaaagttttaaatcaacaatgagtctgactttttctggtttgggaagcaagactctaaaatgttgggagagattctttctgatctgatggctactgaagaacacatttctcctctttcttggccatcttgcctttgttttgctccagagttcgctccaaatgctcatcttcttcttcggcctgcttctcctgcgcgtccaggtccctgacgagcgcatcgcgcttgttcaccagggccaccagctcatctagcagaagctgttcgcgtcgcttctgggcctcggtcttctgccagtcttcaatggctagcattgccctcaattcccggttcagcagctcataccgtcgttctaaatcatgttctttttccagaagagagaggtgattcattctccttattaaggcatttttcttattaactaacataaaccattcctgcatcatagcttcttcttcttctgtgttccttcctgtgtccatgagatagcgaaggcgcttctccaccagcgcggcacgggtgtcaatttgcttttgctcattctctagtgctgccaattctcctactacatactgactggtgtctttgaaccctttattaagcacttcatcttctgatggcttcctctgagtttcagttatcgctgccttctcctcatttcctttctttgtatcttcctgtattgatctctgccttttcatctctggtctattctcaatatattggctgaaagactgaagttgagtttttctgactgtagaatctttgctgaacacaacaggatttctaaaacgttctgttgttttttgtaatcgttcagtccggagatcttctgtgccacttttcatgtcctgctctgagctctcagttacagctttctgggcagcactggagggtgaatttgccacctgtggctgaacttctaggagcttcttcagcttcaagtccaccaacttactgttttgttcgggagtatcaaggtcattttctaagttagtaagttcatctccacctcctacaacaaagccttcagggatctcctcgttagtatctatctcaatattatcattttcatctccagatgcctttgacctttctttcaacttttctgcagccatttcaccatagctgggaagttctgacatcttcactccagatcgagcttctgctattagctgacgagctctctctctcagctgccgacgtcgctcttcatcttgctgatcacttagctgcctgttgcagaatggggtggctgtgttggtattgtgcttattccccgcctttaaggctgcatctcttcttgcttgctcaagcagaactcttgctctttccttaagttcttcttgtctagataacaatcgatgcatatcagaaggttccaataatcgggaaattcctatgctggcccaa

SEQ ID NO: 190020 - DNA, 925 bp, Homo Sapiens
gcgcagacaagcccatgccggatggcgtcacggatcctcttaaccaagtcaggctggaaggcgtgcccgggaggccatctcaggaagaggatcaccctctcctccctgtacttgttatactgggggacacacaggctgtcctccacctcctcgaaggattccacaatgttatagatttccgagctgccgaaccgcaccccgttggggttgagggtgccgtcactccggccaagcatgacgatgcccccggtcttggggttgattctgcagtagtcgccatgagcccagatacctgggaatttggagaaatacgccttcctgtacttgttgccgttctcatcgttccagaagtgtgtgggctggcaagggatcggcttagtacacaccagctcgccgctctctccccagaccgcctttccttcctcgttccacgcttccacggccatgcccaggttccgggcctgaatctcccctttatacacaggaagagaaaaattgtggcccatgaagcaggagatgatgtcggtgcctcctgagatggagcccaggaggatgctgctcttgatgcacctgtagacatactcgtagctctgggctttcagtggggagccagtggacaggatcgtgtggagcatctggagactgtgggtttccaccggcttcatggccttctcttccagcactgacagccacttggccccagttaccaggacagtgatgcctatcctgtcaaccaggtcccagagcacattgggcgtgggcaccaggggggagccatcgtacaagaccatggccgctcctgtggccagaagggacaccatccagttccacatcatccagccgaccgtggtgtagcacaggaggatgtcactgctggtcatgttgccgtgcagcaggccaacttttttgtacaaagttggctttt

SEQ ID NO: 190021 - DNA, 775 bp, Homo Sapiens
  misc_feature (231)..(292): n is a, c, g, or t
aactttgtacaaaaaagttggataagcctcgcccgttccgctccctggggcttccccgagcgccgtcggtggtcatggctgccccagcctcccggcaggtccgacgcaaagcccgggcagcgccgcggccccgctcggccgaggactggtggtgggaccggctggcgccgaggggctcggggtaccacctgctgcagtccgacagcatgctgctggtgctgtccgaacccnnnnnnnnnnnnnnnnnnnnnnnnnnnnnnnnnnnnnnnnnnnnnnnnnnnnnnnnnnnnnngggccccagcgccgcggccaagcccaaggccgggctcaggtccgaggcggcggccgcgcccgcacccgcaccggcacccacgcccacgcccgaggaagggcccgacgcgggctggggagaccgcattcccttggaaatcctggtgcagattttcgggttgttggtggcggcggacggccccatgcccttcctgggcaggtaacgctggtgccgggcccgccgccgagcgtagcggcttgggccagacgtggtccgagcggtggcccgggcgggggcggagggcgaaagcatcggagcgcgcaccgctcagtccgagagcgcagccccttaggcgcccagttggagtcccaggagcccggctttgagccggggtgtctactgcgctgcgagaggggggcatcgcctacggaggggccggcaccctcagcacgctgtcctcccagggctgcgcgcgtgtgccgccgctggcaggaggccgcttcc

SEQ ID NO: 190022 - DNA, 1498 bp, Homo Sapiens
  misc_feature (797)..(845): n is a, c, g, or t
aggagcagccatcctaatgggtgtgaggtggttagataaaatcttaaggcacttatggctgggattctatgatcccattagaagtttaaggtatttgtagtagagttgcatgggtcagctttattaaccttgaacacacacattcacatttgacagcttgggtagacttgaaccaggattcatttagcttgggtggacgctactgttagtgaccaaagtgctgaaagtaatagttatcaagatatgctgtgctttgtatgtgataataacatgttcaaaaaatattttatcctttgaatttcattgtagacagagaatctgtctcatgagctatctttgaatggcgatgttctatttgttacgtgtgcggatctcatttcacctaacacctcatttccttccatttggacgacaagctctctagtgacgatgcggtgcggagggttttagctggagagaagggagaagtgaaaggccgggcctcactgacctcaagatctcaggaattggataataagaatgtgcgagaagaagagtccagagttcacaaaaatacagaggatagaggagacgctgaaataaaagagagaagtacaagcagagatcgaaaacagaaggaagaattgaaagaagaccgcaagccaagagaaaaggacaaggacaaggagaaggccaaggagaatggcggaaacagacacagagaaggggagagagagagagccaaagcccgggccaggccagacaacgagcgacagaaagacagaggcaacagggagcgggacagagactccgagcgnnnnnnnnnnnnnnnnnnnnnnnnnnnnnnnnnnnnnnnnnnnnnnnnnctgagagacagggaccgagagcgcgaccgggacaaagggaaggacagggacagacggagagtgaaaaacggggagcactcctgggacctggacagggagaataacagagagcatgacaaacctgagaaaaagtcagcaagctcaggggagatgtctaaaaagttatcagatggaacttttaaagactccaaggctgaaacagagactgagatttccactagagcttccaagtcattgacaacaaaaacatcaaaacggcgatccaaaaattcagtggaaggtgactccaccagtgatgcagaaggagatgctggacctgctggccaagataagtctgaggtgccagagactccagaaattcctaatgagctttcatccaacatcagaagaattcctcggcctgggagtgcaagaccagcccctccccgggtcaaacggcaagacagcatggaggcgctacaaatggataggtcaggcagtggtaaaaccgtttcaaatgtgattacagagtcacacaattctgacaatgaagaggatgatcaatttgtggtggaagctgcctctcagctctctgaaatgtcagaaattgaaatggtaacagcagtggaactagaagaaggagagaagcatggtggacttgtgaaaaaaatttt

SEQ ID NO: 190023 - DNA, 974 bp, Homo Sapiens
taatatgtcacaagatcatgagtaaaagaagtccaaacaaaattcattttttcttgtaacagtgtcttttaaatttctttactacaacctgagtctgttttccattctctcaatttgaaagaagtcttaatcatcattgcttttactgttgatataactccaactgtctcttctgttttcttcttgtaggatagatttgtattgtcttttaaagaagccagccttccacataacatatgagatcaacagaagtacaataagtccaagtagcaagctacttgaaataatcactatggtgaaataacgtttgggtctttgatgatgtagtccttccagtagaacatgcgcaacattctcatccttgtttagttcaattactcttggatttggctctggaaaacctgttgctcttatttcaaacttgagtgctgaagtctcatccatttctaaaatggatggccggccttccagttggatatgaacactggcttcttttccactttccattttcccaaaattacacaagaaatttaaacaatgtggatcagcttttatgcagtacaatagcctcttatcagtcttggacaagaaccggactatgcctttcaaggtctgcattgcactcttttgctgctctaatgcacacactctttgataattttcaaagtggcattctccagtagtagtctggacatccaaaatgttgaacagcttatcagtttgggggctaaaagaatttggtaccattatttccacactaacattgggagccatactattgccagtgttgataacatggaaagttaagttcattttctccaccatgcacgtttcaggctcattttcatcatttgatccatacacaaatgaagttgggtttacaaacccatgaacagtcagcttaacctcatattttaaaggtattgctacagtcactctgctgtgctttagattgtccatttcctcttcaccaa

SEQ ID NO: 190024 - DNA, 559 bp, Homo Sapiens
gtacaaaaaagttgggcacaggatccacatcgaatcttctgtgggccaagagatgttccttaatccttgtagaacctgttttctatattgaactagctttggtacagtagagttaacttactttccatttatccactgccaatataaagaggaaacaggggttagggaaaaatgacttcattccagaggcttctcagagttcaacatatgctataatttagaattttcttatgaatccactctacttgggtagaaaatattttatctctagtgattgcatattatttccatatcatagtatttcatagtattatatttgatatgagtgtctatatcaatgtcagtgtccagaatttcgttcctaccagttaagtagttttctgaacggccagaagaccattcgaaattcatgatactactataagttggtaaacaaccatacttttatcctcatttttattctcactaagaaaaaagtcaactcccctccccttgcccaagtatgaaatatagggacagtatgtatggtgtggtctcatttgtttagaaaaccacttat

SEQ ID NO: 190025 - DNA, 1784 bp, Homo Sapiens
gagcaatgctttttctataatgccaactttgtacaaaaaagttggcaacaatggttgttttcctttcctgccaactcttccacaaagaagttttgcgacagagcatcagccacaagtatttgatgcgaggtccatgtcttccatacaccagcaaacttgtgaagaccttattatataactttatcagacaagaaaagccacctcctccaggggcccatgttttccctcagcagtcggatgggggaggactgctttatggacttgcatcaggagtagcaacaggactctggactgtcttcacactaggtggtgtgggcagcaaagcggctgcctctccagagctttcttcccctctggccaaccagagtctcctgcttctgctggtgttggccaatctgacagatgcctcagatgcgccaaacccctacagacaagccattatgtccttcaagaacacacaagatagcagtcctttcccctcatcaattccacatgccttccagatcaactttaatagtttgtacacagctctttgtgaacagcagacatctgatcaagcaactctcctcttgtataccttgctccatcaaaatagtaatattagaacatacatgttggctcgcacagatatggaaaatcttgttttaccaattcttgagattctgtatcatgttgaagaaaggaattcacaccatgtgtatatggcccttataatattgttgatccttacggaagatgatggcttcaacagatccattcatgaagtgatactaaaaaatattacttggtattcagaacgagttttaactgaaatctccttggggagtctcctgatcctggtggtaataagaaccattcaatacaacatgactaggacacgagacaagtaccttcacacaaattgtttggcagctttagcaaatatgtcggcacagtttcgttctctccatcagtatgctgcccagaggatcatcagtttattttctttgctgtctaaaaaacacaacaaagttctggaacaagccacacagtccttgagaggttcgctgagttctaatgatgttcctctaccagattatgcacaagacctaaatgtcattgaagaagtgattcgaatgatgttagagatcatcaactcctgcctgacaaattcccttcaccacaacccaaacttggtatacgccctgctttacaaacgcgatctctttgaacaatttcgaactcatccttcatttcaggatataatgcaaaatattgatctggtgatctccttctttagctcaaggttgctgcaagctggagctgagctgtcagtggaacgggtcctggaaatcattaagcaaggcgtcgttgcgctgcccaaagacagactgaagaaatttccagaattgaaattcaaatatgtggaagaggagcagcccgaggagttttttatcccctatgtctggtctcttgtctacaactcagcagtcggcctgtactggaatccacaggacatccagctgttcaccatggattccgactgagggcaggatgctctcccacccggacccctccagccaagcagcccttcaagttcttttatttctgggtaacagaagtagacagacaggttacttggtgtatcttctgttaaagaggattgcacgagtgtgttttcctcacacactttgatttggagaattggtgctagttggcaatagataactcagcgtagatagtattgcaaaaaggggaggaaatacacaacaataataaatgtaaaaacctgctaacaacgagaa

SEQ ID NO: 190026 - DNA, 557 bp, Homo Sapiens
tacaaacaatgtaataacattatatgaactgtgtttcctacttgattaaaaaatataaagaactgagtgtttatttccctaattaaccaagaacttttgtacacgtttaagctattattattaaaaagtgtttgcaaaatggtcaagattataatattgctgaattatataaaagtccttttcatgttgagctaacatttgactttagcacaaaaaagagatattttagaacacgtaaaataatatttttagtttttctcattttgttaccaatttcaaaccttacatggaggttattatagtatatttgacaccctatatacctgtgattagagatgtgtatatatatgagggctaggcatgctgtgtgtctgagctttgtctaaatgttatgcagaagtttgtagagttaaaggtacgtaggtttaattcatgcaaggtaaacaataagtgctctcttttatacaatatgcattgcatctggaccttaaacttataaaaatggtcagtgaaacttctgtgaacatgaagaaattattaaaaaaggcatttaaatg

SEQ ID NO: 190027 - DNA, 944 bp, Homo Sapiens
ctttgtacaaaaaagttggctcaacttcggcctggcccgggagcaggcccgggctgaaggcatcccggtggagatggtggtgattggggacgacagcgccttcactgtcctgaagaaggcaggccggcgggggctgtgcggcaccgtgcttatacacaaggtggcaggtgctctggctgaggctggtgtggggctggaggagatcgcaaagcaggtgaacgtggtcaccaaggccatgggtaccctgggggtgagcttatcctcctgcagcgtccctggttccaaacccaccttcgagctctcagccgacgaggtggagctgggcctggggatccacggggaagctggtgtgcgccggataaagatggcaaccgccgatgagattgtgaaactcatgctcgaccacatgacaaacaccaccaacgcgtcccatgtgcctgtgcagcccggctcctcagttgtgatgatggtcaacaacctgggtggcctgtcattcctggaactgggcatcatagccgacgctaccgtccgctccctggagggccgcggggtgaagattgcccgtgccctggtgggcaccttcatgtcagcactggagatgcctggcatttctctcaccctcctgctggtggatgagcctctcctgaaactgatagatgctgaaaccactgcagcagcctggcctaacgtggctgcagtctccattactgggcggaagcggagccaggtagcccctgccgagccccaggaggcccctgattccactgctgcagaggctcagcctcgaagcggatggcgctggtgctggaacgggtgtgcagcactctcctgggcctggaggaacacctgaatgccctggaccggctgctggtgacggcgactgtgccaccacccacagccgtgccgccagagcaatcccgaatggctgaaggagggcccacccc

SEQ ID NO: 190028 - DNA, 920 bp, Homo Sapiens
ttggctaaatccccccaaggcctggtggaagctggagaactccacagcgccaatcaggagccctgccctcattggctgcttcattgtggaccggcagtacttccaggagatcggcctgctggacgaaggcatggaagtctacgggggcgagaatgtggagcttgggatcagggtgtggcagtgtggcgggagtgtggaggtcctgccctgctcacggattgcccacattgagcgagcccacaagccctacacagaggacctcaccgcccatgtccgcaggaacgctctcagggtggctgaagtctggatggatgaatttaaaagccacgtctacatggcatggaacataccgcaggaggactcaggaattgacattggggacatcactgcgaggaaggctctcaggaaacagctgcagtgcaagaccttccggtggtacctggtcagcgtgtacccagagatgaggatgtactccgacatcattgcctatggagtgctgcaaaattctctgaagactgatttgtgtcttgaccaggggccagatacagagaatgtccccatcatgtacatctgccatgggatgacgcctcagaacgtgtactacacgagcagtcagcagatccatgtgggcattctgagccccaccgtggatgatgatgacaaccgatgcctggtggacgtcaacagccggccccggctcatcgaatgcagctacgccaaagccaagaggatgaagcttcactggcagttctctcagggaggacccatccagaacccgcaagtctaagcgctgtctggagctgcagagaataagcgacctgaagttcgctttccagctggtgttgcagaagtgctcgggccagcactggagcatcacccaacgtcctgaaggagcctggcgttcttgacccaccggggcc

SEQ ID NO: 190029 - DNA, 1563 bp, Homo Sapiens
ttgcttgaaatccttcaacatgatcctgattctatcttagacacgttaacttctcggaggctgatttctgaggaagagtatgagactctggagaatgttacagatctcctgaagaaaagtcggaagctgttaattttggtacagaaaaagggagaggcgacctgtcagcattttctcaagtgtttatttagtacttttccacagtcagctgccatttgcggcttaaggcatgaagttttaaaacatgagaatacagtacctcctcaatctatgggggcaagcagtaattcagaagatgctttttctcctggaataaaacagcctgaagcccctgagatcacagtgttcttcagtgagaaggaacacttggatttggaaacctctgagtttttcagggacaagaaaactagttatagggaaacagctttgtctgccaggaagaatgagaaggaatatgacacaccagaagtcacattatcatattcagttgagaaagttggatgtgaagttccagcaactattacatatataaaagatggacagagatatgaggagctagatgattctttatacttaggaaaagaggaatatctaggatctgttgacacccctgaagatgcagaagccactgtggaagaggaggtttatgatgacccagagcacgttggatatgatggtgaagaggacttcgagaattcagaaaccacagagttctctggtgaagaaccaagttatgagggatcagaaaccagcctttcattggaggaggaacaggagaaaagtatagaagaaagaaaaaaggtgtttaaagatgtcctgttatgtttgaacatggatagaagcagaaaggttctgccagattttgttaaacaattctccttagatcgaggatgtaagtggacccctgagagtccaggagacttagcctggaatttcctgatgaaagttcaagcacgagatgtgacggctagggattcaatcctcagtcacaaggttctggatgaagatagcaaggaggatttgctggctggagtggagaatttggaaattcgagacatacaaaccattaatccccttgacgtgctttgtgccaccatgctgtgttcagatagctctttgcaacgccaagtcatgtcaaacatgtatcagtgccagtttgctcttcccctgctactgccagatgcagaaaacaacaaaagcatcttaatgctgggggccatgaaagacattgtgaagaagcagtcaacacagttttcaggggggcctacagaggatacagaaaagtttctgactctcatgaagatgcctgtcatctcttttgtgcgtctaggatactgtagcttctctaagtccagaatcctcaacacacttctcagccctgcccagttgaaattacacaaaatctttcttcatcaagatttgcctcttttggtgcttccccggcaaatctctgatggcctggttgagataacatggtgttttcctgatagcgatgatagaaaggaaaacccctttttccaaaagcctgttgctctggctaatctccgtggaaatctagaaagc

SEQ ID NO: 190030 - DNA, 1349 bp, Homo Sapiens
ttggcacggagaagactccctctctcggaagccggatcccgagccgggcaggatggatcaccaccagccggggactgggcgctaccaggtgcttcttaatgaagaggataactcagaatcatcggctatagagcagccacctacttcaaacccagcaccgcagattgtgcaggctgtgtcttcagcaccagcacttgaaactgactcttcccctccaccatatagtagtattactgtggaagtacctacaacttcagatacagaagtttacggtgagttttatcccgtgccacctccctatagcgttgctacctctcttcctacatacgatgaagctgagaaggctaaagctgctgcaatggcagctgcagcagcagaaacatctcaaagaattcaggaggaagagtgtccaccaagagatgacttcagtgatgcagaccagctcagagtggggaatgatggcattttcatgctggcatttttcatggcatttattttcaactggcttggattttgtttatccttctgtatcaccaataccatagctggaaggtatggtgctatctgcggatttggcctttccttgatcaaatggatccttattgtcaggttttctgattattttactggatatttcaatggacagtattggctttggtggatatttcttgtacttggcctgctccttttcttcagaggatttgttaattatctaaaagtcagaaacatgtctgaaagtatggcagctgctcatagaacaaggtatttcttcttattgtagagactgcatcaacccgacattcctttcttataccaatgtgaaatttccagatcatctgtaaacctacaactttaatagaagactactaataacagaagacaaattagtgaagaaaagacagagtttcgaaattgaatggcagggtggtttttgcttacaagccatttctgttcattctttaagtatctatatttcatttgttttgcacatatgcatatgtgcccatttaagatatttgcatatacttgatagaaaccataaagttgtagcagttaagtccagtcacatttggttaatcagtgtttgatataattgaaagagttgagtggataaacagtcttccagcttgtaaatgccattgacttctgacctgacatttagtataataaaaatgaaattcttaaccatgtcaaatgatttagtttctggctcttagactcatctggcagttctacacatgaaacatcttttgttatataagtgtattgaaacctgcagtgctgattaattagaaaggatttgtcagatttttgaacatgatatttacattattatttagaaaactctt

SEQ ID NO: 190031 - DNA, 1319 bp, Homo Sapiens
  misc_feature (186)..(246): n is a, c, g, or t
acgacatgattcctatggcaatcagttctccacccaaggcaccccttctggcagccccttccccagccagcagactacaatgtatcaacagcaacagcagaattacaagcggccaatggatggcacatatggccctcctgccaagcggcacgaaggggagatgtacagcgtgccatacagcactgnnnnnnnnnnnnnnnnnnnnnnnnnnnnnnnnnnnnnnnnnnnnnnnnnnnnnnnnnnnnnacaagctgcccagccttcccctcagcaagatgtatacaaccagtatggcaatgcctatcctgccactgccacagctgctactgagcgccgaccagcaggcggcccccagaaccaatttccattccagtttggccgagaccgtgtctctgcaccccctggcaccaatgcccagcaaaacatgccaccacaaatgatgggcggccccatacaggcatcagctgaggttgctcagcaaggcaccatgtggcaggggcgtaatgacatgacctataattatgccaacaggcagagcacgggctctgccccccagggccccgcctatcatggcgtgaaccgaacagatgaaatgctgcacacagatcagagggccaaccacgaaggctcgtggccttcccatggcacacgccagcccccatatggtccctctgcccctgtgccccccatgacaaggccccctccatctaactaccagcccccaccaagcatgcagaatcacattcctcaggtatccagccctgctcccctgccccggccaatggagaaccgcacctctcctagcaagtctccattcctgcactctgggatgaaaatgcagaaggcaggtcccccagtacctgcctcgcacatagcacctgcccctgtgcagccccccatgattcggcgggatatcaccttcccacctggctctgttgaagccacacagcctgtgttgaagcagaggaggcggctcacaatgaaagacattggaaccccggaggcatggcgggtaatgatgtccctcaagtctggtctcctggcagagagcacatgggcattagataccatcaacatcctgctgtatgatgacaacagcatcatgaccttcaacctcagtcagctcccagggttgctagagctccttgtagaatatttccgacgatgcctgattgagatctttggcattttaaaggagtatgagtgggtgacccaggacagagaacgctactggatcctgggagttcagcaaggtgtctagtccagctctcatggagggtggggaagaagaagaagaacttctaggtcctaaactagaa

SEQ ID NO: 190032 - DNA, 737 bp, Homo Sapiens
tggcgcagacctccccctttttaatgctgttttcccccggactcctgccatgcccccagactttctttttcccacggatatgggctcattccaaggaaagggtggcatttggacacaaggccctagatcccacgatggaggactggggggtacctgatgcccctcagaaagaggcctgcagggacagcacatgggaaagccccatggctttgtgatccatctggggatgtgatccatttgggtaaggacttgggtttcagggcatgagttggcttccttgcaggatgcaggtccttaggtgggtggcctctgtctccagctgtagggccctgccaggaagcctctatatgagcctacctccctcctgcaggaccagagaggggttgttatgaacagcccaggggattggttgcactaagcttgtcttgaagcttttgctggggagtccaggtgcccatgtctctcacctgctccccatacacatctctgcacacctggctgaggcattcccagacctaacctcagatatgtgcatgtgatgaacactcccaagtggctaggcctcttgcacctgagcaggtggattctgccccagcactggggctttctctgggctgtccatcatgggtatatctctggattccaggattgctagttagcacctcacatttgagggtctgtgctattcagtctagaatcagagttggatgagaaatcaactttgaacaccacctttg

SEQ ID NO: 190033 - DNA, 891 bp, Homo Sapiens
  misc_feature (753)..(772): n is a, c, g, or t
ctttgtacaaaaaagttggaatatttttaaagtatggtttttgaagatagtaggaaatggagtacagaaaggcatacagtattatgttacagtggagtgctttcaagagcatttcgtaggatctgtccccatccgaagaggctttgtgaactgcctgctgaatggaaggaaagcaactttaaaacatttagagttttgctgagtatagccaaatgcctgttctgaaacttataggaaattggaattttgtttaaaattttacactttaaggtagcaaatgtcaattattagaccgagcatattgtgaagaattaaactaaaattaatacgtacagttttctctaattaggtgactgttcataatgggtatatttggaatttagaagaaataattttgtagtaattgtggcccttatgtttaacagataattcagcattggcgtatttgcttgtcccaatacaagaatgccaaaggaggaaacaggaaaaattgccgtccattttaaaaatttaggtttgttgttttaaaccataattgttctcagaacttctttggaacttctaattttgggtcatttaatttaagaatgagagtcatgatgttttgatttatgaaggtgaatttaatgcaaaagtgggtaacactacattcatagcaaagttttttattaaattttataaatttttaatagccaattatgtcctaattgtattttggggaatgaacagcagcaaatactgtaaatgtacagnnnnnnnnnnnnnnnnnnnnggttatgtataccaaagttttaactactttttggtgtttatgaaaatcatttagttgacaaagtgcctatgccattgttaaattttctttaagtaattttacaacagatttgctaattt

SEQ ID NO: 190034 - DNA, 858 bp, Homo Sapiens
ttgggatgattcataggggagagatttgaacaagcagaattaagtgttagcaaaaatgctgcattgctttgattcatgtttaaagacctaaatttctatgcacaaggaataaagggcctacttaccaagtgtaaatcacaacataggctaccaaaatatttcttatttgctaggagaacaaagctgtcacggtgcatgatagttggacagagatggctaaaaaagaggcaaattcagatttggaaacagggtggcctcttcattatttattgccaagatctgaaaatcttcaacatcttataagacaacaatgaagtagcccctgaacagcatggagttgctgtgagtttgttcgttgcagacctttgtgttgggtcctgggaatctgagctttgttccctgtgcatggtggataattgaaaccaagaggacatgggatagaccttgtgacagaccaattctgtgacccctgtcttctgggtcacattattcattgttgatttaaatacaggactaccaaacagtacaaatctatcatgagtctggtagaaaagtaaaagtaaaagctgcacacgttacatactgtttattgttctaatgtacaactaactatttgcatataatgtgatttaatttattgctgttttgtgtagaaaaggagaactaatgactgtggatataacccatgttttgtataatatattttatttcttgtgcgaactggtcatttaaaatatctacttcatttgatgtttggatataaatgtgtatgtgtccttgtaaatgtttctatcaagcaagaatggcacgtactcagagtataacaatgtgttctcattacaaaatacatcatcaccg

SEQ ID NO: 190035 - DNA, 784 bp, Homo Sapiens
gtacaaaaaagttggctgttacccctcattctgatgcagctcagacaggctgaccagcaagccagcgaggatgaggactgaggctcaatttggagacacggtcctatgtgacctcagggtgcaggcggggtgaggtgtggagatggaagtaggcctctcctcatcctcccttcacctcaggatgccctgtgggagggtctgtagggtctgtgtcccctcctcatctttcactgcaggttgtgctgaatcagaagttcactgactgctttgtgctagtgtttctggactcccacttaggaaagacgtctctgacagtggttttccgagagcccttcccagtacagccccaggacagcgagagcccccctgcccaactggtctccacctaccaccacctggagtctgtcatcaacacagcctgtttcaccctctggacccgcctcctctgagggagtggactggaccactgaatgtcactgttccttgaatcatgggcctaccagattgcctgccagaggcaggactgaccagcccttctgggccccagggcaagccagacactgagtgacaccaaaggctttgtaactatgtcttgagggtctgctgccccagcctggcagcaggaaccgccctcccaaacacccacagccactgacccatccaggactccagagagtcaggtcaaccccgaggaccccttgggcccttctggggtactcctttcggcccccctggtagagtctcgggagttcacacagggtggcaaacaccccctaaagctcct

SEQ ID NO: 190036 - DNA, 1447 bp, Homo Sapiens
  misc_feature (507)..(530): n is a, c, g, or t
ttggcccagatgcagatgagctctttgcagatgccaggaatgaacactgtgtgccctgagcagataaatgatcccgcactgagacacacaggcctctactgcaaccagctctcatccactgaccttctcaaaacagaagcagatggaacccaggacaagaagacagaagagttcttctctgtggtgactacagactagaggaatgctctacaggtgcaacaggttcaggtgtttgctgacgtccagtgtacagtgaatctggtaggcggggacccttacctgaaccagcctggtccactgggaactcaaaagcccacgtcaggaccacagaccccccaggcccagcagaagagcctccttcagcagctactgactgaataaccacttttaaaggaatgtgaaatttaaataatagacatacagagatatacaaatatattatatatttttctgagatttttgatatctcaatctgcagccattcttcaggtcgtagcatttggagcnnnnnnnnnnnnnnnnnnnnnnnnggagttggcttttgtcgggagattgaaagatgtttttgtttctttctttgtaaaggccttggatattgaaaaaataccaaggcagaacagttggacaatctatttcttgagccaaatttaattattcttatttttgtaatcagtcattggcttcttatgtggatgaaggcttttggaggagaaccaaaacgacaagttccaagaagaagatgaagctccgcctccgccgcttagtcccaaccctgcccaggaagaagggcccgtggggctttgcctgtgcccgtccaccaaaggctgtcatgtgtctcgaaatcagcagccctccccatcccaatcccaggcagcttgtgtgtacaatcagcttctctagcaactctgtatctgttggcttcaagagaatattttgcctccacatatgtaccccttctcctttttttaaagatggatttaaaccaagatgcctccaggaaagaggacgaaatgagtacattcacagaggaatccaaaaaatacagtttgggggaaaatgcaataatttttgatgagatgggtgaaggacaagaagtgagttgtgtcaattattgtagatacaattttctgattaaatctggaaaaataaaaggcagcctgttttttctgcttttattgtattaacagctgaggtagctaaagttatttaaaataaaattaaatttatgatccaagtagcttatttttccctttaaatctcattgtaaatatatttgatttcttgtagaaattgatttccttctgtttaattttatgcttttattatactcttgatttttctaaatttgtgtgtgaaatataacattgattgaattgcagttacatttgggttagaatatttcattattttaataactgtgatgtcatgtatggatttacttttgggg

SEQ ID NO: 190037 - DNA, 853 bp, Homo Sapiens
ttggaaaatgcgctccagcagcctgtttgggaagcagcagtctctccttcagatactgtgggactcatgctggagaggagccgcccacttccaggacctgtgaataagggctaatgatgagggttggtggggctctctgtggggcaaaaaggtggtatgggggttagcactggctctcgttctcaccggagaaggaagtgttctagtgtggtttaggaaacatgtggataaagggaaccatgaaaatgagaggaggaaagacatccagatcagctgttttgcctgttgctcagttgactctgattgcatcctgttttcctaattcccagactgttctgggcacggaagggaccctggatgtggagtcttcccctttggccctcctcactggcctctgggctagcccagagtcccttagcttgtacctcgtaacactcctgtgtgtctgtccagccttgcagtcatgtcaaggccagcaagctgatgtgactcttgccccatgcgagatatttatacctcaaacactggcctgtgagccctttccaagtcagtggagagccctgaaaggaggctcacttgaatccagctcagtgctctgggtggccccctgcaggtggcccctgaccctgcgttgcagcagggtccacctgtgagcaggcccgccctggggcctcttcctggatgtgccctctctgagttctgtgctgtctcttggaggcagggcccaggagaacaaagtgtggaggcctcggggagtggcttttccagctctcatgccccgcagtgtggaacaaggcagaaaagatctaagtatataagtctcttggcggtcccctgaagagtcctgctgaaa

SEQ ID NO: 190038 - DNA, 1443 bp, Homo Sapiens
ttggggagaatctcagccccatgggctctaattgattgggacttgtgtagagcgtggtcacagtttaatccaactggactgtatgctgtggtctcactcatgttgtggcttatttacactgtcacacacactacattgtggatcagttggaaggttcttcatctggtttatttagacctgacctaattgatcattttaccataaattgaattatagtgaaaactgtcttttgggtactgtttctacctaaaattaaaggtatcacaaaatatgtataataatttttaaatgaattttctgaatttatctttagacaaggtaattcttttgaattctaaagaaatgcagttcttggagttgatgagaggttaaattatagatggacaacttagagaacgtattccatcttcatataaatggtctttcataaaacatagtgtatctatgcagtttatataaactacatgatttattatttgagtctatgtattctgacctcagaactatctctgggctacagtattaccaaagtgggatgcctttaaaatgcagtcaaacttcatttgtatgaagtagaaaagaacttgggaaacctttaaaaatatatattgtgatttatgctttaagaaaatgcatacttttttctaatgaagagtagttcataatatataagggttttaaggccctgaaataacattagtgcttactcattgctctctcatcttgcctccagtcagatgttattggtatagtgaaaagaagaccagattttgaactagatctggattctctttttagtaactcaggcatgttatttaaccttctctgtgccttaggtttttaagtacaatcagtgtacccttcaaacctcacaagatgaaactcagaagagataatggatttggaagcattttgcgtggcttatattatgccacgccagtgttactgttgaagttctgttttgttctgttgttttctgtacagagcgttcagtttactcaggctgaatgttttctgacatatatctccagtatgaatttgtttatgtaaggaagagtttttcaggaagagaaagtagagaagaaaagaatgatgtaactaaatcaaaaaagaaggaaaagagaggaagtgagaaaaggggtgaggaaagagaaaggagtaagaatggggatggcaaagggcagagtaagagaaaagatggaatgagtgtatggcaaatcgagaagtagagatggagagaaatggtgtggaaacatttactttttgagttgtagccctcacactacatcagttttgcttgcctgggctctctggggtcaggaaaggtgctgacttccatggaatgaggcagcagggcctgctgtatttggtttgttagtactagagttgtttcccaatcaccctactcactgatcatttagtgccaattcaacattttatgtc

SEQ ID NO: 190039 - DNA, 170 bp, Homo Sapiens
aaaaagttggggcgtctccgcgatgggccccggggacttccgccgctgcagagagagaatttcccaggggctccagggactcccaggtagagcggagctttggttcccacctcgtcccgcgtgcgacttcttcggggacggcaggagcacggacatccaggaggagccaa

SEQ ID NO: 190040 - DNA, 721 bp, Homo Sapiens
ctttgtacaaaaaagttggagcagttcctgccccgtggtcaccagcccccgcctgagatggctggacacagcctagccagctcccacagaaactccatgatacccagcgccgcaaccctcatcattgtggtgtgcgtgggcttcctggtgctcatggtcgtcctgggcctggtgcgcatccattcccttcaccgccgcgtctcaggggccggcgggcctccaggggcctccagtgaccccaaggacccagacctcttctgggatgactcagctctcaccatcattgtgaaccccatggagtcctaccagaatcggcagtcctgtgtgacgggggctgttgggggccagcaggaggatgaggacagcagtgactcggaggtggccgattcccccagcagcgacgagagacgcatcatcgagacccccccacaccgctactaaggcctacacctctccccacgcagagggggaattctgccctggtgaaacagacactccagacatgggagaaggactttctgggaacacagagaccaagagggagagaggcttcacaaccagtcctcctttcatttcaaaaccccatcgggccctctggagtccgccctgcccctcccccggccccccatccctcacttctgggctgtcatgctcctggtgtgccccttgcactgggggctggctgggttggaaagtggtctggacttcagctgcctttcta

SEQ ID NO: 190041 - DNA, 1298 bp, Homo Sapiens
ttggctcaggactgatcgccgggatccccgggaaacagctttgaagtgtggagcgggaaaggagcagtttctgagctgcaaaaactagtttctaaacagagagttaattgttaaatccagtatggccacaggaggaggtccctttgaagatggcatgaatgatcaggatttaccaaactggagtaatgagaatgttgatgacaggctcaacaatatggattggggtgcccaacagaagaaagcaaatagatcatcagaaaagaataagaaaaagtttggtgtagaaagtgataaaagagtaaccaatgatatttctccggagtcgtcaccaggagttggaaggcgaagaacaaagactccacatacgttcccacacagtagatacatgagtcagatgtctgtcccagagcaggcagaattagagaaactgaaacagcggataaacttcagtgatttagatcagagaagcattggaagtgattcccaaggtagagcaacagctgctaacaacaaacgtcagcttagtgaaaaccgaaagcccttcaactttttgcctatgcagattaatactaacaagagcaaagatgcatctacaagtcccccaaacagagaaacgattggatcagcacagtgtaaagagttgtttgcttctgctttaagtaatgacctcttgcaaaactgtcaggtgtctgaagaagatgggaggggagaacctgcaatggagagcagccagattgtaagcaggcttgttcaaattcgcgattatattactaaagctagttccatgcgggaagatcttgtagagaaaaatgagagatctgctaatgttgagcgccttactcatctaatagatcaccttaaagaacaagagaagtcatatatgaaatttcttaaaaaaatccttgccagagatcctcagcaggagcctatggaagagatagaaaatttgaagaaacaacatgatttattaaaaagaatgttacaacagcaggagcaactaagagctctacagggacggcaggctgcacttctagctctgcaacataaagcagagcaagctattgcagtgatggatgattctgttgttgcagaaactgcaatagcttatctggcgtcagtatcacatctgaactaaatgaagaattgaatgacttaattcagcgttttcataatcagcttcgtgattctcagcctccagctgttccagacaatagaagacaggcagaaagtctttcattaactagggaggtttcccagagcagaacatcagcttcagaacgtttacctgatgagaaagt

SEQ ID NO: 190042 - DNA, 979 bp, Homo Sapiens
gccaactttgtacaaaaaagttggatttcaatgaccctggttcaccatgttttaaccggctgttttatgctgtggatgttgacgacgatatttgggaagatgaggtagaagactagttaactactgctcaagatatggaagtggattgtttttccctaatcttccgtcaagtacacaaagtaactttgcgggatatttagggtactattcattcactcttcctgcgtagaagatatggaagaacgaggtttatattttcatgtggtactactgaagaaggtgcattgatacatttttaaatgtaagttgagaaaaatttataagccaaaggttcagaaaattaaactacagaatattaaatattataatgtgcccaaagctctgaatagttaaaaattaaatatttattttcttccccaagctttaggtaaggagaagaggggtcaagagttaaacttagagaccctttgtctctgagaagcatccttctaagacattctgttggagttccctcagtactattccttacaactggagtgggtagaagccttatgaaaattatactgacaacctgatctcgtttactccatgttaatcacattcctaccaacctaaatttctgccaagtcagttctctttggaggaagcccattactccataactgactggatggtccagtgtcattttgatctgcttttcagaatggaatttataatataaatatatgttttaataccacaaacactgtggggcacttgatatttattagtggtgtatatggtccactggtttcaagccaaatctaaaatttagtgatactggctcagaagattttaatttctatccgcttttcctgggtggtaaaaacctagattcaaaatgggcttgtctttgctacttttgttccacaattctccctctttacctttgcctacccttctggtttgtagggatgaatttaatattaaatttccagga

SEQ ID NO: 190043 - DNA, 947 bp, Homo Sapiens
ggacttcaaacttgaaagaatatagtatttcggtaacttatatgtggctaaccatcaaatacatagtcatctaagctaaactttctgtatttatacagtttaacttataaaccaaaaattttaatgaggttaattttaaatatattttagaaattacagtttgtatctgtttcttagtaggtgtggcctttaaaatatgtgcttattcattgttaaattccagaataatagagtaatacttaatactgtacattcccacttacgtatattttattaaaatttataagcaagaaattatacataagtggtcatgatcttagggagacaaagaatttctcttagaaaagagaagtaatggtaatgtaaataaaaatactgtttatattcacatgattttaagaaaactgtaaaagcaaagattttgtagtaatgacacaaatgtaacaaatagatgttttcttaaaattggcagtcagtataattatgtttctgcctatgatgttgaggaagttgtatcagtctgattcttagttttttcatctgttaagtagaacgtactattacttaccttaaagggtggctttgagaattttgtaaggaacaaacatgtttttggttctggaatataggaggtgctcaataaaagttgactctgactggcaaataatattgttttgtaaatgcatgatgattatttttgaccatatttgacttagtttcattaggctaatgttaattggtactatatgaaagtgagtcaactaattataaaagattagaaatgtcttaggtgacgatgggggaaaaacttaaaatttttgcataaattatggagagatgatagagttattacagtgttattaagtattcctatgttgcattttgcaaatacttaatacagatgaaaataatcttgagtcacaataaagtaatgatatgttaagttt

SEQ ID NO: 190044 - DNA, 926 bp, Homo Sapiens
ctttgtacaaaaaagttggggtgactgaaccattgcttctgctttcggggatgcagctggccaagctgatccgacagagaaaggtgaaatgtatagatgttgttcaggcttatatcaacagaatcaaggacgtgaacccaatgatcaatggaattgtcaagtacaggtttgaggaagcgatgaaggaggctcatgctgtagatcaaaagcttgcagagaagcaggaagatgaagccaccctggaaaataaatggcccttccttggggttcctttgacagtcaaggaagctttccagctacaaggaatgcccaattcttctggactcatgaaccgtcgtgatgccattgccaaaacagatgccactgtggtggcattactgaagggagctggtgccattcctcttggcataaccaactgtagtgagttgtgtatgtggtatgaatccagtaacaagatctatggccgatcaaacaacccatatgatttacagcatattgtaggtggaagttctggtggtgagggctgcacactggcagctgcctgctcagttattggtgtgggctctgatattggtggtagcattcgaatgcctgctttcttcaatggtatatttggacacaagccttctccaggtgtggttcccaacaaaggtcagtttccgcttggctgtgggagcccaggagttgtttactgtgcactggtcctatgtgccgctatgctgaagacctgggcccccatgttgaaggtcatggcaggacctggatcaaaaggttaaaactagacacaaagggtacattttaaaagacttaaaatttactggatggaacatgatggatgctcatttttaatgtcaaagttggaccagatctcctttatgactcagaaaaggtaattttaattaaaatttcgttaagaaatattttta

SEQ ID NO: 190045 - DNA, 590 bp, Homo Sapiens
cttataaaaaccaactttgtacaaaaaagttggctcggagtcggtgggtgcagatggcggcggcagttgtggtggcggagggggacagcgactcccggcccggacaggagttgttagtggcctggaacaccgtgagcaccggcctggtgccgccggctgcgctggggctggtgtcttcccggaccagcggtgcagtcccgccaaaggaagaggagctccgggcggcggtggaggttctgaggggccacgggctacactcggtcctggaggagtggttcgtggaggtgctgcagaacgatctgcaggccaacatctcccctgagttctggaatgccatctcccaatgcgagaactctgcggatgagccccagtgccttttgctactccttgacgcttttggcctgctggagagccgcctggatccctacctgcgtagcctagagctgctggagaaatggactcgcctgggcttgctgatgggcactggtgctcaggggctgcgagaaaaagtccacactatgttgcgcggagtcttgttctttagcacccccataaccttccaagagatgatccagcgtctgtatgggtgc

SEQ ID NO: 190046 - DNA, 765 bp, Homo Sapiens
ttggcgctccgcaggcctgcggaggactggcccagcaaggtcccaggtcttccctctcctcagcgcctaagagagaggcccagtgcgggtgaggagtcgcgaggaagaggcggaaggcgccggaaggcaccatgttccgcaagaaaaagaagaaacgccctgagatctcagcgccacagaacttccagcaccgtgtccacacctccttcgaccccaaagaaggcaagtttgtgggcctccccccacaatggcagaacatcctggacacactgcggcgccccaagcccgtggtggacccttcgcgaatcacacgggtgcagctccagcccatgaagacagtggtgcggggcagcgcgatgcctgtggatggctacatctcggggctgctcaacgacatccagaagttgtcagtcatcagctccaacaccctgcgtggccgcagccccaccagccggcggcgggcacagtccctggggctgctgggggatgagcactgggccaccgacccagacatgtacctccagagcccccagtctgagcgcactgacccccacggcctctacctcagctgcaacgggggcacaccagcaggccacaagcagatgccgtggcccgagccacagagcccacgggtcctgcccaatgggctggctgcaaaggcacagtccctgggccccgccgagtttcagagtgcctcgcaacgctgtctgcagctgggtgcctgcctgcatagctccccaccaggagcctcgccccccacgggca

SEQ ID NO: 190047 - DNA, 1186 bp, Homo Sapiens
tttgtacaaaaaagttggtttgaattcaaggacaagacgtggacacgcatcccaactgaacacctgctccggggctccccaccacccccgcagcggcgctacgggcataccatggtggcctttgaccgccacctctatgtgtttgggggtgcggccgacaacacgctgcccaacgagctgcactgctatgacgtggacttccagacctgggaggtcgtccagcccagctccgacagcgaggttggtggggctgaagtgcccgagcgagcctgtgcttccgaggaggtgcccaccctgacctatgaggagcgggttggcttcaagaagtcccgagatgtgtttggcctggactttggcaccacctcagccaagcagcccacccagcctgcctcggagctgcccagtgggaggctcttccacgcggctgctgtcatctcggacgccatgtacatcttcgggggcacggtggacaacaacatccgcagcggggagatgtacaggttccagttctcctgttaccctaaatgcacgctgcacgaggactacgggcggctgtgggagagccgccagttctgcgacgtggagttcgtgctgggtgagaaggaggagtgcgtgcagggccacgtagccattgtcacagcgcggagccgctggcttcgcaggaagatcacgcaggcgcgggagaggctggcccagaagctggagcaggaggccgccccagttcccagggaggcccccggcgtggctgctggtggggcccggccgcccctgctgcacgtggccatccgggaggccgaggcccggcccttcgaggtgctcatgcagttcctctacaccgacaagatcaaatacccacggaaaggccatgtggaggatgtgctgctcatcatggatgtgtacaaactggcactgagcttccagttgtgccgcctggagcagctgtgccgccagtacatcgaggcctccgtggacctgcagaacgtgctggttgtgtgcgagagtgccgcccggctgcagctgagccaactcaaggagcactgcctgaacttcgtggtaaaggagtcccacttcaaccaggtgatcatgatgaaggagttcgagcgcctctcctctccactgatagtggagattgtgcggcggaagcagcaaccgccccctcgcactcccttggaccaaccagtggaca

SEQ ID NO: 190048 - DNA, 696 bp, Homo Sapiens
  misc_feature (139)..(232): n is a, c, g, or t
ctttgtacaaaaaagttggcagagcatttcaatcttgtccagcttttctttccttaagggggaaactatattttctgttttatagattccctctttttggcacaagttctatcactcctttacctagggaaggaaaaannnnnnnnnnnnnnnnnnnnnnnnnnnnnnnnnnnnnnnnnnnnnnnnnnnnnnnnnnnnnnnnnnnnnnnnnnnnnnnnnnnnnnnnnnnnnntacacactactgttgttttcttttgaaacaatagattattaaaatctgggcatttatatgcaatttagagccatttttactatgctagacacataatagacacatgctttgatgagcttgggctaccaaaacttggagtagcaaaaacctttatagatgatgtttgcaaaataagactgaagagacacgaggcgtactagtcttttatcagccctgcccaacctcccctccacccatgtccaagtggacaggactctgacattctcccggggctcacaacagtatctcaaaaaatatgttgctttgcaacgagtcagaattactaatcatagatcttgaagataagaaagatttggaaccacttcagatcaactcgtttttataatggtgttgttgtggaactgaaagattggggatgatttggttttttccttggtccacaggtaggtgtcacaattgctttg

SEQ ID NO: 190049 - DNA, 1286 bp, Homo Sapiens
ttggcgcctttggtggctgcgtgaaccactcgctgacgctggccatccacgacatctcgcacaacgcggccttcggcacgggccgtgcggcacgcaaccgctggctggccgtgttcgccaacctgcccgtgggtgtgccctacgccgcctccttcaagaagtaccacgtggaccaccaccgctacctgggcggcgacgggctggacgtggacgtgcccacgcgtctggagggctggttcttctgcacgcccgcccgcaagctgctctggctggtgctgcagcccttcttctactcactacggccgctctgcgtccaccccaaggccgtgacccgcatggaggtgctcaacacgctggtgcagctggcggccgacctggccatctttgccctttgggggctcaagcccgtggtctacctgctggccagctccttcctgggcctgggcctgcaccccatctcgggccacttcgtggccgagcactacatgttcctcaagggccacgagacctactcctactatgggcctctcaactggatcaccttcaatgtgggctaccacgtggagcaccacgacttccccagcatcccgggctacaacctgccgctggtgcggaagatcgcgcccgagtactacgaccacctgccgcagcaccactcctgggtgaaggtgctctgggattttgtgtttgaggactccctggggccctatgccagggtgaagcgggtgtacaggctggcaaaagatggtctgtgagcccgggctgcctcctggtggtggccattgtcccccatcggcccctcagccttgcaccccagcactgagaagctacatttccttcctgtgctctggactgctgcccttgtccccgaggagtgtcccgcgcagccacacctggcaacagcagtgtgggctgcagggctccgtctgcacgtggacttgccctggaccttgagtgtggccctccctttctgggcctccccaggtgaggcctggccctgccccaccatgacctgggtgctctgagcccacggttcccacggagctgacttctccggggtgcctgtgccctacattaaacccggcgtttgtttcacagcccatggattgtgcttctgagggggtggtctgggcttgagcctggccccagggaatggggcgctgggccgccccgatgagtggagcttgaggcctgagtgccgcttcgtccaggccaggcccaggtcctgccatgcactcctggctctttgtgggacggtggctgctgctggcaatgcttccctcagg

SEQ ID NO: 190050 - DNA, 1326 bp, Homo Sapiens
ttggatcgctttaacttttctaaagccaaatttcccatgtaagctgcagtttctatctttagcccatcatcattttctgcccccccaaaatctgttgaaatgattcactgatgcaaaacattcacccgtaatagactgagaattgagccttaacttcagattaacttgtgagaatcaggaaaattccttcaactgcattgcatcctcttggaccagggctagaatggggatttcaggtttctatgagcctccccattacccctaaagtagaacattttttaaattgtgttgccaccacttctaaaaatttagcaatattagaataggatactagtgaagtaagaaattttgcttgttgttttgcaaaccaaatagtttcctcaaacacaaatcagtgttcccacgaacaagttccagttgagaaacactaaggttatggtgaataaaaccatagggagcttcttccccccaacccctggctattttatattaatggggagaggggatttttaaatgtcataaatttgaagagtggtgggttgcattttcttcatgggtttatgttttcgtttcattttggactcaatttcacatcaccaaattcctcatttatacttggggaaaaaacaaggccatatgtaaaaacccttccaatgcctaagtgtctttctcctgcaactccaaacccagactcgccactttgggtgcacaggtggttaggtcagccaactggttctgcctgtcgccttgccacggaggaggcttctaattagctggaaaagagtatttttctaatacgttgcaaggattagccaaatcttcttattgaagaaagaagaaaagtgaagagtggttacctatacctagcatagtacaatcagaacctcgtggagaccaccggggacaggcttgcggacgccggctgttcttcccgccacgatctttctgtggtagcggccagcagaagacacggcctgctccccactccctttccccactccttctttattgcacacaggacaccagtcttcaaggaaagggacttttttccagtctgccaatcatattgggaaagtgctagctgtgctcaccttcatggggctgtttccagctcgtccacaagctcatcgattttctttagtagattaccggtgtaaatacccagtgtgcttatgagtcagttagtagacgtcttcattcattggagtaactggtttaactttccagtttggaaaaggagcagagagctgtccatctggattgatggaagaaaagagaacctcatccatgcctggagaacatctagaaaaccttcagccagccttc

SEQ ID NO: 190051 - DNA, 470 bp, Homo Sapiens
  misc_feature (260)..(337): n is a, c, g, or t
ttggcgcccgcccgcgccccgaccagcccggcctcgggcagccactcaccggtgtccccgtccgcgtccttcctccccgggtcccggccatggcgctgagtgaacccatcctgccgtccttctccactttcgccagcccgtgccgcgagcgcggcctgcaggagcgctggccgcgcgccgaacccgagtccggcggcaccgacgacgacctcaacagcgtgctggacttcatcctgtccatggggctggatggcctgggnnnnnnnnnnnnnnnnnnnnnnnnnnnnnnnnnnnnnnnnnnnnnnnnnnnnnnnnnnnnnnnnnnnnnnnnnnnnnnctacagcgcccccgcgggtggcctggtgtctgagctgctgcgacccgagctggatgcgccgctggggcccgcactgcacggccgctttctgctggcgccgcccggccgcctggtctaggccgagccccctgaa

SEQ ID NO: 190052 - DNA, 279 bp, Homo Sapiens
atagttgaaagaataagcaaaaagtctatctaggtgtgctgtcttgagcaacttttaattattctcccgtcctgcaatatgagttaatcttctctgatcgatgtagattccaggaaggggtgtccaggacaattaccttccttctggagaaacttcccttaatcaaataagagaacttcaaagaaaatccctccctgtgctttggaagggaaggaggtgggcagcagtgggtcagagatagacctttgttctcttatttctgagcccttcagtctcttt

SEQ ID NO: 190053 - DNA, 873 bp, Homo Sapiens
caatgcttttcctataatagccaactttgtacaaaaaagttggctatttttcacataatcaaactcaccttgtctcatgacttttggttaagggggttttcccatagtttatttttctctcagtgcatcttgctatgaggtttgcttgttacccttttggtttttgaattgttgattttgttcacaacctcttttaaatctaacaagtcctgttctgtttagtgaaggcccaaagactcctctaagactttgtatatttgttacataaaaccaagttttactaaatactttaaaatttgtcctacattcgaaaaatagaaattgtaaatcagaggttatctgtctgcattttaaactgccaaattaccttatagtaagtttctattttatgactttgggccaagaattaagtattttcctaagcacaaatctttttctatattctcattttaatatcttatgctattattctgtaaacattttaattttagtttcatgagtctttattttttgttacctgcaagttatgttcttcttcattgaatttcatatttgagagacatttgtcttcatgaagcagatttgcactggaaccattgctttactctggttggaaatgccattgttttggggacagacttttaaaatgcccttgtgtctcccagtgaggagccctaagcattgacttctctaccctaaaactgtttgagagagggagagtgggccctggctttctcaagcatgggtcgggggttcagcggggcctctgtcttttgtggtgacccctcaggggtttcattgtttccttctgacttaagcaatagagagagaatttgttttggtactcttcagaggaattgtgctttggctcat

SEQ ID NO: 190054 - DNA, 1293 bp, Homo Sapiens
ttggctcagggagcagtgaggaggagtcagacagtgaggaggaggcggagacgctggctcaggtgaagccttcagggaagacccaccagatcagagctgccttggctcctgccaaggagtcccccaggaaaggggctgccccaacacctcctgggaagacagggccttcggctgcccaggcagggaagcaggatgactcagggagcagcagcgaggaatcagacagtgatggggaggcaccggcagctgtgacctctgcccaggtgattaaaccccctctgatttttgtcgaccctaatcgtagtccagctggcccagctgctacacccgcacaagcccaggctgcaagcaccccgaggaaggcccgagcctcggagagcacagccaggagctcctcctccgagagcgaggatgaggacgtgatccccgctacacagtgcttgactcctggcatcagaaccaatgtggtgaccatgcccactgcccacccaagaatagcccccaaagccagcatggctggggccagcagcagcaaggagtccagtcggatatcagatggcaagaaacaggagggaccagccactcaggtgtcaaagaagaacccagcttccctcccactgacccaggctgccctgaaggtcctcgcccagaaagccagtgaggctcagcctcctgttgccaggacccagccttcaagtggggttgacagtgctgtgggaacactccctgcaacaagtccccagagcacctccgtccaggccaaagggaccaacaagctcagaaaacctaagcttcctgaggtccagcaggccaccaaagcccctgagagctcagatgacagtgaggacagcagcgacagttcttcagggagtgaggaagatggtgaagggccccagggggccaagtcagcccacacgctggtaggtcccaccccctccaggacagagaccctggtggaggagaccgcagcagagtccagcgaggatgatgtggtggcgccatcccagtctctcctctcaggttatatgacccctggactaaccccagccaattcccaggcctcaaaagccactcccaagctagactccagcccctcagtttcctctactctggccgccaaagatgacccagatggcaagcaggaggcaaagccccaacaggcagcacgcatgttgtcccctaaaacagtggaaaagagctgcttcggcaccacacctcagaagtcccggaagcccaagaaaggggctgggaacccccaagcctcaaccctggcgctgcaaagcaacatcaccc

SEQ ID NO: 190055 - DNA, 1266 bp, Homo Sapiens
acaaaaaagttggcaccggcgagcgccgaggggacaggccgagcgcggggcgccggaggcaggtgtgggacaggcactggcctcagaccggggccacactgaggtctgcccttctcccgctggccgccacccaggacaccatgagccagtccggggccgtgagctgctgcccgggtgccaccaatggcagcctgggccggtccgacggtgtggccaagatgagccccaaggacctgtttgagcagaggaagaagtattccaactccaacgtcatcatgcacgagacctcgcagtaccacgtccagcacctggccacattcatcatggacaagagcgaagccatcacgtctgtggacgacgccatccggaagctggtgcagctgagctccaaggagaagatctggacccaggagatgctgctgcaggtgaacgaccagtcgttgcggctgctggacatcgagtcacaggaggagctggaagacttcccgctgcccacggtgcagcgcagccagacggtcctcaaccagctgcgctacccgtctgtgctgctgctcgtgtgccaggactcggagcagagcaagccggatgtccacttcttccactgcgatgaggtggagagctggtgcacgaggacatcgagagcgcgttggccgactgccggctgggcaagaagatgcggccgcagaccctgaagggacaccaggagaagattcggcagcggcagtccatcctgcctcctccccagggcccggcgcccatccccttccagcaccgcggcggggattccccggaggccaagaatcgcgtgggcccgcaggtgccactcagcgagccaggtttccgccgtcgggagtcgcaggaggagccgcgggccgtgctggctcagaagatagagaaggagacgcaaatcctcaactgcgccctggacgacatcgagtggtttgtggcccggctgcagaaggcagccgaggctttcaagcagctgaaccagcggaaaaaggggaagaagatgggcaagaatgcgccagcagagggcgtcctcacactgcgggcacggcccccctctgagggcgagttcatcgactgctttccagaaaatcaagctggcgattaacttgctggcaaagctgcagaagcacatccagaaccccagcgccgcggagctcgtgcacttcctcttcgggcctctgggacctggtgcctgggaccgggcggcaggggcgcgcaggtggcggcccagaggcctctgcagcatctccccggggt

SEQ ID NO: 190056 - DNA, 1330 bp, Homo Sapiens
  misc_feature (326)..(334): n is a, c, g, or t
  misc_feature (1012)..(1021): n is a, c, g, or t
ttggatcattgtcccgggcctgcattgcactggaaaaaaatcgccacctgttcttacaccagtatttggttcaagacaccaaatgtcttcagcccatggctgaagaacaacagaagagagtcaggataaaaaatacatactgtggtcggcaaggtgagggagatagggatatccaggggaagagggtgttgctgtggcccactctctgtctaatctctttacagcaaattggtaagattttcagttttacttctttctactgtttctgctgtctaccttccttatatttttttcctcaacagttttaaaaagaaaaaaaggtctannnnnnnnnctcctatacttgggctacattttttgattgtaaaaatatttgatggccttttgatgaatgtcttccacagtaaagaaaacttagtggcttaatttaggaaacatgttaacaggacactatgtttttgaaattgtaacaaaatctacataaatgatttacaggttaaaagaataaaaataaaggtaactttacctttcttaaatatttcctgccttaaagagagcatttccatgactttagctggtgaaagggtttaatatctgcagagctttataaaaatatatttcagtgcatactggtataatagatgatcatgcagttgcagttgagttgtatcaccttttttgtttgtcttttataatgtcttcagtctgagtgtgcaaagtcaatttgtaatattttgcaaccctaggatttttttaaatagatgctgcttgctatgttttcaaacctttttgagccataggatccaagccataaaattctttatgcatgttgaattcagtcagaaaagagcaaggctttgctttttgaaattgcaactcaaatgagatgggatgaaatcctatgacagtaagcaaaaacagaaccatgaaaaatgattggacatacaccttttcaattgtggcaataattgaaagaatcgataaaagttcatctttggacagaaagcctttnnnnnnnnnntcactccctcttccccctcctcccttattgcagcagcctactgagaactttgactgttgctggtaaattagaagctacaataataattaagggcagaaattatacttaaaaagtgcagatccttgttctttgacaatttgtgatgtctgaaaaaacagaacccgaaaagctatggtgatatgtacaggcattatttcagactgtaaatggcttgtgatactcttgatacttgttttcaaatatgtttactaactgtagtgttgactgcctgaccaaattccagtgaaacttatacaccaaaatattctt

SEQ ID NO: 190057 - DNA, 1461 bp, Homo Sapiens
ttggatttcagccccgacccactctccgccagtcaccggaggcagaccgcgggaggagagctgaggacagccgcgtgcgcttcgccagcagcggggtgggaggaaggacattaaaatactgcagaagtcaagacccccccaggtcgaacccagaccacgatgcgcgccccgggctgcgggcggctggtgctgccgctgctgctcctggccgcggcagccctggccgaaggcgacgccaaggggctcaaggagggcgagacccccggcaatttcatggaggacgagcaatggctgtcgtccatctcgcagtacagcggcaagatcaagcactggaaccgcttccgagacgaagtggaggatgactatatcaagagctgggaggacaatcagcaaggagatgaagccctggataccaccaaggacccctgccagaaggtgaagtgcagccgccacaaggtgtgcattgcccagggctaccagcgggccatgtgcatcagtcgcaagaagctggagcacaggatcaagcagccgaccgtgaaactccatggaaacaaagactccatctgcaagccctgccacatggcccagcttgcctctgtctgcggctcagatggccacacttacagctctgtgtgtaagctggagcaacaggcgtgcctgagcagcaagcagctggcggtgcgatgcgagggcccctgcccctgccccacggagcaggctgccacctccaccgccgatggcaaaccagagacttgcaccggtcaggacctggctgacctgggagatcggctgcgggactggttccagctccttcatgagaactccaagcagaatggctcagccagcagtgtagccggcccggccagcgggctggacaagagcctgggggccagctgcaaggactccattggctggatgttctccaagctggacaccagtgctgacctcttcctggaccagacggagctggccgccatcaacctggacaagtacgaggtctgcatccgtcccttcttcaactcctgtgacacctacaaggatggccgggtctctactgctgagtggtgcttctgcttctggagggagaagcccccctgcctggcagagctggagcgcatccagatccaggaggccgccaagaagaagccaggcatcttcatcccgagctgcgacgaggatggctactaccggaagatgcagtgtgaccagagcagcggtgactgctggtgtgtggaccagctgggcctggagctgactggcacgcgcacgcatgggagccccgactgcgatgacatcgtgggcttctcggggggactttggaagcggtgtcggctgggaggatgatgaggagaaaagagacggaggatgcacgcgaggaggccgaggaggagagggcgaggcatgcgaggctgacaacagggggctacatcttggtagaacgcccttctggagccggctgcc

SEQ ID NO: 190058 - DNA, 1079 bp, Homo Sapiens
ttggaacttacaaggtgactagctttgaaacccctaatttgcctcagttgattttctaagaatttcaggagtgatgtatgtcttaagagggagaaaaaaatatttcttattactttttctcttgtttctgttggaaacactgaagcagggactctaaaatgaaagcatctcacattggttttctttcttgtatcttttctgaaactccttgctgtaaggcagctttctcagagtactatatattttcaacagtaaagtagcagagtttctctttgaaacccaaaatgtcttctaaagaatcaaatttctatttctgcctctgacaaaaagaacttactatgaaagaaatagttgttttatcaataaaagccccttaatattatgaagaaacttttcatattttttcttctttatccttaattgtgactaagatggaaatctagaaaatattcttgcttctaagtttctgcagtgttactgtaagagagtgtctcgtctacacttcagttcttctctcatgtggaaaactaagctttttatattgacattgccattgaatagctctagcaactattattattcccccaaaccctaaaattctacctattaggtgtcaggttaaagttctaatttatctttagaaatttatgtgaaaaatggttttcctatactggataaagcaattccccttaggaaacatagcctcagagtatttcatataaattttctctatctaattcaaacatatctccccatgatacaccgccagagtgacattgcagacagtctgtgtatgtttaaaattttcactttttatagatgagcataaaacctagtcttagtttaaagggcaaactaaagttgaggggaaataattaatcaaatactgattaattgatttataacgttcaacactgtctaccctaaataattttatatgctcaaagcaaagcatgggaatagaggcaattagctagataaataagcaaaatccattttcaccaaattgtctgtgtgcacatatttttagatgaaaaatgaaactacctacaaattaatttttttaccaaggatttgtt

SEQ ID NO: 190059 - DNA, 1541 bp, Homo Sapiens
  misc_feature (50)..(81): n is a, c, g, or t
  misc_feature (457)..(500): n is a, c, g, or t
ttggggaagggaaggctcaggagccgtccgccgccatccccaaggtcatnnnnnnnnnnnnnnnnnnnnnnnnnnnnnnnntgccccagaaggtccaagcccaagtaatccaagagaccatcgtgcccaaagagcctcctcctgagtttgagttcattgctgatcctccctctatctcagccttcgacttggatgtggtgaagctgacggctcagtttgtggccaggaatgggcgccagtttctgacccagctgatgcagaaagagcagcgcaactaccagtttgactttctccgcccacagcacagcctcttcaactacttcacgaagctagtggaacagtacaccaagatcttgattccacccaaaggtttattttcaaagctcaagaaagaggctgaaaacccccgagaagttttggatcaggtgtgttaccgagtggaatgggccaaattccnnnnnnnnnnnnnnnnnnnnnnnnnnnnnnnnnnnnnnnnnnnncgggtggcctatgctcagatcgactggcatgattttgtggtggtggaaacagtggacttccaacccaatgagcaagggaacttccctccccccaccacgccagaggagctgggggcccgaatcctcattcaggagcgctatgaaaagtttggggagagtgaggaagttgagatggaggtcgagtctgatgaggaggatgacaaacaggagaaggcggaggagcctccttcccagctggaccaggacacccaagtacaagatatggatgagggttcagatgatgaagaagaagggcagaaagtgcccccacccccagagacacccatgcctccacctctgcccccaactccagaccaagtcattgtccgcaaggattatgatcccaaagcctccaagcccttgcctccagcccctgctccagatgagtatcttgtgtcccccattactggggagaagatccccgccagcaaaatgcaggaacacatgcgcattggacttcttgaccctcgctggctggagcagcgggatcgctccatccgtgagaagcagagcgatgatgaggtgtacgcaccaggtctggatattgagagcagcttgaagcagttggctgagcggcgtactgacatcttcggtgtagaggaaacagccattggtaagaagatcggtgaggaggagatccagaagccagaggaaaaggtgacctgggatggccactcaggcagcatggcccggacccagcaggctgcccaggccaacatcaccctccaggagcagattgaggccattcacaaggccaaaggcctggtgccagaggatgacactaaagagaagattggccccagcaagcccaatgaaatccctcaacagccaccgccaccatcttcagccaccaacatccccagctcggctccacccatcacttcagtgccccgaccacccacaatgccacctccagttcgtactacagttgtctccgcagtacccgtcatgccccggccccccaatggcatctgttggtccggctgcccccaggctcaatga

SEQ ID NO: 190060 - DNA, 959 bp, Homo Sapiens
gagcaatgcttttttataatagccaactttgtacaaaaaagttggcagatccgcggaagggcagaatgggactccaagcctgcctcctagggctctttgccctcatcctctctggcaaatgcagttacagcccggagcccgaccagcggaggacgctgcccccaggctgggtgtccctgggccgtgcggaccctgaggaagagctgagtctcacctttgccctgagacagcagaatgtggaaagactctcggagctggtgcaggctgtgtcggatcccagctctcctcaatacggaaaatacctgaccctagagaatgtggctgatctggtgaggccatccccactgaccctccacacggtgcaaaaatggctcttggcagccggagcccagaagtgccattctgtgatcacacaggactttctgacttgctggctgagcatccgacaagcagagctgctgctccctggggctgagtttcatcactatgtgggaggacctacggaaacccatgttgtaaggtccccacatccctaccagcttccacaggccttggccccccatgtggactttgtggggggactgcaccgttttcccccaacatcatccctgaggcaacgtcctgagccgcaggtgacagggactgtaggcctgcatctgggggtaaccccctctgtgatccgtaagcgatacaacttgacctcacaagacgtgggctctggcaccagcaataacagccaagcctgtgcccagttcctggagcagtatttccatgactcagacctggctcagttcatgcgcctcttcggtggcaactttgcacatcagcatcagtagcccgtgtggttggacaacaggccggggccgggccgggattgaggccagtctagatgtgcagtacctgatgagtgctggtgccaacatctccacctgggtctacagtagccctggccggcatga

SEQ ID NO: 190061 - DNA, 1329 bp, Homo Sapiens
  misc_feature (336)..(348): n is a, c, g, or t
ttggctagtttacattcccaccaacagtgtaaaagtgttcccttttcaccacatcttcaccgacatttatattattttttgattttttgattatggccattcttgcaggagtaaggtggtatctcattgtggctttgattttttaaaataacttaagactactcacattctgacacttaattattttctttcttttgaacaacaaagcttgatgacctcacacaagatctgactgtatcccagctcagtgatgttgcggattatctggaagatgttgcatagacacgaagaaggaagtattctaattaacaaggacagaggactgaccggttccannnnnnnnnnnnnccagacaatcactcagctggaatgtctgctctctattggtgccttgcatttcaaaaacactgcagatattttttaaaagtaattttcattttactaaacaaaatacttcctatttgagcccatgtgtggaagatttaatattcttaatttaactgtacatttctttatggaaattgattatctacactcagtttcattacagggaaggaacccatgaaaacatcagtgttaagagcatgatgaaaggtgtcaataaagccgtaggatcgcgcaaccctttgtgtgtgtggctgctggtacgtgtgatctttgaaaaccttggctttagccctctggaatcagagcttacccaccatagtatattttgatattaggtggttctacacatagttggcaaaatgacttggtaaatttgtaatgctgaagtatattagtataagttaaatttgatgtgtcaactttattttgtatttccttccatttggaaggtttgttagaccattaaggttatattaaagtactcttgtgtgtgctatttagttttgcttgttttaaagaaatctagaagtggttatgagttttaattcatagaattgtcaataacataacatttgcaatcgtcattcctcctgttatccatgtaagcagctttagtcgtaggttctcttcattataatttattatctgtaaagattccttgaaacttattcagtaccaaaatgcatctgaaaccattaagcagtgcttttatttcagatctgtaagttaattgtattaaaatccaaattggaatgaaatagtagtaatggcctaagaccatgttcagtttgacaagctttatatactgtacataatttcattgtaacccttaaaaatagagccaataatagaatttccacagtctcatttatacagttaaagcattattgctattatgtagtcacggatgtttataatactaaagtattttaaaatgtgcaa

SEQ ID NO: 190062 - DNA, 902 bp, Homo Sapiens
actttgtacaaaaaagttggctcaaagaaaccgtctggatgaagttctctacacccaaggaagaaaagcaatttttagagctcctgaactgcctgatgagtcccgtgaaaccccaagggattccagtggctgctcttcttgagccagacgaggtgctgaaggaatttgtcctgcctttcttgaggttagatgttgaagaggtagacctcagtctgaggatcttcatccagactctagaggcaaacgcgtgccgagaggaatactggctccagacctgctccccgtttccactcctcttcagcttgtgccagctcttggaccgcttcagcaaatactggcagcttcccaaggagaagcggtgcctctctttggataggaaggatctagcgatccatatcctggagctcctgtgtgagactgtatcagccaatgctgagaccttctccccggatgtctggatcaagtccctgtcctggctccaccgcaagttagaacagctagactggactgtgggcctgaggctgaagagcttcttcgaggggcacttcaagtgtgaagtgccagccacactttttgagatctgtaagctttcagaagacgagtggacctcccaggcccacccagggtacggggctggcacggggctcctggcctggatggagtgctgctgcgtctccagcggcatctcggagaggatgctgtctctcttggtggtggacgtgggcaatcctgaggaggtcagactgttcagcaaaggctttctggtggccctggtgcaagtcatgccttggtgcagccctcatgagtggcagcgccttcaccagctgaccaggagactgctggaaaagcagctcctccatgtcccttatagcctggaatatatttcagtttgttccctgctc

SEQ ID NO: 190063 - DNA, 878 bp, Homo Sapiens
ttcttagtgatctccacaaagtcatccagcgcgatgtagttcttggactcgctgctgaccaggcgctccagcatccgcctctgcttctgcagggacttgggcacggggcctggctgcgcccctccatgtacctggccgacattctccagcagctccgccacggccactgcttcttcttcttggggttgagcttccagtacatgaccagggctgccttgcgcacggccctctccaggtcggtctcggaggagagctgcctcacctcccgttcgttctcggacgtgatgcctcttctgtccaccaagcaccggcgaagcagcttcacagcctcgcgacggccctgcttcgcggcgaggaccagccagtccacagcggtgcagctgttgagttcttcatccgtgtcgccggccaactgcaggtagtgcttccccacctcagtctgtgccttggggtccccggccttggccctctccaggacttcttcaaaggggatttccatgtctccctttgtaggcccggtgccgtctgctctttcccggctcctggtatgctgggcctggggttcagcgggggccgctgcgtctctaacaccagggccagggccagcctggggtccgggtgctcggggcctttcgctcctctcctgctccaacgaggctgtggcattgagtcgggaacgcgcctggggctgcggtgctggcgggggctgtgggcaggaggggcccagcggagcagtgttggagtccatcgccggcccgtgagtgggccgcacgcggcgctgcgacgccctggggcctctgggccggcagaaaagttgttcgggagcagctgaacgcggcgcaaacgggagatctgcggccgcgggggagcaatcccaa

SEQ ID NO: 190064 - DNA, 1312 bp, Homo Sapiens
ttgggccctgtgtgctgacctctccccaagggagaaggtgtgggtcagtgacaaggccagctatgctgtgagcgagaccatccccaaggaccaccgctgctgtatgccttacacccccatctgcatcgccaaagctgtgaagaattcagctgagtcagaaggcatgaggcgggctcacattaaagatgctgttgctctctgtgaactctttaactggctggagaaagaggttcccaaaggtggtgtgacagagatctcagctgctgacaaagctgaggagtttcgcaggcaacaggcagactttgtggacctgagcttcccaacaatttccagtacgggacccaacggcgccatcattcactacgcgtaaggcatgcggaggagcatgctgcctggccttgctgcttctgcacaggagcctgagcaggccagtccctgagacgaataggaccttgtccctggatgaggtgtaccttattgactcgggtgctcaatacaaggatggcaccacagatgtgacgcggacaatgcattttgggacccctacagcctacgagaaggaatgcttcacatatgtcctcaagggccacatagctgtgagtgcagccgttttcccgactggaaccaaaggtcaccttcttgactcctttgcccgttcagctttatgggattcaggcctagattacttgcacgggactggacatggtgttgggtcttttttgaatgtccatgagggtccttgcggcatcagttacaaaacattctctgatgagcccttggaggcaggcatgattgtcactgatgagcccgggtactatgaagatggggcttttggaattcgcattgagaatgttgtccttgtggttcctgtgaagaccaagtataattttaataaccggggaagcctgacctttgaacctctaacattggttccaattcagaccaaaatgatagatgtggattctcttacagacaaagagtgcgactggctcaacaattaccacctgacctgcagggatgtgattgggaaggaattgcagaaacagggccgccaggaagctctcgagtggctcatcagagagacgcaacccatctccaaacagcattaataaatacctccccggttttgtttttgtaaaatgctctggaggaaggaagaaacgtggcagatccctgacatctttcccctttcctttccttcttccctaccctcccctttttactttagactttaagaagaacagaaatcttcttatcctcctttgatattttattgcaaacactcagtcttttatgattttttatttgttga

SEQ ID NO: 190065 - DNA, 1421 bp, Homo Sapiens
ttggctcctcgtgggatggtgcgagtctgcgacctgctcctgaagaagaagccgccgcagcagcagcaccacaaggccaagcgtaaccggacttgccgaccccccagcagcagcgaaagcagcagcgacagcgacaacagcggcggcggtggaggcggcggtggaggcggaggtggcggcggcggcaccagcagtaacaacagcgaggaagaagaggacgacgacgacgaggaagaggaggtttctgaggtaccatcagaggaccaagaaattttgaagaagatagaaagttcatggaatcggattgacagcaaaatcccagaggaaactggaacccaagataacagaggtggagtctttcattttggatcaggatgatttggaaaatccaatgctggaaacagcttccaagttgctcttatcaggtactgctgatggtgcagacctcaggacagtagatccagaaacacaggctagactggaagctttactagaagctgcaggaataggaaaattgtccacggctgatggtaaagcctttgcagatcctgaagtacttcggaggttgacatcgtctgttagttgtgcgttggatgaagctgctgctgcacttacccgtatgagagctgaaagcacagcaaatgcagggcagtcggacaaccgcagtttggcagaagcctgttcagaaggagatgtaaatgctgtgcgaaagttactcattgaagggcgaagtgtaaatgaacacacagaggaaggggagagcctcctttgtttagcttgttctgctggatactatgagcttgcacaggttttgttggcaatgcatgcaaatgtggaagataggggaatcaaaggtgacattacacctttaatggctgctgctaatggaggacatgtcaaaattgtgaagttgctgctagctcataaagcagatgttaatgcacagtcttcaacaggcaatacagcacttacatatgcttgtgctggaggctatgtagatgttgtaaaggtgctcttggaatccggtgctagtattgaggaccataatgaaaatggtcatacccctcttatggaagctggaagtgctggacatgtggaagtagccagattgctgctagaaaatggggctggcattaatacgcattctaatgaatttaaagagagtgcccttaccttagcttgttacaaaggacacttagagatggtgcgatttcttttggaagcaggcgcggatcaagagcataaaacagatgaaatgcacactgctctgatggaggcttgcatggatggccatgttgaagtagctaggttacttcttgacagcggtgcccaagtgaacatgcctgctgattcatttgagtcaccattaactttggctgcatgtggtgggcatgtggaacttgcggctttacttattgaaa

SEQ ID NO: 190066 - DNA, 826 bp, Homo Sapiens
ttgggcctgaggcggcggcgggggtggctccgcgcgcggtggtctcgggggcaaaataacatggcagccagacgaattacacaggagacttttgatgctgtattacaagaaaaagccaaacgatatcacatggatgccagtggtgaggctgtaagcgaaactcttcagtttaaagctcaagatctcttaagggcagtcccaagatccagagcagagatgtatgatgacgtccacagcgatggcagatactccctcagtggatctgtagctcactctagagatgccggaagagaaggcctgagaagtgacgtatttccagggccttccttcagatcaagcaacccttccatcagtgatgacagctactttcgcaaagaatgtggccgggatctggaattttctcactctgattctcgggaccaggtcattggccaccggaaattggggcatttccgttctcaggactggaaatttgcgctccgtggttcttgggaacaagactttggccatccagtttctcaagagtcctcttggtcacaggagtatagttttggtccctctgcagttttgggggactttggatcttccaggctgattgagaaagagtgtttggagaaggagagtcgggattatgacgtggaccatcctggggaggctgactctgtgcttaggggcagcagtcaagtccaggccagaggtcgagctctaaacatcgttgaccaggaaggttccctcctaggaaaggggagactcacggcctgctcacagctaaagggggtgttgggaaacttgtcacattgagaaatgtgagcacaaaaaaataccc

SEQ ID NO: 190067 - DNA, 616 bp, Homo Sapiens
ttggatagagtattcctattgctcctcaaagatgttaaagtattgtatctttcctcttttcttctttccctttctgttacaggaaaagaagtgatgatcacttgatacctattagctaaagttctgctaaagatgattaaagttcaggcatccttatccagcggctgagcagaggaaccccaaatgacttggacaagcagttccaaaatgactctcttatttaattgtggagtgggaaagaggactcacagttagccagctgaccatgactgaagttccagctttactttttataaacttgaatgataaagaatagaccatgggctactactgggcattagtgcaatataacagcgataataaaattctctattagtctgttaatttatgacatgatctcggaatggaaaaagatcatttcagagtgtgcgaaataatagtctttaaccatgtaattaaatatgtgtgtttattgtcaaataaggatttgttttaaaggtgattcttgggtttgaagacatttgttaattcatggtctgtacagaaatgaagctggttgcaataccaatctagagagtccaagctggcgaactattaagctgtttaaagatcaccc

SEQ ID NO: 190068 - DNA, 940 bp, Homo Sapiens
ttggatcaacattgatgtcacagtctattacaatggctaccatggagacacctctgaaacatttttggtgggcaatgtggacgaatgtggtaaaaagttagtggaggttgccaggaggtgtagagatgaagcaattgcagcttgcagagcaggggctcccttctctgtaattggaaacacaatcagccacataactcatcagaatggttttcaagtctgtccacattttgtgggacatggaataggatcttactttcatggacatccagaaatttggcatcatgcaaacgacagtgatctacccatggaggagggcatggcattcactatagagccaatcatcacggagggatcccctgaatttaaagtcctggaggatgcatggactgtggtctccctagacaatcaaaggtcggcgcagttcgagcacacggttctgatcacgtcgaggggcgcgcagatcctgaccaaactaccccatgaggcctgaggagccgcccgaaggtcgcggtgacctggtgcctttttaaataaattgctgaaatttggctggagaacttttagaagaaacagggaaatgaccggtggtgcggtaacctgcgtggctcctgatagcgtttggaagaacgcgggggagactgaagagcaactgggaactcggatctgaagccctgctggggtcgcgcggctttggaaaaacaaatcctggccctggactcggtttcccagcgcggtcaacgcatctggaggggactggaggaaacccccttgttggaagagattccaagagaagcacggttttctctttcccttgccctgactgttggagtaaaaaacctcttaaatccattgtatcagaggtccttacctctctgacagttacagtgatctttgtatctgactttgcacgtctgccgaaaatccgaacctgttgactggg

SEQ ID NO: 190069 - DNA, 1255 bp, Homo Sapiens
ttggagcacgtcaccaggccggtggtgtccctgccttccacgtcagaggctgcggcggcgtccgccttcctggcctcgtccgtctcggccaagatctcctctttaatgttgccaaacgctgccagtatttcatccgcctcacccttctcatctcggtccccgtccctgtcccccaactcacccctcccttctgaacacagaagcctcttcctggaggccgcctgccatgactccgattccctggagcccttgaacctgtcatcgggctccaagaccaagtctccatctcttcccccaaaggccaaaaaacccaaaggcttggaaatctcagcgcccccgctggtgctctccggcaccgacatcggctccatcgccctcaacagcccagccctcccctcgggatccctcaccccagcctttggcaccgcacagacaccaaatggattgcttctgactccgagtccactgctctccagcatacatttctggagcagccttagtccagttgctccgctgagtcctgccaggctgcaagggccaagcacgctgttccagttccccacactgcttaatggccacatgccagtgccaatccccagtctggacagagctgcttctccagtactgctttcttcaaactctcagaaatcctgatgacgtctggccacaattaaggactcattaactgatgaaacaaatttgtccccacgggctagtttacctgtgtcgtgagaaggacattgtgaaactcttgttaatttggtttgcacttttcataacatggatagtctagatttatgttagcattttaaaaactgtttttgatatattcaagtatatatgaaaatctgtttggcattaagtgaattttaatgtttttgtttttatatccttttagctcttaagtgttgaacactgttgacagtgaagaacttttcttaatggttttcagtataactaataaggatgtgaagcttttttctctttagttctgagtatgctaaactgtgtgcttatatagactataaccagttgtgccttccttcgcatttaatgtaaatgaatgatttatatattttttagtattaagaggaaatgtttgaaagatgaaaattagtatcaaacagctctctagtagaatttcattatttttcaccagtgggcaatatgaaagcatatatcacgttttgttttactttcaattgtataagaattgccttagacctcttttgaactgaaattcagtaaatgtcca

SEQ ID NO: 190070 - DNA, 1087 bp, Homo Sapiens
caaatcggatcgcactgactctgttgacagcacgctcgttcaggcttcatcagagacatcatttaccaagttctccagtgcaccacagcgaggcagattctcttgacaagtaggttcagaaggcagctgaggaagtaagacacaggttaaaatcttctctcctgtggtgtagtctgtgtctgtctggaatgtaagcaggggctgggactggttgtcagatagccacagagccttcaacttcaaggcagtcagggataaaggtagatgcagcaacctgttccctgccacatccaggacatgaagttctgttgcctgtgacacctctgcaggtatccgagttagtctgttgtcacgtacacagaacacagtgaggctgcagcacccgccgatctcttttggtaaggacactaatttatttctgtctgcattcaagttgctcaacttctttagttttccaatgcttttaggcagggtcaggagctgattttctgtaagaactaactcagtgagactttcacattccccaactgcttcaggcaactgtgtgagtctattctgatccaccttcaagattgacagtttctttagttttccaatgccatccggaatcgtttctaataagttctgggaaatgactaaatccgttaatgaagtcaggccactgatttcttcaggaagtctttccaacctgttttcagagacatctaaacacagcaggttcttcagatttcctatttcctgaggtaattctgacagttgatttccatccaaccagagatcttttagatgtaagagggctccaattgattctggcaaattatatatttcattgtttcctaaatcaagttcttctagtcttcgcagctgggtaagagagtcaggaagatatgtaagaagattctctctcagttccagtgaagccaggttataaagattgccaatattttcaggtagagactgtagtgagatgtcatttacagaaagacatgttaaattctgtaattcaggaaagctttctggcaacctagtcagtgggtttccgctgaagtcagctacccaacttttttgtacaaagttggcttttata

SEQ ID NO: 190071 - DNA, 1523 bp, Homo Sapiens
ttgggtccatcagcgactggagggtaattgcacttgcagcactctggttctgcctaattggcctgatatgccaagccctgtgctctgaagacggccacaagagaaggatccttactctgggcctgggatttctcgttatcccatttctccctgcgagtaacctgttcttccgagtgggcttcgtggtcgcggagcgtgtcctctacctccccagcgttgggtactgtgtgctgctgacttttggattcggagccctgagcaaacataccaagaaaaagaaactcattgccgctgtcgtgctgggaatcttattcatcaacacgctgagatgtgtgctgcgcagcggcgagtggcggagtgaggaacagcttttcagaagtgctctgtctgtgtgtcccctcaatgctaaggttcactacaacattggcaaaaacctggctgataaaggcaaccagacagctgccatcagatactaccgggaagctgtaagattaaatcccaagtatgttcatgccatgaataatcttggaaatatcttaaaagaaaggaatgagctacaggaagctgaggagctgctgtctttggctgttcaaatacagccagactttgccgctgcgtggatgaatctaggcatagtgcagaatagcctgaaacggtttgaagcagcagagcaaagttaccggacagcaattaaacacagaaggaaatacccagactgttactacaacctcgggcgtctgtatgcagatctcaatcgccacgtggatgccttgaatgcgtggagaaatgccaccgtgctgaaaccagagcacagcctggcctggaacaacatgattatactcctcgacaatacaggtaatttagcccaagctgaagcagttggaagagaggcactggaattaatacctaatgatcactctctcatgttctcgttggcaaacgtgctggggaaatcccagaaatacaaggaatctgaagctttattcctcaaggcaattaaagcaaatccaaatgctgcaagttaccatggtaatttggctgtgctttatcatcgttggggacatctagacttggccaagaaacactatgaaatctccttgcagcttgaccccacggcatcaggaactaaggagaattacggtctgctgagaagaaagctagaactaatgcaaaagaaagctgtctgatcctgtttccttcatgttttgagtttgagtgtgtgtgtgcatgaggcatatcattaatagtatgtggttacatttaaccatttaaaagtcttagacatgttattttactgatttttttctatgaaaacaaagacatgcaaaaagattatagcaccagcaatatactcttgaatgcgtgatatgatttttcattgaaattgtattttttcagacaactcaaatgtaattctaaaattccaaaatgtcttttttaattaaacagaaaaagagaaaaaattatcttgagcaacttttagtagaatttgagcttacatttgggatctgagccttgtcgtg

SEQ ID NO: 190072 - DNA, 888 bp, Homo Sapiens
ttggcctgagagtcggagccacagccagagccctgcccaggccgagccggagctgcagcccgagcgcggtggtgccctcagccccgtcctcttgtcctcctcagcctcggtgccttggaatttgtgtcgctgagtcagcaagcctttcagatttgcccggtttttgttgtttgtggtttgtatcaagatgggaactcaaacaagtcattcctcctaaggagctggtgtcttcatccagaagggacagtttgtgccagctctccagagagaaaagatctgccggaggcgctgggcaatgaccccgggactccaggccagaggggtctgaagctgtttgggaaagcagcgggactccttgggaagatggccatggccccaagcccttccctggtgcaggtgtacaccagccccgcggctgtggccgtgtgggaatggcaggacgggctgggcacctggcacccctacagtgccaccgtctgcagcttcatcgagcagcagtttgtccagcagaagggccaacgttttgggcttgggagcctggcccacagcatccccttgggccaggcagacccctcgctggccccttacattattgacctccccagctggacccagttccgccaggacaccggcaccatgcgggctgtgcggagacacctgttcccccagcactcagccccctggccgaggtgtcgtctgggagtggctgagcgacgatggctcctggactgcctatgaagccagcatctgtgactatctggagcagcaggtggccaggggcaaccatgctcgtggacttggcccccctgggggtacaactacactgtcaactacaccacccccacgcaaactacaagacttccagctttctgccgcaacgtgcggcgc

SEQ ID NO: 190073 - DNA, 1040 bp, Homo Sapiens
aaagctttaaacttctgcagtaagttgagagaagggttgagaagaggaaaagaacttctcattttctatcagataagaatcacattagaaactaagtacaagattagacaacaaattatgtggtcaaataatatagtcattagccacctaaacattttaattccagatattatttaattccatataataactgaattcttgtgagtggattacaggtttttgatcccaaaattccagagctttcaactctctgaatttgtagtcctgaatatcccagtggtgggggttcccagcattgtgggtgctacttgcaaggccatagaatctagatggccctgtcttgaccctgaaatgaaccttaagccttagaacaaagtcatgcagatgccccatttgataataatcttattcacctgtgctctggtcctcggtttctgcatgtgttagcattgcattgataactcagaatcttgataaacacttaatatttgggcctgaagcattaaactttctttttattgtatatacttaaaaaatagaactcactgccctatcatacattgtagccctcttattctttggtctttcatatgcattagttaaatcccttaaagtagacattcataaaaacttacattgtttattggagtataaaatattacccaagtttcttcatgagttgacatgagctgttttaaatactggtgtattttcagaacagtaaaattactgaatatcagaaaaaatgttaattgatgatgaagcttattcccaaaatgccttttgtgcatatgatacttggaaagtcactaatgtgcctcagttaatacatcagtaaaatgttgtgtttcttttccagtgtagtgtttttggaatataaattccccatgctagtatagtatctcagcaaagagaatttccccccaggaggctcagtaaaggaataccgtgtcttacccatcgttatgatggaaggctgctttgaaaatggctgttttaccttataggttaaattttgatccatatgttaagtgatagaa

SEQ ID NO: 190074 - DNA, 864 bp, Homo Sapiens
gccggcccagagtcactgggtggggacacctctccaagaagagcggtagctgctgctggaaaacctcatgggtggcccacacgtcctgggcacagtactgcatcaggtcctggaagttctcacgaatgtccttcatggtgcccttcacaaacagttctcgaggctccttctctaagggaggccccccctacataaagtctgtgcacctctgccagactgttgacactgctgatgtccagccagtcccaggatgagatcgctgggcctcttctggctttcctctgggacttctggccttgctttgtggggggctggaccttgtgtttgccctgcttggctgctatccacagactgcgctggaagctgcttagccctgagatggccatgtgcatgctcatggtgtccaggaaacgcatgcgggaaccctggatcaggtactgctccctgatatgagctcggtcaaaggaaacattgtgccccaccactaactgctcctgccagtctctctgggtggggctgctggcaccagtagggacctccagggggatgaggtcagccggcgacagctggctggtccaagagtaacgctcttccaccagccgctggctgcaccaggaataccaggccgagggggatatggccaccgccaatgtggggcaagttccctctgccaagcagacctccacgtcgaacaccagggcccgctcctcggggatggccacgggtacggcctccccctcggggccgtaccgggtccagccctccgcccaggcccaagccgggggcttcgggggcagctgggcctgcaacagcaagttggccgcctccaggtagggcaggctctgcttctcggccaggagccaa

SEQ ID NO: 190075 - DNA, 1051 bp, Homo Sapiens
ttggctgcctcagcacctcgaggatcgacatggacgctctcgaggactacgtttggccgcgggcaacctcggagcttatactcctcccagtgacgggtctggagtgcgtgggggaccggctgttggcgggtgagggtcccgatgtcctggtgtacagcttggactttggtgggcatctgcggatgataaagcgagtgcagaacctgcttggccactatcttatccatggcttccgggtacggccagagcctaatggagaccttgacttggaggccatggtggctgtgtttggaagcaagggactccgagttgtgaaaattagctggggacagggccacttctgggagctttggcgctctggcctgtggaacatgtctgactggatttgggatgcacgctggcttgagggaaatatagccttggccctgggccacaactcagtggtgctatatgaccctgtagtagggtgcatcctgcaagaggtgccctgcacagacaggtgcaccctctcttcagcctgcctgattggagacgcctggaaggagctgaccatagtggcaggtgctgtttccaaccagctcttggtctggtacccagcaactgccttagcagacaacaaacctgtagcacctgaccgacgaatcagtgggcatgtgggcatcatcttcagcatgtcatacctggaaagcaagggattgctggctacagcttcagaagaccgaagcgttcgtatctggaaggtgggcgacctgcgagtgcctgggggtcgggtgcagaatattgggcactgctttgggcacagcgcccgtgtgtggcaggtcaagcttctagagaattaccttatcagtgcaggagaggattgtgtctgcttggtgtggagccatgaaggtgagatcctccaggcctttcggggacaccagggacgtgggatccgggccatagctgcccatgagaggcacgcctgggtgatcactgggggtgatgactcaggcattcggctgtggcactttggtacggcgtgggtaccgggggattgggggtctcggctctc

SEQ ID NO: 190076 - DNA, 1636 bp, Homo Sapiens
ttcggcccaaatggcttcacggtccactgtggtgaactggctcagaggcaggtgctcttcagagccgctctcgtgaggctcgggcactgcgcatgcctctctgaaagaggttttcttcctgttaaaccaacggtgcaagtcatcggccgagttctcgtgcttgaggcagtggatggaggttctctgggtttttggctgcagcagcagcaggagcacgggttcgaggatgcgagccacgtccccgagggagagcgcacgcaccagccagccctgggctgccgcaccgatggcaccatccgtgcaggccaggctgtccagcacgacaaacaaggacctatcaaaggagcgattgtgagatgttactcgactgccttggatctctcttgtcagatgccagatcacggaaaatctaaacagagcttccagccttgttcccttgtcagggtccaggagggcatggcagatgatgtcctcgcagatgttggccgtaggggccaggcagtgcagccggtagaacaattctacgcaggtgacgtgatgctcccgggtctctttgttcagctgattccaaagcacacgagccaccctctgatagaaatctgttttctctgcaatgactttcaatatccctggagcaatgggaggaaccgtcaccatctgcagcttgccaaaaaaaagggttgtgtccagagctcttatagcgtttcatcttgtcttcaatgacaagcgccagggactgggaatggtttatcacttccagcagagtggaaatggccacgttctggaggtagcagtcagtcacacagcagcaaatagtcatgagggacttcagccaagatggaaaactggaatcaccggctcctggcagctggaagagcgttgcacagagctgctcggtctcttcctcggacaggtagacagggaaagtggcacaatccagcagcaggtggcaggcggcggcaaaggcctccttgcgttcctccctggaaccccccaggtcaatgaccaccttctcaacatcccattctcccccgtttttcctggcagggctgctgggcgaagacgatggtgactctgaactttttgtcttgaatggagaccctcgtgctgtgaacaagtctgacagcatctgcttgaactgaggcacagtgatgggcttgggctcccaagagttcttcctgctggaatcattggctgccaggctctgcgtcccatccctgtccctcttccctgcaggctcctcggacttgctttcttctcctgacgctgtcagctgtactccaaaaatgttcttgctggcaaagttggcgattagctcttggatgcaaagaaacgtcctctgcatgctcccgcccttcttccaaacgtcgtccctttccagagaaactcgaggaaccctcaagtgctcagagagctccggtgacgaggcactgagcccgatcccactgtcctcagacttcagagggggaaacgaagcatcttcgtcaccgggaatcactgcctttgtttccaaaattattttgccgttttcaccttttactggactcgaggttccgctggtggactccgtgtcgaggtaggaaggaggcatctggactttgctgagcaccttgaaacccaacttttttgtacaaag

SEQ ID NO: 190077 - DNA, 1617 bp, Homo Sapiens
ccatcagaatcatttaatcaaaagtactctctcaaattgctgcagcaaaaacttaaagggagatgtgaaaaatcactagaaaatagaattcaagcatcagaatttaaaaaggaacaaggccatcatccccaaggaaaaacatcgggtagtacagctataattaattttcaaatgtgtgcttaagcatgcaaacataaccacccaaacgaatttaaaaacacaaaaactactgggtaagatggaaagtaaattgaaatggtgctgcagccttattgatcttaattgcaagcctgttcggtgatttcaaagtacatccccagtgccctagagaccaggaaaccagtatgacaactctgctcagaaaccaagagtgcacctcagtgtctgtaacaccatttatgctacaggaacatttggaagtgacagctgtagggggatcacgctctctctgatgtactgagaaaaaagtaaaatacttatcggaacaatggaacattcaaagaaaacttagtgctttaatggaaaagtgacatgctgggaatatatttctgtgaacagctgtactgatatcttcaaacagcaacaattacaaatttatttcaacaaagccacacccaataggaggcaattcgatatttcaggcacaacttcaagcaattaagctcatttaaagtgcaaatctgatattttctttcatattcagatttttacttgttaaagtacttagtaaattctaatatatatataaatacaatgaacagtagcctatatgcctgaaaatattgcacaaataaaaatgagactccaaaagaaaaatgttagatggtctcagttattagaaacagtctaaatgacataactctataatcctttaatgccttaaaatcatctgcacctgtaccaataaactccttaggccaagccttcttttaaaaatttgatatgcatcccattaacagccaaatatcaaagtctgaatactctactaatttcctctttcacgaatgtgaaacttaacaaaccccataaaatttcttcctcaggacttagaattcatatactgtaactatcttcattgataccactagaactaagacaataaatggtttgtggaggaggatttggcacagagttgatttacattaatagaagcaataaacacagatcaagccaaatctaagatgatctttgattattcagtagagttacatcctcacttccatttcagacttaacatttactaagaagcagacaagcatgatattcttgcagtttttaatgaaaactgcaggcaaatactttatgtcatgcaagcatcctagatttgttttcttttaatatattatgcttcataaatatacggtaagcctatcttctaaaagattaagactcaacaaaggtagagaaaagttgagctaattggttaacatttctgcaaatccatcagggaaggaaaaaatagagaaaaatggagtaaatacatggaggaaaaaatagagaaaaataaattactggagtcaacatttttatgtaatggacaataaagacatttccctcagactagggaattaaaaataaatttaaaaatttagaacttttcccttaaggataagccaa

SEQ ID NO: 190078 - DNA, 1219 bp, Homo Sapiens
  misc_feature (398)..(415): n is a, c, g, or t
ttggcaagtcccccgccgtgttggaaagacctctcgcctctacgtggcacctggaattggggcgcacagggaggggccgatgctgccaccacccagccttctctttattttcagtgctttttgtttggcctccctgcccccatgtttttctggctgggagctcctggttacccccttgtctgactgcttggtggcaggcaccctgcctgtgagggccactttcctcttctagtagctgttgtctggtggggacgcagtggccctggacacggctcccctctgcaggtctgcaggtcggtttgctgcctgccctcctcctctcacccgatgtccaggtgggattttaaagtctgcattggttataataacagttatcagtaattcctgcccagaagacnnnnnnnnnnnnnnnnnnaagataaaaactgcacaaaaggggagtgagagagactagtttccacatccttccctcctttagtgaagcccccgaggttgtgtccagggtgatgagtgtggacgggggcaccagtcagttctcccttgaagtaaacctcagtgcctgagacttttctaccaagccacacagctgcagcaactgcagatactgcgggctgagcaggagcagtggtggcgcctgccctgaggctgccctgcgatggcctgggtgggagagctgggtcaccggtgccgatgctctggccctccccaatacgctgcttcgtcccactgcaccgcctggctgagggcgttaggggctgtgcctcttgtgagggccatttgggacctccctggggcactgcacaattgatagtgtaccaatagagggagactgggcgatctggaacagcacgtggtggggtcctgcttgtgtgctctgcgttcctctgtggcgtggccaggccggggcctggctcttacccggggagtggtgggcatctcgatgcttctttgccttaatgatggccacatctgggctgctctgcacccacgggagaggctggcccagctgcagactgcttagggacttctgtgtccatcctggggggtaagcccacgtgacccacattcttggcactatgaacagagaacatttgcctgttggcttctgaagtggtcagggccatggctgacacctccaggtcccgcctggcatggggacaccaagttggaaaggcccaagcagctcatctgcctcttgggaaccagggggctagtttgg

SEQ ID NO: 190079 - DNA, 1571 bp, Homo Sapiens
ttggcacctcttcaacaggcgccggcagagggtgaacgagttcaccttggagagccacggccagaggggacagaagcccagccaggagtccctcagagtgctcccttcaagcctcccaggccatgcaccggggctcagcctgagttccacctcgctgccggagccaggccctccacggcaccccagtccccagagccccgacagaggggtccctggccacagcatggaggggtactcagaggaggctagcttgctgcggcacctggagaaggtggccagtgaggaggaagaggtaccactggtggtttatctaaaggagaatgcagcactgctgacagccaatgggctgcacctgtcccaaaaccgagaggcccagcagtcctcaccggccccacctccagctgaggtccacagcccagctgcagatgtcaaccaaaaccttgcctcgcccagtgccacgctcaccacaccaacttctaacagcagccacaatccgccagccaccgatgtcaatcagaacccaccggcaactgttgtcccacagagcctgccactttctagcatccaacagaattcctcagaggcccaactcccatctaatggcacagggcctgcttccaaacccagcaccctgtgtgctgatgggcaaccccaggcaccggctgaggaggtgagatgcagcacactcctaattgacaaggtatcaactccagctaccaccaccagcaccttctccagagaagctacgctcatccccagctccaggcccccagcctcagatttcatgtccagctccctgctcattgacatccagcccaacaccctagtggtgtcagcagatcaagagatgtctgggcgagcagctgccaccacgcccaccaaggtctacagtgaggtccacttcacactggccaagcccccatcagtggtcaacaggacggccaggccttttgggatccaggcgccagggggcaccagccagatggagaggagccccatgctagagagacgacattttggggagaaggccccggctccccagccccccagtttgccagacaggagcccccggccacagagacacataatgtcccgcagccccatggtggaaaggaggatgatggggcagcgaagcccggcctcagagagacgccccttggggaacttcactgcaccccccacctacactgagaccttgtccacagcccctctggcttcctgggtgaggtctcctccctcatattctgtcctgtatcccagctccgaccccaagtcttctcatctgaagggccaggcggttcctgccagcaagacgggcattctggaggagtcgatggcccgccggggcagccgcaaatccatgtttactttcgtggagaagcccaaggtgaccccgaatccagacttgctggatctggtacagacagcggatgagaagcggcggcagagggaccagggggaggtaggcgtggaggaggagcccttcgcactgggggccgaggcctccaacttccagcagagccagcacctcgtgacaagggccagccccgcggcggcggagaagtggtacc

SEQ ID NO: 190080 - DNA, 1055 bp, Homo Sapiens
ttggaaatgtttggtttgaggccatgttttaaacagagacctgttgaaaatcaatagtccccactcttcagtgtcccgtgctcaccatcatttccatgtttgtcttcctaggacctcaatacagtctccatcttcatatggtaacagctccccacctctgaacaaaatgaacagcatgaacaagctgccttctgtgagccagcttatcaaccctcagcagcgcaacgccctcactcctacaaccattcctgatggcatgggagccaacattcccatgatgggcacccacatgacaatggctggagacatgaatggactcagccccacccaggcactccctcccccactctccatgccatccacctcccactgcacacccccacctccgtatcccacagattgcagcattgtcagtttcttagcgaggttgggctgttcatcatgtctggactatttcacgacccaggggctgaccaccatctatcagattgagcattactccatggatgatctggcaagtctgaaaatccctgagcaatttcgacatgcgatctggaagggcatcctggaccaccggcagctccacgaattctcctccccttctcatctcctgcggaccccaagcagtgcctctacagtcagtgtgggctccagtgagacccggggtgagcgtgttattgatgctgtgcgattcaccctccgccagaccatctctttcccaccccgagatgagtggaatgacttcaactttgacatggatgctcgccgcaataagcaacagcgcatcaaagaggagggggagtgagcctcaccatgtgagctcttcctatccctctcctaactgccagccccctaaaagcactcctgcttaatcttcaaagccttctccctagctcctccccttcctcttgtctgatttcttaggggaagagaagtaagaggctacctcttacctaacatctgacctggcatctaattctgattctggctttaagccttcaaaactatagcttgcagaactgtagctgccatggctaggtagaagtgagcaaaaa

SEQ ID NO: 190081 - DNA, 956 bp, Homo Sapiens
ttggcacagtatggcttggatgtcctgaaaagtgtgaagaaaaacatcccaggaattctataaaaaatcaaaaatacaatgtgtttacctttatacctggggttttgtatgaacaattcaagtttttcttgaatctctattttctagtaatatcctgctcacagtttgtaccagcattgaaaataggctatctctacacctactgggctcctctgggatttgtcttggctgttactatgacacgggaagcaattgatgaatttcggcgttttcagcgtgacaaggaagtgaattcacaactatatagcaagcttacagtaagaggtaaagtgcaagttaagagttcagacatacaagttggagacctcatcatagtggaaaagaatcaaagaattccatcggacatggtgtttcttaggacttcagaaaaagcaggttcgtgttttattcgaactgatcaactagatggtgaaactgactggaagctgaaggtggcagtgagctgcacgcaacagctgccggctctgggggacctttttttctatcagtgcttatgtttatgctcagaaaccacaaatggacattcacagtttcgaaggcacatttaccagggaagacagtgacccgcccattcatgaaagtctcagcatagaaaatacattgtgggcaagcaccattgttgcatcaggtactgtaataggtgttgtcatttataccggaaaagagactcgaagtgtaatgaacacatccaatccaaaaataaagttggtttgttggaccttgaactcaatcggctgacgaaagcgctatttttggctttagttgctctttccattgttatggtaaccttacaagatttgtgggtccatggtaccgcaatctttttcggttccttctcctcttttcttacatcattcccataagtttgcgtgtgaacttggacatgggcaaagcgg

SEQ ID NO: 190082 - DNA, 207 bp, Homo Sapiens
cccgctgcctccgctgctcccgacgcggagcccggagcccgcgccgagcccctggcctcgcggtgccatgctgccccggcggcggcgctgaaggatggcgacgccgctgcctccgccctccccgcggcacctgcggctgctgcggctgctgctctccggcctcgtccacggcgccgccctgcttggagccgccgccggccacccgga

SEQ ID NO: 190083 - DNA, 841 bp, Homo Sapiens
ttggctcaagaccctgacagtggtgacaatgcccgaatcacttactccctggccgaagacaccttccagggtgcacctctgtcctcctatgtctccatcaactccaatacagggatcctatatgctctttgctccttcgactatgagcagtttagagacctgcagctgctgatgacagccagtgacagtggagaccctccactcagcagcaatgtgtcactgagcctctttgtgctggaccagaacgacaatgtccctgagatcctgtaccccaccttccctactgatggctccactggtgtggagctggcaccccgctccgcagattccggctacctggtgaccaaagtggtggcagtggacagagactcaggtcagaatgcctggctgtcctacagcctactcaagtccagcgagccgggactatttgcagtggggctgcacacaggcgaggtgcgcaccgcacgggccctgctggacagagacgcgctcaagcagaggcttgtagtggtcgtccaggaccatggccagccccctctctcggccaccgtcacactcactgtggctgtggccgacagcatcccagatgtcctggctgacttgggcagcctcaagccttcagcagacccagacgactcgggcctcacactctatctcgtggtggcagtggccgctgtctcctgcgtcttcctggcttttgtcacggtgctgctagcactcaagctgagacgctggcacaagtcacgcctgcttcacgctgaagcagcagttggcaggtgtgcctgcctcgcactttgtgggcgtggacggggttcgggctttcctgcagacctattcccac

SEQ ID NO: 190084 - DNA, 1017 bp, Homo Sapiens
ttggattccttttaggagccattccgtagtgccatcccgagcaacgcactgctgcagcttccctgagcctttccagcaagtttgttcaagattggctgtcaagaatcatggactgttattatatgccttgttttctgtcaagacaccatgattcctggtaaccgaatgctgatggtcgttttattatgccaagtcctgctaggaggcgcgagccatgctagtttgatacctgagacggggaagaaaaaagtcgccgagattcagggccacgcgggaggacgccgctcagggcagagccatgagctcctgcgggacttcgaggcgacacttctgcagatgtttgggctgcgccgccgcccgcagcctagcaagagtgccgtcattccggactacatgcgggatctttaccggcttcagtctggggaggaggaggaagagcagatccacagcactggtcttgagtatcctgagcgcccggccagccgggccaacaccgtgaggagcttccaccacgaagaacatctggagaacatcccagggaccagtgaaaactctgcttttcgtttcctctttaacctcagcagcatccctgagaacgaggtgatctcctctgcagagcttcggctcttccgggagcaggtggaccagggccctgattgggaaaggggcttccaccgtataaacatttatgaggttatgaagcccccagcagaagtggtgcctgggcacctcatcacacgactactggacacgagactggtccaccacaatgtgacacggtgggaaacttttgatgtgagccctgcggtccttcgctggacccgggagaagcagccaaactatgggctagccattgaggtgactcacctccatcagactcggacccaccagggccagcatgtcaggattagccgatcgttacctcaagggagtgggaattgggcccagctccggcccctcctggtcacctttggccatgatggccggggccatgccttgacccgacgccggagggcc

SEQ ID NO: 190085 - DNA, 687 bp, Homo Sapiens
ccttaaaaaagccaactttgtacaaaaaagttggcgaccctgacctcgagctccagggcggcgaccgtgtcatcaacaccaactgctcggcggtgcgcactcgtcaggccctctgctgcaagatgtccgtggagtatgacaagttcattgagtccgggcgcaagtggttttgccacgtggatgatgacaattatgtgaacgccaggagcctcctgcacctgctctccagcttctcacccagccaggacgtctacctggggcggcccagcctggaccaccccattgaggccaccgagagggtccagggtggcagaactgtgaccacggtcaagttctggtttgctactggtggggccgggttctgcctcaccagaggccttgccctcaagatgagcccatgggccagcctgggcagcttcatgagcacagctgagcaggtgcggctgccggatgactgcacagttggctacatcgtggaggggctcctgggcgcccgcctgctgcacagccccctcttccactctcacctggagaacctgcagaggctgccgcccgacaccctgctccagcaggttaccttgagccatgggggtcctgagaacccacaaaacgtggtgaacttggctggaggcttcagcctgcatcaagaccccacacggtttaagtctatccattgtcttctgtacc

SEQ ID NO: 190086 - DNA, 1097 bp, Homo Sapiens
caatgtccgtggtcctccagccgcacttgataaggtttatgcttgaagtgcgcctccactgcgtaattctggggcagcatgggcctgtccaccgccttttggaaggccgccccccactccctgtggttggactccgtctcgcaggcaaacagaaacttgcggtcgggcgtgacgatggtgatgccatgtggccagtggtggccctgggtggacggcgggaacccatgcagcaccgtgtagccactctccttgctgccaatgaagacttcccctcgggggaaggcgtccagggggtctttgaagtacatgagcttgcggtcatccatggtgaaccagcgcttccggaagcttttccgtttgcttgggccccgtcttctccatgtagccttccttcaggtagttcctggagagctttggcaccagatctgcgtcgctggcccctgggaatgccacctgcaggtagtggaagcgagcagctcggagtgcattgaaccagtccacaatctccttcccgtcctcatggtagatgaagatgttacgggtgctgttgtccttcaggtaggtgacctgcaggccgtgggggtggccgatcttggccggctggaaggtggcgttcaggtgctcgatcttcatcacggccttgggctccttggcatcatttctgttgaaatacttcagagcaccctctcgttctgtcagcacaaacttccggctcaaaaactgcccgttgtcccggccacgcttccagagaaaaccctcacggtaccctgccgagtagggctcctgcttctccgggtagatgaactcctgtcgctcgtacttggcccggatccactgctctcgaaggagctggcagtcggagggcgtgggccggtagtagaaggagggtactttggactcaaacctggctctcgcggcgtcgttcccgtgggaggccatgaactccacttgggcctcctcccaggcgtccaggcggacggacttcaccttgctgacctgggggatattccggtggattcccgagcagctcaggcagatgaagacgcccagagtgtaggaggcccagtcgggatctgctcccaggacgcccgagccaa

SEQ ID NO: 190087 - DNA, 645 bp, Homo Sapiens
ttataaaagccaactttgtacaaaaaagttggctgcactcgctggatctcatctacagggacctgaagccggagaatctgctcattgaccagcagggctacattcaggtgacagacttcggtttcgccaagcgcgtgaagggccgcacttggaccttgtgcggcacccctgagtacctggcccctgagattatcctgagcaaaggctacaacaaggccgtggactggtgggccctgggggttcttatctatgaaatggccgctggctacccgcccttcttcgcagaccagcccatccagatctatgagaagatcgtctctgggaaggtgcgcttcccttcccacttcagctctgacttgaaggacctgctgcggaacctcctgcaggtagatctcaccaagcgctttgggaacctcaagaatggggtcaacgatatcaagaaccacaagtggtttgccacaactgactggattgccatctaccagaggaaggtggaagctcccttcataccaaagtttaaaggccctggggatacgagtaactttgacgactatgaggaagaagaaatccgggtctccatcaatgagaagtgtggcaaggagttttctgagttttaggggcatgcctgtgcccccatgggttttc

SEQ ID NO: 190088 - DNA, 389 bp, Homo Sapiens
accttttcctatttgtattgataatgtattaaaagttgtttgtgcttaataaaagacttctttaaacatcttatttaatttagtagttacatcctatttccaaacatgagtgccttatttaaaagggcattcttaggactgtgaggatggtttaatatttgttttttcatggtggttgcatgtattttagacaggaaatacatatgtaagcatgtgtatataataaataagcatgttttatcatgaaaaattattgtgaacaatttagatctttaagaacttattaataatggaatactatttctaatttttctctttttcaacttgaaaaatattctcaaaattcttaactaccctgaagatactttgtctttaagggaggagggctg

SEQ ID NO: 190089 - DNA, 695 bp, Homo Sapiens
ttgggcaagagctgcggagtgcccagagagaacgggacgaacttcggacccagaccagtgccctgaatcgccagctggccgagatggaggctgagagggacagcgcaacctcgagggccaggcagctgcagaaggcggtggctgagagtgaggaagcccggcgcagtgtggatgggcggctgagcggggtccaggcggagctggcgctgcaggaggagagtgtgcggcgcagtgagcgggagcgccgggccacgctggaccaggtggccacactggagaggagcctgcaggccaccgagagcgagctccgggccagccaggagaagatcagcaagatgaaggccaatgagacaaagctggagggcgacaagcggcgcctgaaggaggttctggacgcctccgagagccgcactgtcaagctggagctgcagcggcgctcgcttgagggggagctgcagcgcagccgcctgggcctcagtgaccgcgaggcccaagcccaggccctccaggatcgggtggattccctgcagagacaggtggccgacagcgaggtgaaggcagggaccctgcagctgaccgtggagcggctgaatggggccctggccaaggtggaggaaagcgagggggcccctgcgggacaaagtgcggggcctgacagaggccctggcccagagcagtgccatcctcaacggcac

SEQ ID NO: 190090 - DNA, 924 bp, Homo Sapiens
gccaactttgtacaaaaaagttggcaaagtgctgcctagcaggagacggcggcggcgcgaaccctgctgggcctccagtcaccctcgtcttgcattttcccgcgtgcgtgtgtgagtgggtgtgtgtgttttcttacaaagggtatttcgcgatcgatcgattgattcgtagttcccccccgcgcgcctttgccctttgtgctgtaatcgagctcccgccatcccaggtgcttctccgttcctctaaacgccagcgtctggacgtgagcgcaggtcgccggtttgtgccttcggtccccgcttcgccccctgccgtcccctccttatcacggtcccgctcgcggcctcgccgccccgctgtctccgccgcccgccatggcgactgcgacccccgtgccgccgcggatgggcagccgcgctggcggccccaccacgccgctgagccccacgcgcctgtcgcggctccaggagaaggaggagctgcgcgagctcaatgaccggctggcggtgtacatcgacaaggtgcgcagcctggagacggagaacagcgcgctgcagctgcaggtgacggagcgcgaggaggtgcgcggccgtgagctcaccggcctcaaggcgctctacgagaccgagctggccgacgcgcgacgcgcgctcgacgacacggcccgcgagcgcgccaagctgcagatcgagctgggcaagtgcaaggcggaacacgaccagctgctcctcaactatgctaagaaggaatctgatcttaatggcgcccagatcaagcttcgagaatatgaagcagcactgaattcgaaagatgcagctcttgctactgcacttggtgacaaaaaagtttagagggagatttggaggatctgaaggatcagattgcccagttggaagcctccttagctgcagccaaaacagtta

SEQ ID NO: 190091 - DNA, 1263 bp, Homo Sapiens
taaaggtttgagcaccatcttgtggtcagtttttggtttctgaggcggactctgctttagaaatttcattttatttcagaatggcagaaccctaattgacaagctcaagtgatctgcgtatcaaaatgtggacaggaccagaagcaggtgtagtcggctgggatgagctgtcccaggctggccggagctggcgctcgctgtggaaaccgtcggggctgcctgcacaaagccggcagatgccagtcagtgggcgtgctggtcagtaaggctgtgccttctgcgcttcaagcagggtgagacctgaccatgtgggagcaataaaagcttccatggtgaccaaacgtgactcctgcctctgtacatggcaatgtgagatgtgcctggaaggaaggggtggccccatctctgccagtgtgggatccaaccaggcactcccctccacagggggtcaagccacacaaggtggcagacagccctgcctggtgtgtaaacaccgcaccagcagactccaacctttggcatggaaggaaaagaagataaatgctagtcattctctccaaacggcaggaacctacatctatctaattgcacttcataatggattccacaaaccattaattatcagattatattttaggaactgaagataaaaaaagctttgtgaaattcaaactccaaaggatcactgacctgcaataagtgtggcggcctgcgggaggtgaggcagcaggccactcacaaggcagggagtgggcggcagcagagccacgggcagtcacggctgctcctccacacgcagacaggactgcctgcctggtgctggtcacagtctgcaccatatgacccagagggagccaggctgccaggtcaggcagagatttcagcctttgattaaaggaaggggatgaagatgacacggaagagctgtgggaaccaggcttcaggtaaggaataccaagaagaatgtcctggaaaggcagacactgtctagcagctgatgcctcacattaaacacttccagcagaaactccagagctttgttttgggaagagctgacaactgacaaggggttatcaggcatggaaatgagggctacctgtcctatagccatcaatagggtgctgggcgtggccactgggtggagggggaaccccagcagagggtaggatgataggaccgaggaaggggccaagtgtgcctcaggaaggggcctaaggtccccgaattgtctgttggtgcccctctcactttaaatggccccaa

SEQ ID NO: 190092 - DNA, 1200 bp, Homo Sapiens
cactcacgagtaggggaagcccgggacccccaccaccaggaagtggttcttcttccgaaacaatctccacaggccccgatggttgccacgcacatcccaggtcccagatatggaggcacttggcaagctgggtccaggtggtgaagtcatcatctttctccattcgaataaaggccacgtaggtgtggccctctgtgtctggcaggaaagagtcttcacaagggttcttgctgtggtccagaacctcagcctcactgagcagcctgtgaacttccacttcataagcttctttcttcagactgtccacattcctgagctggacacctggaaccgtgttgaacttgtgcttcttgaagtaggcctcgtgaaagtagccattcatgttgaggccgacgatgccaaagtggtaggatcgggaaacgtcagggatgatgcactctcggccccggcgttgttcaggcatccgcatccacatgtcccaatcccagagcttttccggtgtaggccacttgggctcaagctcctccttgtacaaggacctcctgagcacccagcccagcccaggcatggtctccacacggtacagtagtgctgggtcctcagccgtgtgttcatacccctggtcattccaggcagagatgcagtacaggctgtcatcctcctccagtaggtggatggattggctcaggaaactgaaaaaatccacagcaatgtccaggtcctcttccagaaccacagcaaacttggcctccggaaacaggttgaaagtggcagtgaggctggccttgtagtgctgagacacgcgggcattcttgatgctgatgggagtatgctggatgcccctcagaccaaacagtgccaccacatccatgggttcctcatagtagccgtcaatgaaaactgttatcatctgaggagacaccccctgggctgaaagcagagagcgcagcatcctgtacaggtaattgggtcggttccctgcaatgacagccacaggcacattgaggaccttgttgtctgggagtgggtcagggctgaactcgatgggtgtggggtccttgcagctgcatacacttccatagccctcaactttgctgcagaagcgccggcggcgacggttcagctctgtgtctgcccagtggcactctgcctcttctgctgagctcaatggcacatctgtcttcagcaggactgggccaa

SEQ ID NO: 190093 - DNA, 229 bp, Homo Sapiens
ggtctggactacctcaaagtcaaacaggtatctatttttaaaattaaaaaattaagtatatatttatatctgattatacttaaacagagacactgttaacatagtttttttctatgtaatgtattagctacaggtaattacaaaatattttataaataatttaatggtctctctaaggttaaacaatacctccaataaataacgagatatttcagagatgaaaatccaa

SEQ ID NO: 190094 - DNA, 1091 bp, Homo Sapiens
ttggcgcctgggctggggttggcgagttcacccgcggcggagggtaactttgctgtgctgttttttgagcagttgtctggtccctggaagtgtagcatcgagagagttttctaattacgtttacaaaatatcttccctttggccatacaagtggtgactgccatgtcgaactcgcggcccaggtcccgccgagacgccgggggtggcgctggggcagccggccgggacgagctggtgtcgcggtccttgcagagcgcagagcactgtctgggcgtccaggacttcggcactgcctatgcccactacctcctcgtgctcagcctggcgccggagctgaaacacgacgtgaaggaaacttttcagtacacacttttcagatgggctgaagagcttgatgctctcagtcggatacaagacttacttggttgctatgagcaggccttggaactgtttcctgatgatgaagtgatttgcaatagtatgggggagcatctcttcagaatgggctttagggatgaagcagctgggtattttcataaagcagtgaagctaaaccctgatttcagtgatgcaaaggagaatttttatcgtgttgcaaactggttggtggaacgctggcactttatcatgcttaatgacaccaagaggaatacaatttataatgcagcaatccaaaaggcagtttgtttggggtccaaaagtgttttggacattggagcaggaactggaatactaagcatgtttgctaaaaaagctggagcacattccgtgtatgcctgtgagttatccaagaccatgtatgaacttgcctgtgatgtcgtggcagcaaacaagatggaagcagggatcaaactcttacatacgaagtcacttgacatagagattccaaaacatattcccgaaaggtattatcatgtaaactaattttagtgtttatacttctctatttttaaaaaactaagatatatttctagcttttagtccaaacaaaatgctacaaaacccttattttgtaaagatatggatataggatagatagtttattataagacatatttaaataaattatattctttattaaaaatatttaa

SEQ ID NO: 190095 - DNA, 947 bp, Homo Sapiens
ttggggaagccagtaacactgtggcctactatctcttccgtggtgccatctacatttttgggactcgggaattatgaggtagaggtggaggcggagccggatgtcagaggtcctgaaatagtcaccatgggggaaaatgatccgcctgctgttgaagcccccttctcattccgatcgctttttggccttgatgatttgaaaataagtcctgttgcaccagatgcagatgctgttgctgcacagatcctgtcactgctgccattgaagttttttccaatcatcgtcattgggatcattgcattgatattagcactggccattggtctgggcatccacttcgactgctcagggaagtacagatgtcgctcatcctttaagtgtatcgagctgatagctcgatgtgacggagtctcggattgcaaagacggggaggacgagtaccgctgtgtccgggtgggtggtcagaatgccgtgctccaggtgttcacagctgcttcgtggaagaccatgtgctccgatgactggaagggtcactacgcaaatgttgcctgtgcccaactgggtttcccaagctatgtgagttcagataacctcagagtgagctcgctggaggggcagttccgggaggagtttgtgtccatcgatcacctcttgccagatgacaaggtgactgcattacaccactcagtatatgtgagggagggatgtgcctctggccacgtggttaccttgcagtgcacagcctgtggtcatagaagggctacagctcacgcatcgtgggtggaaacatgtccttgctctcgcagtggccctggcaagccagccttcagttccagggctaccacctgtgcgggggctctgtcatcacgcccctgtggatcatcactgctgcacactgtgtttatgacttgtacctccccaagtcatggaccatccaggtgggtcta

SEQ ID NO: 190096 - DNA, 1739 bp, Homo Sapiens
  misc_feature (140)..(198): n is a, c, g, or t
  misc_feature (288)..(391): n is a, c, g, or t
ttgggacaggactcacactaactgggcttctggcaaggaccccgcagtctgcctggggtttgcacagggcagtgatcccagcagggcagtgaggagtgtcacgtataccacgtgggcacacctcaaacaacattctagannnnnnnnnnnnnnnnnnnnnnnnnnnnnnnnnnnnnnnnnnnnnnnnnnnnnnnnnnntgtgctcaagagatcctcccacctcagcctcctgagtagctgggaccacaggcgcacgccacgacgcccagctaatttttaaattttttnnnnnnnnnnnnnnnnnnnnnnnnnnnnnnnnnnnnnnnnnnnnnnnnnnnnnnnnnnnnnnnnnnnnnnnnnnnnnnnnnnnnnnnnnnnnnnnnnnnnnnnnagaaggatctccatgaactccagacagggtctctgcctccctcatcctagtgaggtcctcccaacacggaatgagcaggagccggataggtgtggcctaagtcctctcatccctgtgtggtgggagcagctgtggtcttttgggggctctcccctcctctctccccatgtctggacacactccccggcggggcaggagctggccccaccccgcactctgtgcacatcttcctcccacagcgctcgcacagggccgggtgcccagaggccctcggtgagagccaccctctgtgtgatgtcccttctggtgcaccctggccccacactcaccgtcgccctccttctcgccctcactctcctggtcgccttcatagccagagcagcagtccaggctccagtcgaggaagctgcccagcagcgtctcctcctggctggacagctccgcagtgggggtggtaacgaagctgcctctgtcttcctggaggctgttctcccgcttccgtttggttctccgccccgagggagagctgaggaaggcgtggatctcccctgtgctgaggaaagtcggggggtcggggctgtcttgtgtcactcctaatgcagcacacaactggctgtagctcagcacctcttcctggctgatttctccatagcgcttgtcctcaaaccgctgcttcacggcggtcagagagacttgcctgtagtccttgggggcgtcatcatggaagcacttcttatggaggctcaagacgcagggaatgaggtcttcataggagaatccggtgaggtcccacagctgagtggtccagggctgtgtctgcccgtgcgtcagtctggccaggagcagggctgcggcagccaggcgggctggggcgtaggcggacaggctggtgtgcagcagggagagctcgcagaggaagctgcacaggtgctgggttctcagctccacagggactagcgtcagcaggacctccttgtaatccaccacagtggggactcgaatcttcccttccaaggcggagacgatctcgcccatcattctcaccaggtcctcgtacttgtaagtgttgtccgtgagccatacggcctcccggatggtcaggatctctttactgataaaccgggtgcagatgaccatgcaggcgatgcccagcagctggagcctgtaccgcggcaccagcctcctccgcaggtaccggtccacacactccacggtcaggtgcaggcacaggcttgtgaagtccttcatggtggcaacttccaccagccagtcgatcagaatgtacctcattgtgtcattgagtcccttctgcacggagaagacttgttgtttactgacagcctgccaa

SEQ ID NO: 190097 - DNA, 714 bp, Homo Sapiens
ctttgtacaaaaaagttggatttaaaatgccccttgtaagatagaataattgtgaggctggattcactacacaagatgaacttcacttcataaattaattataccttagcgatttgcttctgataatctaaaagtggctagattgtggttgttttggttaaggtgatatggaggtgggagagcttttagttaagtaagaagctatgtaaactgacaaggatgctaaaataaaagtctctgaagtattccatgccttttggaccctttcctcgcaactaactgtcaactgttgatcaaaaaagtcaaggcattgtatgttgcttctgtggttattattctgtgatgcttagactacttgaacccataaacttggaagaatctttgagcaaattttctcagttgtctgtatgacttcagtatattcctgggaatgccataggattttttgtgcttgatacatggtatccagtttgcatagtatcacttctttgtaatccagttgctgttaagaatgatgtactttaaaggaaaagagaaaactgcatcacagtcccattctccagtgtccatgcaatgaattgctgagcatttaggaagcagcaccaagtctattacaggcatggtgtgaaacttgatgtttgacctgtgatcaaattgaaccattgtacagtttggcttctgtttgcttcaaaatatgtagaattgtgggttgat

SEQ ID NO: 190098 - DNA, 897 bp, Homo Sapiens
ttgggacacctgttctgctgttgtgtcctgccattctcctgaagaacagaggcacactgtaaaacccaacacttccccttgcattctataagattacagcaagatggaaataccaaatccccctacctccaaatgtatcacttactggaaaagaaaagtgaaatctgaatacatgcgacttcgacaacttaaacggcttcaggcaaatatgggtgcaaaggctttgtatgtggcaaattttgcaaaggttcaagaaaaaacccagatcctcaatgaagaatggaagaagcttcgtgtccaacctgttcagtcaatgaagcctgtgagtggacacccttttctcaaaaagtgtaccatagagagcattttcccgggatttgcaagccaacatatgttaatgaggtcactgaacacagttgcattggttcccatcatgtattcctggtcccctctccaacagaactttatggtagaagatgagacggttttgtgcaatattccctacatgggagatgaagtgaaagaagaagatgagacttttattgaggagctgatcaataactatgatgggaaagtccatggtgaagaagagatgatccctggatccgttctgattagtgatgctgtttttctggagttggtcgatgccctgaatcagtactcagatgaggaggaggaagggcacaatgacacctcagatggaaagcaggatgacagcaaagaagatctgccagtaacaagaaagagaaagcgacatgctattgaaggcaacaaaaagagttccaagaaacagttcccaaatgacatgatcttcagtgcaattggcctcaatgttccctgagaatggtgtcccagatgacatgaaagagaggtatcgagaactaaacagagatgtca

SEQ ID NO: 190099 - DNA, 1358 bp, Homo Sapiens
  misc_feature (516)..(568): n is a, c, g, or t
ttggcgcatttatcagaaagatgccaccttctataacagaacagcatcgtcatcagacagtgaggaggacccagaagccttggagaagcagaagaaagtgcggcccatgtacctgaaggactacgagaggaaggttatcttggagaaggcaggcaaatatgttgatgaggagaactcagacggggagacttccaatcacagactccaggagacatcgtcgcaaagttatgtggaggaacagaaacagctcaaggaaagcttccgggcatttgtggaggacagtgaggacgaggacggcgctggggagggcggctccagtttgctgcagaaacgtgccaaaaccaggcaggagaaggcccaggaggaggccgactacatcgagtggctgaagggacagaaagagattcggaacccagattccctgaaggaactgacgcatctcaaggaatactggaacgaccctgagttggatgaaggggagcggttcctgcgggattacatcctcaacaaacgctnnnnnnnnnnnnnnnnnnnnnnnnnnnnnnnnnnnnnnnnnnnnnnnnnnnnnggggtccacggtcccccagtccagctggctgtggacgactcctcagacgaaggggagctgtttctgaagaaacaggaggactttgaacagaagtacaatttccgtttcgaggagccggactcagcatcggtcaagacctacccacgcagcatcgcgtcctccgtgcgccgtaaggatgagcgcagaaaggagaagagggaagagactcgggagcgaaagaagagggagaaagcaaagaagcaggaagagctcaagcagctgaagaacctgaagaggaaggagattctggccaagctggagaagctgcggaaagtaacaggcaacgagatgctgggcctcgaggagggggaccttgaagacgacttcgaccctgcccagcacgaccagctcatgcagaagtgctttggggacgagtactacggggccgtggaggaggagaagccacaatttgaggaagaagaagggcttgaagacgactggaactgggacacgtgggacgggcctgagcaggagggagactggagccagcaggagctgcactgtgaggaccccaacttcaacatggacgccgactacgaccccagccagccgaggaagaaaaagcgcgaggcccccttgacgggcaagaagaagcgcaagtcgcccttcgccgcggccgtggggcaggagaagcccgtgttcgaacccggtgaggcccatgtgggcaggccgtgtgtaggcagggggcaccgcggggcctgacatagcccggcagcctggctctgtctcgagcaggggacaagacgttcga

SEQ ID NO: 190100 - DNA, 988 bp, Homo Sapiens
ttggggggagagaggaacaaaggaccgtgaaagctgctctgtaaaagctgacacagccctcccaagtgagcaggactgttcttcccactgcaatctgacagtttactgcatgcctggagagaacacagcagtaaaaaccaggttggctactggaaaaagaggaaagagaagactttcattgacggacccagccatggcagcgtagcagccctgcgtttcagacggcagcagctcgggactctggacgtgtgtttgccctcaagtttgctaagctgctggtttattactgaagaaagaatgtggcagattgttttctttactctgagctgtgatcttgtcttggccgcagcctataacaactttcggaagagcatggacagcataggaaagaagcaatatcaggtccagcatgggtcctgcagctacactttcctcctgccagagatggacaactgccgctcttcctccagcccctacgtgtccaatgctgtgcagagggacgcgccgctcgaatacgatgactcggtgcagaggctgcaagtgctggagaacatcatggaaaacaacactcagtggctaatgaagcttgagaattatatccaggacaacatgaagaaagaaatggtagagatacagcagaatgcagtacagaaccagacggctgtgatgatagaaatagggacaaacctgttgaaccaaacagccgagcaaacgcggaagttaactgatgtggaagcccaagtattaaatcagaccacgagacttgaacttcagctcttggaacactccctctcgacaaacaaattggaaaaacagattttggaccagaccagtgaaataaacaaattgcaagataagaacagtttcctagaaaagaaggtgctagctatggaagacaagcacatcatccaactacagtcaataaaagaagagaaagatcagctacaggtgttagtatccaagcaaaattccatcattgaagaactag

SEQ ID NO: 190101 - DNA, 947 bp, Homo Sapiens
gatggaggggcggcgtggtccaccccccggatattaaaaaatataatttgcctcataaagaaaatcctcatgagatgaagcgcagggaacggcggggtgggagagccaaaaccatggtcagggatgggcggactcgggcatggaatcatgagattccagccccttgagtctgccagtccaaaaatattgggggtttgggggtaccaaagcctcagctctgaaatcttctccggaaaaatgtcacagcccctcactcccttcctggagaggatgtgaggggccaaggggtgggagaagttggcgtcctaggctggggattggtcgggggaccttaaagaaaaaggccagggctgagggtcctgaggagagagagagaggccacgtggatggaggactgtcacccccttctcggttctgtcacccccttgagtctaactcactgttgaggggaggaagaagggggatggacggaagggagaccgaggaaaggctttcgggagtggggacattatccccccagaggtgtgctgccccacccagctgcaccccacaatctggccaactcatttcacagtataaatcactccagcaggacggcatcacagcagcccctgctgcctgaaatcagagcggcccaacgaggaaggccaggagggtcggctggcagggggcagggtcttgggataacactgtcatcagaaacaaggctgggggctgatttcggggtggggagccttaggaggccagaaattccaatcagagccagtttttctgggagggagtggctagacagtcaaggaaggacgttcacatttcaaaagaagtcgggtggggggatgagattattctaggggggcatcgaattccctttaaggggggggctcacttctgcccagagtaaagaggatctcacaccatggaaatgtgccaacttttttgtacaaagt

SEQ ID NO: 190102 - DNA, 1381 bp, Homo Sapiens
ggcatacaggccctcaagtgtttgttgatggggaatctgaaggtcaatgagacagagtcatctctgatggataactactcagaattcttctcaatgcttgtgtccaaagaatcagagggatggcagaccacacaggctttgaggatcaaaaggtaggtttccttgaacttctttattttataggcatagacgatagggttcatcatggagttggcatgggacagcaggatgcccatgtacagcacaagctgtggtacctcaccattaaagtagatgatgcagttgatgatagataaaggcagccatgacagagcaaacaagaaaagaaccagaaacaaggacttagccgtcttgaactcccgtccataaaatgcacctgtctctttggagttagataagttcagactgagtttgttccgaatgatgtaaaagatgtcaagatagatggcgcacatgacaaccagggggatgaaaatccaggtgaggaagctgaagtataccatgtagtccattctcatgacggaaacaaattggcatgaaaggaaggtgacatttctgtggtactctgaggtcagtttcatgttccagccaaacatgggggtcaatcccaccaggaatgacaccagccagcaaaggcccagggccagccatattcttctgtgagtggtgaccctcttgtatctgacggtaagcttgacccgcaagtatcggtccacagcgatggccagcaaggacatgatggaggcgtgggtaaagataagcagtaggcaagtcataaaaaggcagctgtagaagtggattgtgatgcccaggctgacaacaatggccaaaggcatgaccagcaccccaacagcaatgtcagccagggctagagagacaatgaaatagaaggtggtggtctgcaggctggggttcagcttgaccacgcagatgaccagcacgttgcccactatggggcagagtccaatgaaaatttccatggtgatgtaggtaacattggccaatgacagagcagtgctgttgttgggcatcttgccttcccaggggaacctccacagggacaggtgagccagcaagatccgtttgtagggccagtgggcctagctctcgccagatgtcttcccagaggtccatgggcagtgacagtctaaaattcccaattcgctcattcttacccttttttggtggggtgatctattggaaacccttctccttagaaagggctcatcacaggttggtcacttccagcccctttatgcaccgcacatcctcaagtttccagaatgacgtaggacagttctatatggagtgaattggaaagtggtgttgcttttagttccccaaacagatgtccctcaaccttttttgtacaaaagttggc

SEQ ID NO: 190103 - DNA, 1492 bp, Homo Sapiens
ctttgtacaaaaaagttggatccatatatgatcgtatattttgtaaaattgggaaaatcactaccttgtaaaatagtttatttgtatcatcaatattatttctgttacttgaatagtagatattcatcatcatgcttttgcacttgaatttgcaactgaatggattttaaaaaataattctttaatgggatcatgagcatgaaatgggatcctgcatcacttgttttaactatttattttgccatgtttacattttgtatcttgtaaaaataaatccaactttgtgtctaaaaagttaaagattcatagctaggaaatgaaattcttgtaatttttttctaaaggaactgtaaagttttcacttggttcattttgtttcacaatttgactagatggactttttggtaaatactttagtggcatttcactgtcaaatatgaagttcaaggcaaaatagtattttctattactgtgcaggggaaagggatggatcgatacatgcaaatttaatgtagtaactcacttttccatatattttgaatgtatatttctatttatgataccaatttataaaaaataattacacagaaaaaatggaataggaaaaattatgcatctagcacatttaaactgtgcaaatatgaaaatttttcgaggattacattttatctgaaggctgcatattttaactggctttaaaactgtaacacatcacataaaagatactttaccaggtatgtattgcattatatcattgcaataattattggaagtctagatatcgagccatcccaggtgttgggcggggggagggttgtggcaagattgtcttttcaattttggagagttttcctgtggctacaaggcaagtaacgggttggaaaaagtctgactgtaagcgttggacaccttcatagtgtagtgttttagtgactttttttatacggttcttgtaaattagatacgtgtagtggtgtttcagaatgtttgtttatgcactagttcagacaactttccctgttacttgttcttgataagtgaaaactgcagggaaataaaaaatacatatcaaaacatggacatgctgcatatgtgtttatttcacaatgtgcacacagtataagtgaaaatttaagggagatgatagcacttaacagcacttttcatgttcacatgctttccaagcattaatgaaaagaactataggaagctcatctgtgggctctattgggtttcagataatccaatataaactacctttgatatgaaagttcgtaagatattttacagaatgtaagtaatttgcagtatcgcagtcattgaaatgtcataagtgagcctcattttataaataaaagtttagagtagaattatattgcaagggggttttgtcaagtaagtactgggaaatgtaaatatttttaatgaatacaattaaaaccatttcaaacttacataattttatactttacattttttatatctgcagtcc

SEQ ID NO: 190104 - DNA, 1444 bp, Homo Sapiens
ttggcttgctggtggtcgtcggcgagatcgtgaccgaggagcacctgcggcgtgccatcggcaacatcgagctcggaatccgatcatgggacacaaacctgattgaatgcaacttggaccaagaactcaaactttttgtatctcgacactctgcaagattctctcctgaagtcccaggacaaaagatccttcatcaccgaagtgacgttttagaaacagtggtcctgatcaacccttctgatgaagcagtcagcaccgaggtgcgcttaatgatcactgatgctgcccgacacaagctgctcgtgctgaccgggcagtgctttgaaaataccggagagctcattctccagtccggctctttctccttccagaacttcatagagattttcaccgatcaagagatcggggagttactaagcaccacccatcctgccaacaaagccagcttaaccctgttctgtcctgaagaaggggactggaagaactccaatcttgacagacacaatctccaagacttcatcaatattaaactcaattcagcttctatcttgccagaaatggaaggactttctgagtttaccgagtatctctcagaatcagtggaagtcccatctccctttgacatcttggaacctcccacatcgggtggatttctgaagctctccaagccctgctgttatatttttccaggagggaggggcgattctgccttgtttgcagtgaatggtttcaatatgctcatcaatggcggatcagagagaaaatcctgcttctggaagctcatccgacacttagaccgagtggactccatcctgctcacccacattggggatgacaatttgcctggaataaacagcatgttacagcggaaaattgcagagctcgaggaagaacagtcccagggctccaccacaaatagtgactggatgaaaaacctcatctcccctgacttaggagttgtatttctcaatgtacctgaaaatctcaaaaatccagagccaaacatcaagatgaagagaagcatagaagaagcctgcttcactctccagtacctaaacaaattgtccatgaaaccagaacctctgtttagaagtgtaggcaatactattgatcctgtcattcttttccaaaaaatgggagtaggtaaacttgagatgtatgtgcttaatccagtcaagagcagcaaggaaatgcagtattttatgcagcagtggactggtaccaacaaagacaaggctgaattcattctgcctaatggtcaagaagtagatctcccgatttcctacttaacttcagtctcatctttgattgtgtggcatccagcaaaccctgcggagaaaatcatccgagtcctgtttcctgggaacagcacccagtacaacatcctggaaaggttggaaaagctcaaacatctagactttctgagcagccactggccacccaa

SEQ ID NO: 190105 - DNA, 332 bp, Homo Sapiens
aactttgtacaaaaaagttggcgctcttccaggccatgaagaaggagctgatccctactgaggaggccctgcggctgctggatgcccagctggccaccggcggcatcgtggacccccgcctgggcttccaccttcccctggaggtggcttaccagcgtggctacctcaacaaggacacgcacgaccagctgtcagagcccagcgaggtgcgcagctacgtggacccgtccaccgacgagcgcctcagctacacgcagctgctcaggcggtgccgtcgtgacgacggcaccggccagctgctcctgcccctgacggacgcccgcaagctgacc

SEQ ID NO: 190106 - DNA, 919 bp, Homo Sapiens
ctttgtacaaaaaagttggctaattcatggaaattgtaccacatgcctaaccagtcatcactgggaagggaaatcagctaatcttcattagcttagaccaatcatgattcactcgctggtactggccgtcacctctcctgaaggaacagatgcttattaggggctctattagggagggaaaagattgtgacagcacgatgtcttcagggatgaccctggtttgttagggcaaggagatgaaaggaagaggtgctaagtagtaaatcagcataaaggggagcttgcttttggtgactcaagatttcaatcaggcatcatacaaaatgctgagagaacagatggggtgggaagaatgtgaaactagttttacattgcagtttcaaagtttatctttatatccaaataggtatgcagtggaactgatgaagaccctgatgataaaaacgcaccctttcggcaacggccattttgcaaatataaaggacatactgctgatctccttgatctttcatggtctaaaaactactttcttctttcttcttcaatggataaaacagtcagattatggcacatttctcgaagagaatgcctttgctgttttcaacatatagattttgtcactgccatagcttttcatccaagagatgacaggtattttctaagtgggtctttggatggaaagctccgcctttggaacatacctgacaaaaaagtggctttgtggaatgaagtagatggtcagacaaaattgatcacagctgcaaatttctgtcagaatggcaaatatgcagtgattgggacatatgatggcagatgtattttctatgatacagagcatttgaaataccatacacaaatacatgtccgatctactagagggcgcaacaagttggagaaaaattactggcattgagccttt

SEQ ID NO: 190107 - DNA, 1059 bp, Homo Sapiens
ttgggttttgtatcaattttgttaatgaaaaactgcagcagatttttattgaactgacattaaaggcagaacaggaagaatatgttcaagagggaataagatggacacccattgagtactttaataataaaatcgtatgtgacctcatagagaacaaagtgaaccctcctggcatcatgagcatcctggatgacgtgtgcgccacgatgcatgcggtgggtgagggggcagatcagacgctgctccagaaacttcagatgcagattgggagtcatgagcacttcaacagttggaaccaaggcttcatcattcatcattatgctgggaaggtatcctatgacatggatggcttttgtgaaaggaaccgggatgtgctttttatggatctcatcgagcttatgcagagcagcgagctgcctttcataaagtctttatttccggaaaatctgcaggctgacaagaaagggcgcccaactactgccggaagcaaaataaagaaacaagccaatgaccttgtgagcaccctgatgaaatgtacgccccactacattcgctgcatcaagccaaacgaaaccaagaagcccagagactgggaggaaagcagggtaaagcatcaagtcgaatatttgggtctgaaagagaacattcgagtgagaagagctggctatgcctatcggcgcatcttccaaaaattcctacagaggtatgccattctgaccaaagccacctggccttcttggcagggagaggagaagcaaggcgtcctgcacctgctgcagtcggtcaacatggacagcgaccagttccagctggggaggagtaaagtgttcatcaaagcccccgagtctctatttcttttagaagagatgagagagagaaagtatgatgggtatgctcgagtgatacagaaatcatggaggaaattcgtggcccggaagaaatacgttcaaatgagagaagaagcctcagacctcttattgaacaagaaggagagaaggagaaacagtattaacatgaactttataggggattatattgggatggaagagcaccagaact

SEQ ID NO: 190108 - DNA, 1359 bp, Homo Sapiens
  misc_feature (254)..(271): n is a, c, g, or t
ttggatccaccatggtcgccatcgctgcgtgctatgtctaccggaagcagaaaaagaagatggagaatgagtcggccacggagggggaagactctgccatgacagacatgcctccgacagaggaggtgacagacatcgtggaaatgagagaggagaatgaataaggcacgggacgccatgggcactgcagggacagtcagtcaggatgacacttcggcatcatctcttccctctcccatcgtattttgttcccnnnnnnnnnnnnnnnnnnggtaatgaaagaggccttgatttaaaggtttcgtgtcaattctctagcatactgggtatgctcacactgacggggggacctagtgaatggtctttactgttgctatgtaaaaacaaacgaaacaactgacttcatacccctgcctcacgaaaacccaaaagacacagctgcctcacggttgacgttgtgtcctcctcccctggacaatctcctcttggaaccaaaggactgcagctgtgccatcgcgcctcggtcaccctgcacagcaggccacagactctcctgtcccccttcatcgctcttaagaatcaacaggttaaaactcggcttcctttgatttgcttcccagtcacatggccgtacaaagagatggagccccggtggcctcttaaatttcccttccgccacggagttcgaaaccatctactccacacatgcaggaggcgggtggcacgctgcagcccggagtccccgttcacactgaggaacggagacctgtgaccacagcaggctgacagatggacagaatctcccgtagaaaggtttggtttgaaatgccccgggggcagcaaactgacatggttgaatgatagcatttcactctgcgttctcctagatctgagcaagctgtcagttctcacccccaccgtgtatatacatgagctaacttttttaaattgtcacaaaagcgcatctccagattccagaccctgccgcatgacttttcctgaaggcttgcttttccctcgcctttcctgaaggtcgcattagagcgagtcacatggagcatcctaactttgcattttagtttttacagtgaactgaagctttaagtctcatccagcattctaatgccaggttgctgtaggggtaacttttgaagtagatatattacctggttctgctatccttagtcataactctgcggtacaggtaattgagaatgtactacggtacttccctcccacaccatacgataaaagcaagacatttttataccgatacccagagtcactatgtggtccttccctgaaataacgcatttcgaaatccatgcagtgcagtatattttttctaagttttggaaa

SEQ ID NO: 190109 - DNA, 1186 bp, Homo Sapiens
ttggagaaaactaccaaatgaatgacagtagttgggtccaggatggatctcctgaaatggctgaaaatgaatctgaaggtcaaacaaaagtgtttatttggaataatatgggctcccagggaattcaagagactggcaaaacaaggaggaaaaaccaaactacaaaaagatttatttataatattccacctaataatgaaacgaatttagaagattgctcagtaatgcagccacctgttgcctatccagaagaaaatacactactcatcaaggaagaaccagatttagatggtgctctactctcggggccagatggtgataggaatgtgaatgcaaatttattggctgaagctggcactagtcaagatggaggtgatgctggtacttcacatgatttcaagtatggtttgatgcctggtccttcaaatgatttcaagtatggattgataccaggtacttcaaatgatttcaagtatggattgataccaggtgcttcaaatgatttcaagtatggattattgccagaatcttggccaaaacaagaaacctgggaaaatggtgaatcatctctaatcatgaacaagttaaaatgccctcattgtagctatgtagccaaatacagacgaacactaaaaaggcacttgctcattcacacaggagtgagatcatttagctgtgatatttgtggaaaactgtttactcgaagagaacatgtaaaaagacattccctggtgcataaaaaggataaaaaatacaaatgtatggtgtgtaagaagatcttcatgttagcagccagtgttggaataagacatggatctcgacgttatggtgtttgtgtagactgtgcagataaatcacagccaggagggcaagaaggtgtagatcagggacaggatacagaattccctcgggatgaagaatacgaggagaatgaagtaggagaagctgatgaagagctagttgatgatggagaagatcagaatgatccctctcgatgggatgaatcaggagaagtttgtatgtctctagatgattaactgacctactatactcctcaaggatgctgcatttggacctaatatgaatcgacaatttggattgttgaacttgaaggcttgcaaaatatggtacatgctggatagtagtttatgttgctgtgaaaactgtagggtcaaagccttatagc

SEQ ID NO: 190110 - DNA, 872 bp, Homo Sapiens
  misc_feature (398)..(446): n is a, c, g, or t
ttggcagggacagacctggtctctgggctgggggcccccgggcctgggccgggcaggctggaccatacccccagtccaccagctccagtctccacagccatcctggcccacacaggcaccccacacaaacctatttattgaatctgctggacccaagcggctctccagcccttctgtccttccccagccgctcttgtcgccttggcaggacttgactctgcctccctggccagccttgcaagaggactggggtctcctgccctctctgttgagccaggaatcccaagtgaggggttgccctgaggtctgactcttggggcaagcccgccacccactgtgggactttctggtgggctcctcagctcccaccccaggctggggcccagattgtgaggtcnnnnnnnnnnnnnnnnnnnnnnnnnnnnnnnnnnnnnnnnnnnnnnnnngggatctggcctggcccttggggatggggctgctggggactgccccccttcccgccgtggccaggcgctctgtgtgctgtgtgtgccccaggctctgttgaccccgtccaggaactaacttacccagcttgggtctctcctgagtcctccaccctggcctgggattggccagggagcagggcgggcattgggaccagtgtggagcctgagggtgcctgccctgctctggagggagggccaggagctgccacacccccaagtcctctcagggcccaccctcctttttcagcctctgcataaggcccctgggtacactgcagaagccccatccttcccgcctccgggcataaggcccctgaccacacttcagaagccccatcccccccgccaccgggcgatccctgctgtgagccgaagctctccctg

SEQ ID NO: 190111 - DNA, 934 bp, Homo Sapiens
ttggcacagatgatacttccaagtgataattttatttataaactaggtaaaatttgttgttggttccttttagaccacggctgccccttccacaccccatcttgctctaatgatcaaaacatgcttgaataactgagcttagagtatacctcctatatgtccatttaagttaggagagggggcgatatagagactaaggcacaaaattttgtttaaaactcagaatataacatgtaaaatcccatctgctagaagcccatcctgtgccagaggaaggaaaaggaggaaatttcctttctcttttaggaggcacaacagttctcttctaggatttgtttggctgactggcagtaacctagtgaatttttgaaagatgagtaatttctttggcaaccttcctcctcccttactgaaccactctcccacctcctggtggtaccattattatagaagccctctacagcctgactttctctccagcggtccaaagttatcccctcctttacccctcatccaaagttcccactccttcaggacagctgctgtgcattagatattaggggggaaagtcatctgtttaatttacacacttgcatgaattactgtatataaactccttaacttcagggagctattttcatttagtgctaaacaagtaagaaaaataagctcgagtgaatttctaaatgttggaatgttatgggatgtaaacaatgtaaagtaagacatctcacgatttcaccagaagttacagatgaggcactggaagccaccaaattagcagtgcaccttctgtggctgtcttgtttctgaagtacttaaacttccacaagagtgaatttgacctagcaagtttgttcaaaaggtagatcctgagatgatttggtcagattgggataaggcccagcaatctgcattttacagcaccccagtc

SEQ ID NO: 190112 - DNA, 917 bp, Homo Sapiens
agcaatgctttccctataatgccaactttgtacaaaaaagttgggtcttcctgtgttctcaagattgagaatcccagatgatcacgcgatttcagacctatccatgtacaattacatagagatgcgagcacatgtcaactcaagctggttcatttttcagaagaacatggagagatttcttcatgcgattatgccatcgacctttatccctctctatacaatggtcactttttccagaataagataccatgaggctgtgcagcgttggcattggcaaaaaaaggtgataaacaaaggactctttttcttgggatcactgatagccatcagcagtacctacctacttatacactacatgtcaccacgatctttcctccgcttgagaagaccatggaactggatagctcacttccggaatacaacatgtttccccgcaaaggccgtggactccctagaacaaatttccaatctcattagcaggtgatagaaaggttttgtggtagcaaatgcatgatttctctgtgaccaaaattaagcatgaaaaaaatgtttccattgccatatttgattcactagtggaagatagtgttctgcttataattaaactgaatgtagagtatctctgtatgttaattgcaattactggttggggggtgcattttaaaagatgaaacatgcagcttccctacattacacacactcaggttgagtcattctaactataaaagtgcaatgactaagatccttcacttctctgaaagtaaggccctagatgcctcaaggaagacagtaatcatgccttttctttaaaagacacaataggactcgcaacagcattgactcaacacctaggactaaaaatcacaacttaactagcatgttaactgcacttttcattacgtgaatggaacttacct

SEQ ID NO: 190113 - DNA, 544 bp, Homo Sapiens
cccccgggcgcctctagcaaaagcctgtccgtcagtccctaggtatccgcactgctcagggcagctgatagaaccatggcgaccattgctgctgctgcgtttgaagccctcatggatggagtgacatgctgggatgtccccagaggccccatccccagtgaactccttcttattggagaagccgccttccccgtgatggtgaatgacaagggccaggtgctcattgctgcctcctcctacggccgaggccgcctcgtggttgtgtcccatgagggctacctgtcgcatgctggcttggctccatttctcctcaatgcagttagctggctctgtccctgtcctggggctcccgtgggagtgcatccatccctggcacctctagtaaacatcctacaggatgctgggcttgaggcacaggtcaagccagaaccaggagagcccctaggggtttacagtatcaatgcctacaatgacaccttgactgcaacgctgatccaatttgtgaaacatggagggagcttgttaatcgggggccaggcctggt

SEQ ID NO: 190114 - DNA, 1151 bp, Homo Sapiens
ttggctatgtcagcgtggaagtgattcgtcttggacagagtcacttcatcaactgggacctgcaaatgtactatgctgagaaggacacacccgcaaaagctagaaccaccacactcaatgaacagctcgggcagatccattatatcttctctgataagacggggacactcacacaaaatatcatgacctttaaaaagtgctgtatcaacgggcagatatatggggaccatcgggatgcctctcaacacaaccacaacaaaatagagcaagttgattttagctggaatacatatgctgatgggaagcttgcattttatgaccactatcttattgagcaaatccagtcagggaaagagccagaagtacgacagttcttcttcttgctcgcagtttgccacacagtcatggtggataggactgatggtcagctcaactaccaggcagcctctcccgatgaaggtgccctggtaaacgctgccaggaactttggctttgccttcctcgccaggacccagaacaccatcaccatcagtgaactgggcactgaaaggacttacaatgttcttgccattttggacttcaacagtgaccggaagcgaatgtctatcattgtaagaaccccagaaggcaatatcaagctttactgtaaaggtgctgacactgttatttatgaacggttacatcgaatgaatcctactaagcaagaaacacaggatgccctggatatctttgcaaatgaaactcttagaaccctatgcctttgctacaaggaaattgaagaaaaagaatttacagaatggaataaaaagtttatggctgccagtgtggcctccaccaaccgggacgaagctctggataaagtatatgaggagattgaaaaaacttaattctcctgggagctacagctattgaagacaagctacaggatggagttccagaaaaccatttcaaacttgcaaaagctgacattaagatctgggttgcttactggagacaaaaggaaactgctgaaaatataggatttgcttgtgaacttcctgactgaagacaccaccatctgctatggggaggatattattctctttcttcatgcaagatggaaaacagaggaatagaggtggcgtctacgcaagtttgcacctcctgtgcag

SEQ ID NO: 190115 - DNA, 972 bp, Homo Sapiens
gagcaatgctttttctattatagccaactttgtacaaaaaagttgggtactttgaacgtggctggtcccttcaaaggaccacaagcagcagtagccagtcagaattacacacccaaaccaacagtttccacaccaacagtcaatgctgttcagcctggtgcagtgggaccatccaatgagcttccaggaatgagtgggagaggagctcagctctttgctaaaaggcagtcgagaatggagaagtatgtggtcgattcagacacggtgcaggcccacgctgctcgagctcagtctcccactccatctctcccggccagttggaagtactcctccaatgtccgagcacctcctcctgtggcctataatcctatccactcgccgtcttacccactggctgctctcaagtctcagccatcagctgcacagccctccaaaatgggcaagaaaaagggaaagaaacccctcaatgcattagatgtcatgaagcaccaaccgtatcagctcaatgcatccttgtttactttccaacctccagatgcaaaggatggcctcccccagaagtcatcagtcaaggtcaattcagccctggccatgaagcaagctcttcctccccggccagtgaatgctgcctcacctacgaatgtgcaggcttcgtcagtgtactcggtaccagcctatacctctcctccttccttctttgcagaggcctcctcaccagtcagtgcatccccagtgcctgtgggcattcccacctcgccaaagcaagaatcagcctcatcatcttattttgtggcaccaaggccaaagttctcagccaagaaaagtggtgtcacaattcacgtgtggaaaccatctgttgtggaagagtaatcttgtagctgaagctgagtgtccactttgcttgaaatgaattgtttgcagtgtttcttgagtccctgagaatgcctagcaagtcctcaacttacttaattt

SEQ ID NO: 190116 - DNA, 961 bp, Homo Sapiens
ggaaatttgattcaaaataacaaccgtggacatttaagtaaactttgcccatgggctgctacatgattttaaggagagattccaaaagaaaagcctttccacagattgtgcatttgtaagggctatgaacattatgcttattaaccaaatgatgcaaaacagcaccttttttcatagcacgacagcaacaaatttgcaataatactttccttttccacgcttcatgtattttgcaatctcctcttcagagataaaagcttctttttcttcagtaaactgtagcacatttctagactgctctggactagtcatgtccattttgttctctttgctaaaatcaatggattccacatcaacctgctcttgatcactgcttgattcctggcccttaatatccatcgcatccaaatctgtttttatgtactcactactactaagctcagcgtctgagctctcttggttgtctttcttgagcttctttgaggaaggaaataaagtatcttctaagagtttcttaggtgaagctagaagttcttcctgaaccaaaatatcacatttttgatcatctatggaatctatttgtagttcatcaccaagctcaacagccttctgtgattctgagaatagagcagatttggggagttcagggaaaagggcatgcttccgggactctggaaaaagggcacgtttgcgtgcttctggagaagcaggaggggctgttttggcaggctcgggaaacagggcaggttttctaggctcagtatcgatagagagaacaggcttccagatatctgaggctgctttgggggactcagatggcccagaaggacctggttttcgggtctcagggaagacaggtttctgaggctcaataaaaaaggaagacttccagagatcaggagaaccaccacgggaacttttctgggactcagggaaatcaagtgaagcaggagaagtccaa

SEQ ID NO: 190117 - DNA, 844 bp, Homo Sapiens
gcttttttcctaatagaacaactttgtacaaaaaagttggatttcctttctctataacttttgaaagtagatgttcttttaatttttgtgggtgatggtttatgctgcacctattcagctgccaatgtggtacaaagcagccattgacaatacagtttaaatgtgatcgcatcaaactagaaaatgatatgcaaggaagagatttttcagcctttgttttggatttcagatgcctaatcattatgatctagactgccctacagccccaattccatgcacattcagtacttttggttgccatgaaaagatgcagaggaatcacttggcacgccacctacaagagaacacccagtcacacatgagaatgttggcccaggctgttcatagtttgagcgttatacccgactctgggtatatctcaaaggtccggaatttccaggaaactattcaccagttagagggtcgccttgtaagacaagaccatcaaatccgggagctgactgctaaaatggaaactcagagtatgtatgtaagtgagctcaaacgaaccattcgaacccttgaggacaaagttgctgaaatcgaagcacagcagtgcaatggaatttatatttggaagattggcaactttggaatgcatttgaaatgtcaagaagaggaaaaacctgttgtgattcatagccctggattctacactggcaaacccggggtacaaactgtgcatgcgcttgcaccttcaattaccgactgctcaacgctgtgcaaactatatatcccttttttgtcacacaatgaaagagaatatgacagccacctcccttggccctccagggtacgatacgcc

SEQ ID NO: 190118 - DNA, 212 bp, Homo Sapiens
aaaaagttggactcccttgtctcttacccctccttgtcaaaaatatccaaacagccatagaggctcttgtggacagacggactaccacacgactaatggccctaactaagtattaacccctgccaagaaaagagctacttcctcttgaaataaatgaagatagtgatgctttctcttaaactttacttataaaaagcatcaaaggggggaat

SEQ ID NO: 190119 - DNA, 982 bp, Homo Sapiens
agcaatgcttttttctaatagccaactttgtacaaaaaagttggcaaagaaaagaaacggactggaaagttatgaaggaggagctacagcgggaagctgaggagaagttaacattgatgctacttgaactgagagaaaaggctgaatccgagaaacagaccatcataaacaagtttgagcttcgagaagctgaaatgaggcagcttcaggaccaacaggcagcccagatcctggatctggagaggtccttgacggagcagcagggccgcctgcagcagctggaacaggacctcacttcagacgacgccctgcattgcagccagtgtgggcgggagccgcccacagcccaggacggggagcttgccgcgctccacgtgaaggaagactgcgccctgcagctgatgctggcccggagcaggtttttagaggaacgtaaagagatcaccgagaaattcagtgcggaacaagatgccttcctgcaggaggcccaggagcagcatgcccgtgagctgcagctcctccaggagagacaccagcagcagctcctgtcagtgacggcggagctcgaggccagacaccaggccgcgttgggcgagctgacagcctccttagagagcaagcagggggctctgctggctgcacgtgtggccgaactgcagacaaaacacgctgccgacctcggcgctctggagaccagacatctgtccagccttgattctttggaatcctgttacctgtctgaatttcagaccatccgtgaggagcacaggcaggccctagagctcttacgagcagactttgaggaacaactgtggaaaaaggactctcttcaccaaacgattttgactcaagagttgggagaaactgaagcggaacacgaaggggagctacagtctgtgcgggaccacctgcgaaccgaagcgagcacagagctcgccggaaccgtgctcacgagctgcagggagtgcaccagggtgaattt

SEQ ID NO: 190120 - DNA, 732 bp, Homo Sapiens
ttggatttcttggctatatggatatttgatggtcctacaggtgaaggccgacttttgagattcagaatgggtcatagtgctcctcttaccaatatcagatattatggacagaatggacagcagattctaagtgcaagtcaagatggaactcttcagtcattttccacggtacatgaaaaattccatagcagcttgggacatggattagtaaataaaaagagagttaaacgtaaaggacttctaaataccatgtcagtgagacttccacccatcacaaagtttgcagcagaggaagctcgtgaaagtgactgggatggtatcattgcttgccatcaaggtaagctatcttgctcaacctggaattatcagaaatctacaataggcgcttactttctcaagccaaaagagttgaagaaagatgacataactgcaacagcagtggatataacttcttgtggaaactttgctgtaattggcctctcatcaagaactgtagatgtatataacatgcagtctggcatacatcgaggaagttttggcaaggatcaagctcacaagggatctgttacaggtgtcgcattggatggattaaaccaattgacagttacaactggtagtgaaggattactcatattctggaactttaaaaacaaaattttaatccattctgtgagcctcacttcatctccaaatatcatgtagctacatagggacagtggcattctgggactc

SEQ ID NO: 190121 - DNA, 921 bp, Homo Sapiens
gccaactttgtacaaaaaagttggccacactccccgccgagaagcctcgctcggcgcccaacatggcgggtgggcgctgcggcccgcagctaacggcgctcctggccgcctggatcgcggctgtggcggcgacggcaggccccgaggaggccgcgctgccgccggagcagagccgggtccagcccatgaccgcctccaactggacgctggtgatggagggcgagtggatgctgaaattttacgccccatggtgtccatcctgccagcagactgattcagaatgggaggcttttgcaaagaatggtgaaatacttcagatcagtgtggggaaggtagatgtcattcaagaaccaggtttgagtggccgcttctttgtcaccactctcccagcattttttcatgcaaaggatgggatattccgccgttatcgtggcccaggaatcttcgaagacctgcagaattatatcttagagaagaaatggcaatcagtcgagcctctgactggctggaaatccccggcttctctaacgatgtctggaatggctggtctttttagcatctctggcaagatatggcatcttcacaactatttcacagtgactcttggaattcctgcttggtgttcttatgtctttttcgtcatagccaccttggtttttggcctttttatgggtctggtcttggtggtaatatcagaatgtttctatgtgccacttccaaggcatttatctgagcgttctgagcagaatcggagatcagaggaggctcatagagctgaacagttgcaggatgcggaggaggaaaaagatgattcaaatgaagaagaaaacaaagacagccttgtagatgatgaagaagagaaagaagatcttggcgatgaggatgaagcagaggaagagaggaggaggacacttggctgct

SEQ ID NO: 190122 - DNA, 908 bp, Homo Sapiens
ttggcaggtcctgcctttttgagcagggcactcgaagggtaggaccaagttcaggggatgcccctgagccctcctccagaaggacccaaagtagcctcactgtgtcagaggtgcttacccgtcggaatcgggtaggagacaccatcactgtcgcagcctggaaccactcagcaagcatggaggaagaaggggaagactgtacactcagtgtctacaggcaactgcacaactccctggatccgtctgaactgcctgggaagcaggggctgccagagtctgggcgagtacgggccgaggaacgattacggccaaccaggccctgtgctgaggagaactgagcccgctgggtgtctgttgtctgccctctgctcctgcttctcagctcttccaccgtcctgccccacgaaggatccaaggccagttaaccaggcaagacacaagccttggctggaaaactgtggtagagccgggctgtggctcaggtaatttttgccatttggccagagggaatcagagactacaagctggacagtcacccaggcccaaccttccccaatgcacgagtcctctctctctccttgtccctgtccaccaagtagttggaccattctggcccccaaacaggggaagataaagtccccagcacacagcaggagtcaaaaattcttctcggctccttggtgggttgtttctggatcctagggcagcctctgtctgtgtggttaatgttctggtttctcagtctcctcactatatccacttcactcctcatttgcccaatgggctcaagtaccccataagatttaccagccatcagctctatctagggggctttcatttctttccccttggagttcttttcttcagacttaaagcagaaagggtctgtgctgcctctaaaggattat

SEQ ID NO: 190123 - DNA, 473 bp, Homo Sapiens; identical to SEQ ID NO: 162674
  misc_feature (311)..(329): n is a, c, g, or t

SEQ ID NO: 190124 - DNA, 475 bp, Homo Sapiens; identical to SEQ ID NO: 162803

SEQ ID NO: 190125 - DNA, 2024 bp, Homo Sapiens; identical to SEQ ID NO: 162830
  misc_feature (1192)..(1205): n is a, c, g, or t
  misc_feature (1508)..(1520): n is a, c, g, or t
  misc_feature (1526)..(1526): n is a, c, g, or t
  misc_feature (1555)..(1555): n is a, c, g, or t
  misc_feature (1587)..(1595): n is a, c, g, or t
  misc_feature (1601)..(1601): n is a, c, g, or t
  misc_feature (1613)..(1622): n is a, c, g, or t
  misc_feature (1627)..(1627): n is a, c, g, or t
  misc_feature (1681)..(1681): n is a, c, g, or t
  misc_feature (1740)..(1751): n is a, c, g, or t
  misc_feature (1823)..(1824): n is a, c, g, or t
  misc_feature (1857)..(1865): n is a, c, g, or t
  misc_feature (1899)..(1899): n is a, c, g, or t
  misc_feature (1939)..(1954): n is a, c, g, or t

SEQ ID NO: 190126 - DNA, 1169 bp, Homo Sapiens; identical to SEQ ID NO: 162833
  misc_feature (680)..(689): n is a, c, g, or t

SEQ ID NO: 190127 - DNA, 1085 bp, Homo Sapiens; identical to SEQ ID NO: 162993

SEQ ID NO: 190128 - DNA, 798 bp, Homo Sapiens; identical to SEQ ID NO: 162995

SEQ ID NO: 190129 - DNA, 417 bp, Homo Sapiens; identical to SEQ ID NO: 163011

SEQ ID NO: 190130 - DNA, 401 bp, Homo Sapiens; identical to SEQ ID NO: 163012
  misc_feature (28)..(28): n is a, c, g, or t

SEQ ID NO: 190131 - DNA, 1304 bp, Homo Sapiens; identical to SEQ ID NO: 163013

SEQ ID NO: 190132 - DNA, 387 bp, Homo Sapiens; identical to SEQ ID NO: 163015
  misc_feature (251)..(251): n is a, c, g, or t
  misc_feature (256)..(256): n is a, c, g, or t
  misc_feature (299)..(299): n is a, c, g, or t
  misc_feature (305)..(305): n is a, c, g, or t
  misc_feature (326)..(326): n is a, c, g, or t
  misc_feature (335)..(335): n is a, c, g, or t
  misc_feature (364)..(364): n is a, c, g, or t

SEQ ID NO: 190133 - DNA, 1380 bp, Homo Sapiens; identical to SEQ ID NO: 163018
  misc_feature (918)..(939): n is a, c, g, or t
  misc_feature (983)..(983): n is a, c, g, or t

SEQ ID NO: 190134 - DNA, 688 bp, Homo Sapiens; identical to SEQ ID NO: 163021
  misc_feature (48)..(48): n is a, c, g, or t
  misc_feature (251)..(251): n is a, c, g, or t

SEQ ID NO: 190135 - DNA, 737 bp, Homo Sapiens; identical to SEQ ID NO: 163076
  misc_feature (476)..(532): n is a, c, g, or t

SEQ ID NO: 190136 - DNA, 668 bp, Homo Sapiens; identical to SEQ ID NO: 163078
  misc_feature (116)..(285): n is a, c, g, or t
  misc_feature (315)..(454): n is a, c, g, or t

SEQ ID NO: 190137 - DNA, 1389 bp, Homo Sapiens; identical to SEQ ID NO: 163303
  misc_feature (256)..(325): n is a, c, g, or t
  misc_feature (769)..(793): n is a, c, g, or t
  misc_feature (864)..(966): n is a, c, g, or t
  misc_feature (973)..(987): n is a, c, g, or t
  misc_feature (1056)..(1207): n is a, c, g, or t
  misc_feature (1221)..(1234): n is a, c, g, or t
  misc_feature (1257)..(1266): n is a, c, g, or t
  misc_feature (1317)..(1317): n is a, c, g, or t
  misc_feature (1321)..(1329): n is a, c, g, or t

SEQ ID NO: 190138 - DNA, 806 bp, Homo Sapiens; identical to SEQ ID NO: 163306

SEQ ID NO: 190139 - DNA, 478 bp, Homo Sapiens; identical to SEQ ID NO: 163307

SEQ ID NO: 190140 - DNA, 1423 bp, Homo Sapiens; identical to SEQ ID NO: 163308

SEQ ID NO: 190141 - DNA, 649 bp, Homo Sapiens; identical to SEQ ID NO: 163340

SEQ ID NO: 190142 - DNA, 1617 bp, Homo Sapiens; identical to SEQ ID NO: 163359
  misc_feature (989)..(1006): n is a, c, g, or t

SEQ ID NO: 190143 - DNA, 412 bp, Homo Sapiens; identical to SEQ ID NO: 163360

SEQ ID NO: 190144 - DNA, 754 bp, Homo Sapiens; identical to SEQ ID NO: 163365

SEQ ID NO: 190145 - DNA, 1225 bp, Homo Sapiens; identical to SEQ ID NO: 163407
  misc_feature (1205)..(1205): n is a, c, g, or t
  misc_feature (1207)..(1207): n is a, c, g, or t

SEQ ID NO: 190146 - DNA, 699 bp, Homo Sapiens; identical to SEQ ID NO: 163417

SEQ ID NO: 190147 - DNA, 688 bp, Homo Sapiens; identical to SEQ ID NO: 163442
  misc_feature (256)..(305): n is a, c, g, or t
  misc_feature (488)..(498): n is a, c, g, or t

SEQ ID NO: 190148 - DNA, 416 bp, Homo Sapiens; identical to SEQ ID NO: 163513

SEQ ID NO: 190149 - DNA, 354 bp, Homo Sapiens; identical to SEQ ID NO: 163546

SEQ ID NO: 190150 - DNA, 376 bp, Homo Sapiens; identical to SEQ ID NO: 163593
  misc_feature (169)..(180): n is a, c, g, or t

SEQ ID NO: 190151 - DNA, 522 bp, Homo Sapiens; identical to SEQ ID NO: 163595

SEQ ID NO: 190152 - DNA, 610 bp, Homo Sapiens; identical to SEQ ID NO: 163609
  misc_feature (510)..(568): n is a, c, g, or t

SEQ ID NO: 190153 - DNA, 1073 bp, Homo Sapiens; identical to SEQ ID NO: 163615
  misc_feature (48)..(48): n is a, c, g, or t

SEQ ID NO: 190154 - DNA, 2085 bp, Homo Sapiens; identical to SEQ ID NO: 163628
  misc_feature (389)..(434): n is a, c, g, or t
  misc_feature (664)..(664): n is a, c, g, or t
  misc_feature (2007)..(2007): n is a, c, g, or t
  misc_feature (2019)..(2019): n is a, c, g, or t
  misc_feature (2025)..(2025): n is a, c, g, or t
  misc_feature (2036)..(2036): n is a, c, g, or t
  misc_feature (2046)..(2046): n is a, c, g, or t

SEQ ID NO: 190155 - DNA, 400 bp, Homo Sapiens; identical to SEQ ID NO: 163834

SEQ ID NO: 190156 - DNA, 654 bp, Homo Sapiens; identical to SEQ ID NO: 163856

SEQ ID NO: 190157 - DNA, 3050 bp, Homo Sapiens; identical to SEQ ID NO: 163941

SEQ ID NO: 190158 - DNA, 724 bp, Homo Sapiens; identical to SEQ ID NO: 163942

SEQ ID NO: 190159 - DNA, 528 bp, Homo Sapiens; identical to SEQ ID NO: 163943

SEQ ID NO: 190160 - DNA, 2697 bp, Homo Sapiens; identical to SEQ ID NO: 163945

SEQ ID NO: 190161 - DNA, 1723 bp, Homo Sapiens; identical to SEQ ID NO: 163946

SEQ ID NO: 190162 - DNA, 1224 bp, Homo Sapiens; identical to SEQ ID NO: 163947
  misc_feature (1041)..(1152): n is a, c, g, or t

SEQ ID NO: 190163 - DNA, 615 bp, Homo Sapiens; identical to SEQ ID NO: 163949

SEQ ID NO: 190164 - DNA, 314 bp, Homo Sapiens; identical to SEQ ID NO: 163950

SEQ ID NO: 190165 - DNA, 588 bp, Homo Sapiens; identical to SEQ ID NO: 163951

SEQ ID NO: 190166 - DNA, 788 bp, Homo Sapiens; identical to SEQ ID NO: 163974

SEQ ID NO: 190167 - DNA, 359 bp, Homo Sapiens; identical to SEQ ID NO: 163978
  misc_feature (169)..(228): n is a, c, g, or t

SEQ ID NO: 190168 - DNA, 411 bp, Homo Sapiens; identical to SEQ ID NO: 163982

SEQ ID NO: 190169 - DNA, 383 bp, Homo Sapiens; identical to SEQ ID NO: 164031
  misc_feature (354)..(354): n is a, c, g, or t
  misc_feature (373)..(373): n is a, c, g, or t

SEQ ID NO: 190170 - DNA, 612 bp, Homo Sapiens; identical to SEQ ID NO: 164039
  misc_feature (70)..(87): n is a, c, g, or t

SEQ ID NO: 190171 - DNA, 964 bp, Homo Sapiens; identical to SEQ ID NO: 164047
  misc_feature (860)..(860): n is a, c, g, or t
  misc_feature (874)..(874): n is a, c, g, or t
  misc_feature (900)..(900): n is a, c, g, or t
  misc_feature (905)..(905): n is a, c, g, or t
  misc_feature (923)..(923): n is a, c, g, or t
  misc_feature (930)..(930): n is a, c, g, or t
  misc_feature (942)..(942): n is a, c, g, or t

SEQ ID NO: 190172 - DNA, 201 bp, Homo Sapiens; identical to SEQ ID NO: 164049

SEQ ID NO: 190173 - DNA, 900 bp, Homo Sapiens; identical to SEQ ID NO: 164050

SEQ ID NO: 190174 - DNA, 869 bp, Homo Sapiens; identical to SEQ ID NO: 164051

SEQ ID NO: 190175 - DNA, 1740 bp, Homo Sapiens; identical to SEQ ID NO: 164053

SEQ ID NO: 190176 - DNA, 977 bp, Homo Sapiens; identical to SEQ ID NO: 164138

SEQ ID NO: 190177 - DNA, 440 bp, Homo Sapiens; identical to SEQ ID NO: 164189

SEQ ID NO: 190178 - DNA, 989 bp, Homo Sapiens; identical to SEQ ID NO: 164270

SEQ ID NO: 190179 - DNA, 1940 bp, Homo Sapiens; identical to SEQ ID NO: 164329
  misc_feature (117)..(231): n is a, c, g, or t
  misc_feature (311)..(404): n is a, c, g, or t
  misc_feature (441)..(500): n is a, c, g, or t
  misc_feature (535)..(626): n is a, c, g, or t
  misc_feature (697)..(744): n is a, c, g, or t

SEQ ID NO: 190180 - DNA, 648 bp, Homo Sapiens; identical to SEQ ID NO: 164427
  misc_feature (266)..(316): n is a, c, g, or t
  misc_feature (415)..(415): n is a, c, g, or t
  misc_feature (426)..(426): n is a, c, g, or t
  misc_feature (487)..(487): n is a, c, g, or t
  misc_feature (550)..(550): n is a, c, g, or t
  misc_feature (604)..(604): n is a, c, g, or t
  misc_feature (606)..(606): n is a, c, g, or t

SEQ ID NO: 190181 - DNA, 1588 bp, Homo Sapiens; identical to SEQ ID NO: 164582
  misc_feature (415)..(426): n is a, c, g, or t
  misc_feature (665)..(674): n is a, c, g, or t
  misc_feature (688)..(688): n is a, c, g, or t

SEQ ID NO: 190182 - DNA, 923 bp, Homo Sapiens; identical to SEQ ID NO: 164624

SEQ ID NO: 190183 - DNA, 317 bp, Homo Sapiens; identical to SEQ ID NO: 164664

SEQ ID NO: 190184 - DNA, 744 bp, Homo Sapiens; identical to SEQ ID NO: 164692

SEQ ID NO: 190185 - DNA, 253 bp, Homo Sapiens; identical to SEQ ID NO: 164769

SEQ ID NO: 190186 - DNA, 2644 bp, Homo Sapiens; identical to SEQ ID NO: 164868
  misc_feature (1810)..(1810): n is a, c, g, or t

SEQ ID NO: 190187 - DNA, 489 bp, Homo Sapiens; identical to SEQ ID NO: 164969

SEQ ID NO: 190188 - DNA, 295 bp, Homo Sapiens; identical to SEQ ID NO: 164971

SEQ ID NO: 190189 - DNA, 991 bp, Homo Sapiens; identical to SEQ ID NO: 165281
  misc_feature (596)..(596): n is a, c, g, or t
  misc_feature (683)..(693): n is a, c, g, or t
  misc_feature (771)..(785): n is a, c, g, or t

SEQ ID NO: 190190 - DNA, 601 bp, Homo Sapiens; identical to SEQ ID NO: 165302
  misc_feature (233)..(233): n is a, c, g, or t

SEQ ID NO: 190191 - DNA, 620 bp, Homo Sapiens; identical to SEQ ID NO: 165303

SEQ ID NO: 190192 - DNA, 405 bp, Homo Sapiens; identical to SEQ ID NO: 165311
  misc_feature (20)..(20): n is a, c, g, or t

SEQ ID NO: 190193 - DNA, 408 bp, Homo Sapiens; identical to SEQ ID NO: 165320
  misc_feature (25)..(25): n is a, c, g, or t
  misc_feature (30)..(30): n is a, c, g, or t
  misc_feature (99)..(99): n is a, c, g, or t

SEQ ID NO: 190194 - DNA, 472 bp, Homo Sapiens; identical to SEQ ID NO: 165378

SEQ ID NO: 190195 - DNA, 274 bp, Homo Sapiens; identical to SEQ ID NO: 165424

SEQ ID NO: 190196 - DNA, 889 bp, Homo Sapiens; identical to SEQ ID NO: 165537

SEQ ID NO: 190197 - DNA, 770 bp, Homo Sapiens; identical to SEQ ID NO: 165564

SEQ ID NO: 190198 - DNA, 871 bp, Homo Sapiens; identical to SEQ ID NO: 14978

SEQ ID NO: 190199 - DNA, 701 bp, Homo Sapiens; identical to SEQ ID NO: 165626
  misc_feature (548)..(556): n is a, c, g, or t

SEQ ID NO: 190200 - DNA, 1110 bp, Homo Sapiens; identical to SEQ ID NO: 165627
  misc_feature (68)..(79): n is a, c, g, or t
  misc_feature (257)..(277): n is a, c, g, or t
  misc_feature (799)..(799): n is a, c, g, or t
  misc_feature (872)..(872): n is a, c, g, or t

SEQ ID NO: 190201 - DNA, 619 bp, Homo Sapiens; identical to SEQ ID NO: 165642

SEQ ID NO: 190202 - DNA, 985 bp, Homo Sapiens; identical to SEQ ID NO: 165882
  misc_feature (561)..(651): n is a, c, g, or t

SEQ ID NO: 190203 - DNA, 860 bp, Homo Sapiens; identical to SEQ ID NO: 165972

SEQ ID NO: 190204 - DNA, 536 bp, Homo Sapiens; identical to SEQ ID NO: 166210

SEQ ID NO: 190205 - DNA, 1232 bp, Homo Sapiens; identical to SEQ ID NO: 166317
  misc_feature (204)..(212): n is a, c, g, or t

SEQ ID NO: 190206 - DNA, 1100 bp, Homo Sapiens; identical to SEQ ID NO: 166329
  misc_feature (37)..(38): n is a, c, g, or t
  misc_feature (67)..(68): n is a, c, g, or t
  misc_feature (71)..(76): n is a, c, g, or t
  misc_feature (171)..(371): n is a, c, g, or t
  misc_feature (666)..(961): n is a, c, g, or t

SEQ ID NO: 190207 - DNA, 1178 bp, Homo Sapiens; identical to SEQ ID NO: 166376
  misc_feature (182)..(182): n is a, c, g, or t
  misc_feature (380)..(468): n is a, c, g, or t
  misc_feature (524)..(552): n is a, c, g, or t
  misc_feature (658)..(754): n is a, c, g, or t
  misc_feature (1022)..(1022): n is a, c, g, or t

SEQ ID NO: 190208 - DNA, 938 bp, Homo Sapiens; identical to SEQ ID NO: 166378
  misc_feature (667)..(675): n is a, c, g, or t
  misc_feature (745)..(753): n is a, c, g, or t

SEQ ID NO: 190209 - DNA, 559 bp, Homo Sapiens; identical to SEQ ID NO: 166394

SEQ ID NO: 190210 - DNA, 870 bp, Homo Sapiens; identical to SEQ ID NO: 166456

SEQ ID NO: 190211 - DNA, 791 bp, Homo Sapiens; identical to SEQ ID NO: 166544

SEQ ID NO: 190212 - DNA, 790 bp, Homo Sapiens; identical to SEQ ID NO: 166545

SEQ ID NO: 190213 - DNA, 462 bp, Homo Sapiens; identical to SEQ ID NO: 166550
  misc_feature (301)..(376): n is a, c, g, or t

SEQ ID NO: 190214 - DNA, 334 bp, Homo Sapiens; identical to SEQ ID NO: 166610

SEQ ID NO: 190215 - DNA, 594 bp, Homo Sapiens; identical to SEQ ID NO: 166619

SEQ ID NO: 190216 - DNA, 977 bp, Homo Sapiens; identical to SEQ ID NO: 166621

SEQ ID NO: 190217 - DNA, 847 bp, Homo Sapiens; identical to SEQ ID NO: 166622
  misc_feature (48)..(108): n is a, c, g, or t
  misc_feature (155)..(157): n is a, c, g, or t
  misc_feature (176)..(238): n is a, c, g, or t
  misc_feature (377)..(385): n is a, c, g, or t
  misc_feature (671)..(671): n is a, c, g, or t

SEQ ID NO: 190218 - DNA, 917 bp, Homo Sapiens; identical to SEQ ID NO: 71566
  misc_feature (456)..(464): n is a, c, g, or t
  misc_feature (682)..(691): n is a, c, g, or t

SEQ ID NO: 190219 - DNA, 352 bp, Homo Sapiens; identical to SEQ ID NO: 166765
  misc_feature (41)..(94): n is a, c, g, or t

SEQ ID NO: 190220 - DNA, 849 bp, Homo Sapiens; identical to SEQ ID NO: 166784

SEQ ID NO: 190221 - DNA, 539 bp, Homo Sapiens; identical to SEQ ID NO: 166856

SEQ ID NO: 190222 - DNA, 612 bp, Homo Sapiens; identical to SEQ ID NO: 166858

SEQ ID NO: 190223 - DNA, 420 bp, Homo Sapiens; identical to SEQ ID NO: 166859
  misc_feature (153)..(154): n is a, c, g, or t
  misc_feature (175)..(175): n is a, c, g, or t
  misc_feature (204)..(298): n is a, c, g, or t

SEQ ID NO: 190224 - DNA, 758 bp, Homo Sapiens; identical to SEQ ID NO: 167002
  misc_feature (99)..(156): n is a, c, g, or t

SEQ ID NO: 190225 - DNA, 694 bp, Homo Sapiens; identical to SEQ ID NO: 167123

SEQ ID NO: 190226 - DNA, 877 bp, Homo Sapiens; identical to SEQ ID NO: 167136
  misc_feature (558)..(575): n is a, c, g, or t

SEQ ID NO: 190227 - DNA, 523 bp, Homo Sapiens; identical to SEQ ID NO: 167216

SEQ ID NO: 190228 - DNA, 556 bp, Homo Sapiens; identical to SEQ ID NO: 167239

SEQ ID NO: 190229 - DNA, 453 bp, Homo Sapiens; identical to SEQ ID NO: 167240

SEQ ID NO: 190230 - DNA, 2229 bp, Homo Sapiens; identical to SEQ ID NO: 167241
  misc_feature (23)..(23): n is a, c, g, or t
  misc_feature (34)..(34): n is a, c, g, or t
  misc_feature (36)..(36): n is a, c, g, or t
  misc_feature (54)..(54): n is a, c, g, or t
  misc_feature (73)..(73): n is a, c, g, or t
  misc_feature (88)..(88): n is a, c, g, or t
  misc_feature (95)..(95): n is a, c, g, or t
  misc_feature (125)..(125): n is a, c, g, or t
  misc_feature (150)..(150): n is a, c, g, or t
  misc_feature (179)..(179): n is a, c, g, or t
  misc_feature (212)..(212): n is a, c, g, or t
  misc_feature (240)..(240): n is a, c, g, or t

SEQ ID NO: 190231 - DNA, 456 bp, Homo Sapiens; identical to SEQ ID NO: 167299

SEQ ID NO: 190232 - DNA, 240 bp, Homo Sapiens; identical to SEQ ID NO: 167389

SEQ ID NO: 190233 - DNA, 1384 bp, Homo Sapiens; identical to SEQ ID NO: 167390

SEQ ID NO: 190234 - DNA, 1055 bp, Homo Sapiens; identical to SEQ ID NO: 167509
  misc_feature (38)..(38): n is a, c, g, or t

SEQ ID NO: 190235 - DNA, 523 bp, Homo Sapiens; identical to SEQ ID NO: 167536
  misc_feature (369)..(400): n is a, c, g, or t

SEQ ID NO: 190236 - DNA, 739 bp, Homo Sapiens; identical to SEQ ID NO: 167566

SEQ ID NO: 190237 - DNA, 391 bp, Homo Sapiens; identical to SEQ ID NO: 167587

SEQ ID NO: 190238 - DNA, 444 bp, Homo Sapiens; identical to SEQ ID NO: 167751

SEQ ID NO: 190239 - DNA, 836 bp, Homo Sapiens; identical to SEQ ID NO: 167800
  misc_feature (702)..(702): n is a, c, g, or t
  misc_feature (704)..(706): n is a, c, g, or t

SEQ ID NO: 190240 - DNA, 363 bp, Homo Sapiens; identical to SEQ ID NO: 167829
  misc_feature (202)..(216): n is a, c, g, or t

SEQ ID NO: 190241 - DNA, 901 bp, Homo Sapiens; identical to SEQ ID NO: 167973
  misc_feature (611)..(666): n is a, c, g, or t

SEQ ID NO: 190242 - DNA, 438 bp, Homo Sapiens; identical to SEQ ID NO: 168001
  misc_feature (13)..(13): n is a, c, g, or t

SEQ ID NO: 190243 - DNA, 1397 bp, Homo Sapiens; identical to SEQ ID NO: 168054
  misc_feature (994)..(994): n is a, c, g, or t

SEQ ID NO: 190244 - DNA, 407 bp, Homo Sapiens; identical to SEQ ID NO: 168069
  misc_feature (301)..(343): n is a, c, g, or t

SEQ ID NO: 190245 - DNA, 411 bp, Homo Sapiens; identical to SEQ ID NO: 168071
  misc_feature (15)..(15): n is a, c, g, or t
  misc_feature (33)..(33): n is a, c, g, or t
  misc_feature (40)..(40): n is a, c, g, or t
  misc_feature (45)..(45): n is a, c, g, or t
  misc_feature (56)..(56): n is a, c, g, or t
  misc_feature (66)..(66): n is a, c, g, or t
  misc_feature (78)..(78): n is a, c, g, or t
  misc_feature (87)..(87): n is a, c, g, or t
  misc_feature (96)..(96): n is a, c, g, or t
  misc_feature (132)..(132): n is a, c, g, or t
  misc_feature (136)..(136): n is a, c, g, or t
  misc_feature (147)..(147): n is a, c, g, or t
  misc_feature (159)..(159): n is a, c, g, or t
  misc_feature (162)..(162): n is a, c, g, or t
  misc_feature (190)..(190): n is a, c, g, or t
  misc_feature (288)..(288): n is a, c, g, or t
  misc_feature (297)..(340): n is a, c, g, or t

SEQ ID NO: 190246 - DNA, 734 bp, Homo Sapiens; identical to SEQ ID NO: 168086
  misc_feature (247)..(256): n is a, c, g, or t
  misc_feature (271)..(293): n is a, c, g, or t
  misc_feature (364)..(373): n is a, c, g, or t
  misc_feature (552)..(598): n is a, c, g, or t

SEQ ID NO: 190247 - DNA, 308 bp, Homo Sapiens; identical to SEQ ID NO: 168102

SEQ ID NO: 190248 - DNA, 220 bp, Homo Sapiens; identical to SEQ ID NO: 168185

SEQ ID NO: 190249 - DNA, 217 bp, Homo Sapiens; identical to SEQ ID NO: 168203

SEQ ID NO: 190250 - DNA, 892 bp, Homo Sapiens; identical to SEQ ID NO: 168205

SEQ ID NO: 190251 - DNA, 589 bp, Homo Sapiens; identical to SEQ ID NO: 168210

SEQ ID NO: 190252 - DNA, 439 bp, Homo Sapiens; identical to SEQ ID NO: 168419
  misc_feature (339)..(371): n is a, c, g, or t

SEQ ID NO: 190253 - DNA, 848 bp, Homo Sapiens; identical to SEQ ID NO: 168473

SEQ ID NO: 190254 - DNA, 800 bp, Homo Sapiens; identical to SEQ ID NO: 168568

SEQ ID NO: 190255 - DNA, 1030 bp, Homo Sapiens; identical to SEQ ID NO: 168577
  misc_feature (447)..(464): n is a, c, g, or t
  misc_feature (473)..(511): n is a, c, g, or t
  misc_feature (558)..(630): n is a, c, g, or t
  misc_feature (669)..(677): n is a, c, g, or t

SEQ ID NO: 190256 - DNA, 931 bp, Homo Sapiens; identical to SEQ ID NO: 168578

SEQ ID NO: 190257 - DNA, 559 bp, Homo Sapiens; identical to SEQ ID NO: 168619

SEQ ID NO: 190258 - DNA, 310 bp, Homo Sapiens; identical to SEQ ID NO: 168844

SEQ ID NO: 190259 - DNA, 255 bp, Homo Sapiens; identical to SEQ ID NO: 168896

SEQ ID NO: 190260 - DNA, 563 bp, Homo Sapiens; identical to SEQ ID NO: 168898

SEQ ID NO: 190261 - DNA, 597 bp, Homo Sapiens; identical to SEQ ID NO: 168899
  misc_feature (135)..(190): n is a, c, g, or t

SEQ ID NO: 190262 - DNA, 614 bp, Homo Sapiens; identical to SEQ ID NO: 168900
  misc_feature (418)..(505): n is a, c, g, or t

SEQ ID NO: 190263 - DNA, 351 bp, Homo Sapiens; identical to SEQ ID NO: 168901

SEQ ID NO: 190264 - DNA, 466 bp, Homo Sapiens; identical to SEQ ID NO: 168902

SEQ ID NO: 190265 - DNA, 633 bp, Homo Sapiens; identical to SEQ ID NO: 168903
  misc_feature (60)..(69): n is a, c, g, or t
  misc_feature (104)..(115): n is a, c, g, or t
  misc_feature (119)..(133): n is a, c, g, or t
  misc_feature (138)..(158): n is a, c, g, or t
  misc_feature (249)..(270): n is a, c, g, or t

SEQ ID NO: 190266 - DNA, 283 bp, Homo Sapiens; identical to SEQ ID NO: 168905

SEQ ID NO: 190267 - DNA, 251 bp, Homo Sapiens; identical to SEQ ID NO: 168910

SEQ ID NO: 190268 - DNA, 185 bp, Homo Sapiens; identical to SEQ ID NO: 168914

SEQ ID NO: 190269 - DNA, 1404 bp, Homo Sapiens; identical to SEQ ID NO: 169184
  misc_feature (86)..(86): n is a, c, g, or t
  misc_feature (209)..(209): n is a, c, g, or t
  misc_feature (233)..(233): n is a, c, g, or t
  misc_feature (240)..(240): n is a, c, g, or t
  misc_feature (367)..(367): n is a, c, g, or t
  misc_feature (596)..(596): n is a, c, g, or t

SEQ ID NO: 190270 - DNA, 768 bp, Homo Sapiens; identical to SEQ ID NO: 169340
  misc_feature (692)..(702): n is a, c, g, or t
  misc_feature (719)..(727): n is a, c, g, or t

SEQ ID NO: 190271 - DNA, 654 bp, Homo Sapiens; identical to SEQ ID NO: 169494

SEQ ID NO: 190272 - DNA, 841 bp, Homo Sapiens; identical to SEQ ID NO: 169499

SEQ ID NO: 190273 - DNA, 884 bp, Homo Sapiens; identical to SEQ ID NO: 83938
  misc_feature (568)..(568): n is a, c, g, or t

SEQ ID NO: 190274 - DNA, 489 bp, Homo Sapiens; identical to SEQ ID NO: 169666
  misc_feature (421)..(421): n is a, c, g, or t

SEQ ID NO: 190275 - DNA, 831 bp, Homo Sapiens; identical to SEQ ID NO: 169704
  misc_feature (456)..(522): n is a, c, g, or t
  misc_feature (621)..(703): n is a, c, g, or t

SEQ ID NO: 190276 - DNA, 1520 bp, Homo Sapiens; identical to SEQ ID NO: 169844
  misc_feature (588)..(875): n is a, c, g, or t
  misc_feature (1279)..(1279): n is a, c, g, or t
  misc_feature (1288)..(1289): n is a, c, g, or t
  misc_feature (1305)..(1305): n is a, c, g, or t
  misc_feature (1312)..(1312): n is a, c, g, or t
  misc_feature (1383)..(1383): n is a, c, g, or t
  misc_feature (1431)..(1431): n is a, c, g, or t

SEQ ID NO: 190277 - DNA, 884 bp, Homo Sapiens; identical to SEQ ID NO: 169845

SEQ ID NO: 190278 - DNA, 1124 bp, Homo Sapiens; identical to SEQ ID NO: 169877
  misc_feature (562)..(591): n is a, c, g, or t
  misc_feature (911)..(911): n is a, c, g, or t
  misc_feature (1112)..(1112): n is a, c, g, or t

SEQ ID NO: 190279 - DNA, 323 bp, Homo Sapiens; identical to SEQ ID NO: 170037

SEQ ID NO: 190280 - DNA, 1070 bp, Homo Sapiens; identical to SEQ ID NO: 170080
  misc_feature (948)..(948): n is a, c, g, or t
  misc_feature (975)..(975): n is a, c, g, or t
  misc_feature (1049)..(1049): n is a, c, g, or t

SEQ ID NO: 190281 - DNA, 511 bp, Homo Sapiens; identical to SEQ ID NO: 170168

SEQ ID NO: 190282 - DNA, 438 bp, Homo Sapiens; identical to SEQ ID NO: 170325

SEQ ID NO: 190283 - DNA, 524 bp, Homo Sapiens; identical to SEQ ID NO: 77827

SEQ ID NO: 190284 - DNA, 640 bp, Homo Sapiens; identical to SEQ ID NO: 170625
  misc_feature (90)..(125): n is a, c, g, or t
  misc_feature (201)..(211): n is a, c, g, or t

SEQ ID NO: 190285 - DNA, 675 bp, Homo Sapiens; identical to SEQ ID NO: 170630
  misc_feature (643)..(643): n is a, c, g, or t
  misc_feature (653)..(653): n is a, c, g, or t

SEQ ID NO: 190286 - DNA, 210 bp, Homo Sapiens; identical to SEQ ID NO: 170655

SEQ ID NO: 190287 - DNA, 1636 bp, Homo Sapiens; identical to SEQ ID NO: 170859

SEQ ID NO: 190288 - DNA, 339 bp, Homo Sapiens; identical to SEQ ID NO: 170964

SEQ ID NO: 190289 - DNA, 1773 bp, Homo Sapiens; identical to SEQ ID NO: 170998
  misc_feature (635)..(635): n is a, c, g, or t
  misc_feature (639)..(640): n is a, c, g, or t
  misc_feature (642)..(643): n is a, c, g, or t
  misc_feature (651)..(651): n is a, c, g, or t
  misc_feature (791)..(866): n is a, c, g, or t
  misc_feature (874)..(910): n is a, c, g, or t
  misc_feature (1372)..(1372): n is a, c, g, or t
  misc_feature (1571)..(1571): n is a, c, g, or t

SEQ ID NO: 190290 - DNA, 735 bp, Homo Sapiens; identical to SEQ ID NO: 170999
  misc_feature (192)..(211): n is a, c, g, or t
  misc_feature (305)..(305): n is a, c, g, or t
  misc_feature (335)..(335): n is a, c, g, or t
  misc_feature (385)..(385): n is a, c, g, or t
  misc_feature (421)..(421): n is a, c, g, or t
  misc_feature (446)..(446): n is a, c, g, or t
  misc_feature (454)..(462): n is a, c, g, or t
  misc_feature (475)..(475): n is a, c, g, or t
  misc_feature (501)..(501): n is a, c, g, or t
  misc_feature (507)..(507): n is a, c, g, or t
  misc_feature (517)..(517): n is a, c, g, or t
  misc_feature (540)..(540): n is a, c, g, or t
  misc_feature (543)..(543): n is a, c, g, or t
  misc_feature (558)..(558): n is a, c, g, or t
  misc_feature (593)..(593): n is a, c, g, or t
  misc_feature (613)..(613): n is a, c, g, or t
  misc_feature (617)..(617): n is a, c, g, or t
  misc_feature (647)..(647): n is a, c, g, or t
  misc_feature (657)..(657): n is a, c, g, or t
  misc_feature (669)..(669): n is a, c, g, or t
  misc_feature (689)..(689): n is a, c, g, or t
  misc_feature (696)..(696): n is a, c, g, or t

SEQ ID NO: 190291 - DNA, 1031 bp, Homo Sapiens; identical to SEQ ID NO: 171003
  misc_feature (1021)..(1021): n is a, c, g, or t

SEQ ID NO: 190292 - DNA, 291 bp, Homo Sapiens; identical to SEQ ID NO: 171023
  misc_feature (223)..(242): n is a, c, g, or t

SEQ ID NO: 190293 - DNA, 391 bp, Homo Sapiens; identical to SEQ ID NO: 171071

SEQ ID NO: 190294 - DNA, 624 bp, Homo Sapiens; identical to SEQ ID NO: 171333

SEQ ID NO: 190295 - DNA, 553 bp, Homo Sapiens; identical to SEQ ID NO: 171480
  misc_feature (12)..(12): n is a, c, g, or t
  misc_feature (22)..(22): n is a, c, g, or t

SEQ ID NO: 190296 - DNA, 613 bp, Homo Sapiens; identical to SEQ ID NO: 171558

SEQ ID NO: 190297 - DNA, 1292 bp, Homo Sapiens; identical to SEQ ID NO: 171643
  misc_feature (50)..(330): n is a, c, g, or t
  misc_feature (413)..(697): n is a, c, g, or t
  misc_feature (700)..(716): n is a, c, g, or t
  misc_feature (1156)..(1156): n is a, c, g, or t
  misc_feature (1174)..(1174): n is a, c, g, or t
  misc_feature (1180)..(1180): n is a, c, g, or t
  misc_feature (1204)..(1204): n is a, c, g, or t

SEQ ID NO: 190298 - DNA, 505 bp, Homo Sapiens; identical to SEQ ID NO: 171671

SEQ ID NO: 190299 - DNA, 464 bp, Homo Sapiens; identical to SEQ ID NO: 171881
  misc_feature (309)..(309): n is a, c, g, or t
  misc_feature (340)..(340): n is a, c, g, or t
  misc_feature (355)..(355): n is a, c, g, or t
  misc_feature (370)..(370): n is a, c, g, or t
  misc_feature (376)..(376): n is a, c, g, or t
  misc_feature (386)..(386): n is a, c, g, or t
  misc_feature (398)..(398): n is a, c, g, or t
  misc_feature (432)..(432): n is a, c, g, or t
  misc_feature (445)..(445): n is a, c, g, or t

SEQ ID NO: 190300 - DNA, 1185 bp, Homo Sapiens; identical to SEQ ID NO: 171892
  misc_feature (385)..(456): n is a, c, g, or t
  misc_feature (486)..(538): n is a, c, g, or t

SEQ ID NO: 190301 - DNA, 889 bp, Homo Sapiens; identical to SEQ ID NO: 171893

SEQ ID NO: 190302 - DNA, 438 bp, Homo Sapiens; identical to SEQ ID NO: 171901
  misc_feature (202)..(228): n is a, c, g, or t

SEQ ID NO: 190303 - DNA, 181 bp, Homo Sapiens; identical to SEQ ID NO: 172039

SEQ ID NO: 190304 - DNA, 381 bp, Homo Sapiens; identical to SEQ ID NO: 172238

SEQ ID NO: 190305 - DNA, 1076 bp, Homo Sapiens; identical to SEQ ID NO: 172278
  misc_feature (777)..(826): n is a, c, g, or t

SEQ ID NO: 190306 - DNA, 405 bp, Homo Sapiens; identical to SEQ ID NO: 172282
  misc_feature (382)..(382): n is a, c, g, or t

SEQ ID NO: 190307 - DNA, 746 bp, Homo Sapiens; identical to SEQ ID NO: 172386

SEQ ID NO: 190308 - DNA, 661 bp, Homo Sapiens; identical to SEQ ID NO: 172411

SEQ ID NO: 190309 - DNA, 1399 bp, Homo Sapiens; identical to SEQ ID NO: 172518
  misc_feature (28)..(28): n is a, c, g, or t
  misc_feature (34)..(34): n is a, c, g, or t
  misc_feature (98)..(192): n is a, c, g, or t
  misc_feature (672)..(672): n is a, c, g, or t
  misc_feature (1117)..(1117): n is a, c, g, or t
  misc_feature (1159)..(1159): n is a, c, g, or t

SEQ ID NO: 190310 - DNA, 190 bp, Homo Sapiens; identical to SEQ ID NO: 172995

SEQ ID NO: 190311 - DNA, 1494 bp, Homo Sapiens; identical to SEQ ID NO: 173034
  misc_feature (772)..(780): n is a, c, g, or t
  misc_feature (881)..(985): n is a, c, g, or t
  misc_feature (1129)..(1154): n is a, c, g, or t
  misc_feature (1340)..(1348): n is a, c, g, or t

SEQ ID NO: 190312 - DNA, 351 bp, Homo Sapiens; identical to SEQ ID NO: 173074

SEQ ID NO: 190313 - DNA, 674 bp, Homo Sapiens; identical to SEQ ID NO: 173169
  misc_feature (534)..(534): n is a, c, g, or t
  misc_feature (541)..(541): n is a, c, g, or t
  misc_feature (595)..(604): n is a, c, g, or t
  misc_feature (622)..(622): n is a, c, g, or t
  misc_feature (649)..(649): n is a, c, g, or t

SEQ ID NO: 190314 - DNA, 671 bp, Homo Sapiens; identical to SEQ ID NO: 173201
  misc_feature (419)..(439): n is a, c, g, or t
  misc_feature (450)..(501): n is a, c, g, or t

SEQ ID NO: 190315 - DNA, 315 bp, Homo Sapiens; identical to SEQ ID NO: 173430

SEQ ID NO: 190316 - DNA, 414 bp, Homo Sapiens; identical to SEQ ID NO: 173521

SEQ ID NO: 190317 - DNA, 511 bp, Homo Sapiens; identical to SEQ ID NO: 173542
  misc_feature (235)..(312): n is a, c, g, or t

SEQ ID NO: 190318 - DNA, 345 bp, Homo Sapiens; identical to SEQ ID NO: 173836

SEQ ID NO: 190319 - DNA, 250 bp, Homo Sapiens; identical to SEQ ID NO: 173837

SEQ ID NO: 190320 - DNA, 236 bp, Homo Sapiens; identical to SEQ ID NO: 173838

SEQ ID NO: 190321 - DNA, 393 bp, Homo Sapiens; identical to SEQ ID NO: 173839

SEQ ID NO: 190322 - DNA, 156 bp, Homo Sapiens; identical to SEQ ID NO: 173840

SEQ ID NO: 190323 - DNA, 360 bp, Homo Sapiens; identical to SEQ ID NO: 174119

SEQ ID NO: 190324 - DNA, 438 bp, Homo Sapiens; identical to SEQ ID NO: 174220
  misc_feature (234)..(234): n is a, c, g, or t
  misc_feature (349)..(349): n is a, c, g, or t
  misc_feature (364)..(364): n is a, c, g, or t
  misc_feature (377)..(377): n is a, c, g, or t

SEQ ID NO: 190325 - DNA, 777 bp, Homo Sapiens; identical to SEQ ID NO: 174235

SEQ ID NO: 190326 - DNA, 385 bp, Homo Sapiens; identical to SEQ ID NO: 174433
  misc_feature (174)..(214): n is a, c, g, or t

SEQ ID NO: 190327 - DNA, 285 bp, Homo Sapiens; identical to SEQ ID NO: 174436

SEQ ID NO: 190328 - DNA, 569 bp, Homo Sapiens; identical to SEQ ID NO: 174469

SEQ ID NO: 190329 - DNA, 881 bp, Homo Sapiens; identical to SEQ ID NO: 174556
  misc_feature (98)..(148): n is a, c, g, or t

SEQ ID NO: 190330 - DNA, 786 bp, Homo Sapiens; identical to SEQ ID NO: 175073
  misc_feature (105)..(105): n is a, c, g, or t
  misc_feature (157)..(157): n is a, c, g, or t
  misc_feature (249)..(304): n is a, c, g, or t
  misc_feature (306)..(306): n is a, c, g, or t

SEQ ID NO: 190331 - DNA, 1099 bp, Homo Sapiens; identical to SEQ ID NO: 175138
  misc_feature (273)..(325): n is a, c, g, or t
  misc_feature (494)..(625): n is a, c, g, or t
  misc_feature (629)..(637): n is a, c, g, or t

SEQ ID NO: 190332 - DNA, 738 bp, Homo Sapiens; identical to SEQ ID NO: 175165

SEQ ID NO: 190333 - DNA, 933 bp, Homo Sapiens; identical to SEQ ID NO: 175277

SEQ ID NO: 190334 - DNA, 711 bp, Homo Sapiens; identical to SEQ ID NO: 175317
  misc_feature (17)..(17): n is a, c, g, or t
  misc_feature (38)..(38): n is a, c, g, or t
  misc_feature (42)..(42): n is a, c, g, or t
  misc_feature (91)..(142): n is a, c, g, or t
  misc_feature (167)..(214): n is a, c, g, or t
  misc_feature (283)..(402): n is a, c, g, or t

SEQ ID NO: 190335 - DNA, 938 bp, Homo Sapiens; identical to SEQ ID NO: 175410
  misc_feature (696)..(696): n is a, c, g, or t
  misc_feature (704)..(704): n is a, c, g, or t

SEQ ID NO: 190336 - DNA, 694 bp, Homo Sapiens; identical to SEQ ID NO: 175485
  misc_feature (183)..(195): n is a, c, g, or t
  misc_feature (221)..(476): n is a, c, g, or t

SEQ ID NO: 190337 - DNA, 1480 bp, Homo Sapiens; identical to SEQ ID NO: 176157
  misc_feature (524)..(571): n is a, c, g, or t
  misc_feature (579)..(600): n is a, c, g, or t
  misc_feature (623)..(661): n is a, c, g, or t
  misc_feature (715)..(725): n is a, c, g, or t
  misc_feature (776)..(793): n is a, c, g, or t
  misc_feature (925)..(938): n is a, c, g, or t
  misc_feature (958)..(958): n is a, c, g, or t
  misc_feature (1056)..(1056): n is a, c, g, or t
  misc_feature (1133)..(1133): n is a, c, g, or t
  misc_feature (1137)..(1137): n is a, c, g, or t
  misc_feature (1259)..(1259): n is a, c, g, or t
  misc_feature (1307)..(1307): n is a, c, g, or t
  misc_feature (1402)..(1402): n is a, c, g, or t

SEQ ID NO: 190338 - DNA, 594 bp, Homo Sapiens; identical to SEQ ID NO: 176258
  misc_feature (69)..(82): n is a, c, g, or t
  misc_feature (105)..(158): n is a, c, g, or t
  misc_feature (256)..(334): n is a, c, g, or t

SEQ ID NO: 190339 - DNA, 834 bp, Homo Sapiens; identical to SEQ ID NO: 176296

SEQ ID NO: 190340 - DNA, 919 bp, Homo Sapiens; identical to SEQ ID NO: 83016
  misc_feature (600)..(600): n is a, c, g, or t
  misc_feature (603)..(603): n is a, c, g, or t
  misc_feature (609)..(609): n is a, c, g, or t
  misc_feature (841)..(849): n is a, c, g, or t

SEQ ID NO: 190341 - DNA, 1248 bp, Homo Sapiens; identical to SEQ ID NO: 176676
  misc_feature (1176)..(1176): n is a, c, g, or t
  misc_feature (1191)..(1191): n is a, c, g, or t

SEQ ID NO: 190342 - DNA, 795 bp, Homo Sapiens; identical to SEQ ID NO: 176943

SEQ ID NO: 190343 - DNA, 463 bp, Homo Sapiens; identical to SEQ ID NO: 176962
  misc_feature (50)..(95): n is a, c, g, or t

SEQ ID NO: 190344 - DNA, 1076 bp, Homo Sapiens; identical to SEQ ID NO: 177322
  misc_feature (457)..(528): n is a, c, g, or t
  misc_feature (1002)..(1022): n is a, c, g, or t

SEQ ID NO: 190345 - DNA, 901 bp, Homo Sapiens; identical to SEQ ID NO: 177522
  misc_feature (730)..(790): n is a, c, g, or t

SEQ ID NO: 190346 - DNA, 603 bp, Homo Sapiens; identical to SEQ ID NO: 15840
  misc_feature (540)..(540): n is a, c, g, or t
  misc_feature (543)..(544): n is a, c, g, or t
  misc_feature (549)..(549): n is a, c, g, or t
  misc_feature (551)..(552): n is a, c, g, or t
  misc_feature (556)..(556): n is a, c, g, or t
  misc_feature (558)..(558): n is a, c, g, or t
  misc_feature (589)..(589): n is a, c, g, or t

SEQ ID NO: 190347 - DNA, 799 bp, Homo Sapiens; identical to SEQ ID NO: 177722

SEQ ID NO: 190348 - DNA, 862 bp, Homo Sapiens; identical to SEQ ID NO: 177778
  misc_feature (65)..(125): n is a, c, g, or t

SEQ ID NO: 190349 - DNA, 883 bp, Homo Sapiens; identical to SEQ ID NO: 177867
  misc_feature (661)..(661): n is a, c, g, or t
  misc_feature (702)..(702): n is a, c, g, or t

SEQ ID NO: 190350 - DNA, 1061 bp, Homo Sapiens; identical to SEQ ID NO: 177890
  misc_feature (28)..(28): n is a, c, g, or t
  misc_feature (46)..(46): n is a, c, g, or t
  misc_feature (50)..(228): n is a, c, g, or t
  misc_feature (232)..(232): n is a, c, g, or t
  misc_feature (236)..(236): n is a, c, g, or t
  misc_feature (247)..(247): n is a, c, g, or t
  misc_feature (250)..(250): n is a, c, g, or t
  misc_feature (263)..(264): n is a, c, g, or t
  misc_feature (267)..(434): n is a, c, g, or t
  misc_feature (437)..(438): n is a, c, g, or t
  misc_feature (441)..(444): n is a, c, g, or t
  misc_feature (450)..(450): n is a, c, g, or t
  misc_feature (453)..(554): n is a, c, g, or t
  misc_feature (558)..(588): n is a, c, g, or t
  misc_feature (590)..(663): n is a, c, g, or t
  misc_feature (665)..(673): n is a, c, g, or t
  misc_feature (675)..(732): n is a, c, g, or t
  misc_feature (734)..(746): n is a, c, g, or t
  misc_feature (748)..(749): n is a, c, g, or t

SEQ ID NO: 190351 - DNA, 955 bp, Homo Sapiens; identical to SEQ ID NO: 178122

SEQ ID NO: 190352 - DNA, 546 bp, Homo Sapiens; identical to SEQ ID NO: 85157

SEQ ID NO: 190353 - DNA, 469 bp, Homo Sapiens; identical to SEQ ID NO: 178162

SEQ ID NO: 190354 - DNA, 755 bp, Homo Sapiens; identical to SEQ ID NO: 14959

SEQ ID NO: 190355 - DNA, 927 bp, Homo Sapiens; identical to SEQ ID NO: 178449
  misc_feature (55)..(106): n is a, c, g, or t

SEQ ID NO: 190356 - DNA, 813 bp, Homo Sapiens; identical to SEQ ID NO: 178568
  misc_feature (740)..(740): n is a, c, g, or t

SEQ ID NO: 190357 - DNA, 876 bp, Homo Sapiens; identical to SEQ ID NO: 178644
  misc_feature (473)..(473): n is a, c, g, or t
  misc_feature (503)..(503): n is a, c, g, or t

SEQ ID NO: 190358 - DNA, 974 bp, Homo Sapiens; identical to SEQ ID NO: 178986
  misc_feature (65)..(256): n is a, c, g, or t

SEQ ID NO: 190359 - DNA, 631 bp, Homo Sapiens; identical to SEQ ID NO: 179171
  misc_feature (133)..(184): n is a, c, g, or t
  misc_feature (448)..(506): n is a, c, g, or t

SEQ ID NO: 190360 - DNA, 930 bp, Homo Sapiens
ccaactttgtacaaaaaagttggtatttccagcctttgtagctttcacttccacatctaccaagtgggcggagtggccttctgtggacgaatcagattcctctccagcaccgactttaagaggcgagccggggggtcagggtcccagatgcacaggaggagaagcaggagctgtcgggaagatcagaagccagtcatggatgaccagcgcgaccttatctccaacaatgagcaactgcccatgctgggccggcgccctggggccccggagagcaagtgcagccgcggagccctgtacacaggcttttccatcctggtgactctgctcctcgctggccaggccaccaccgcctacttcctgtaccagcagcagggccggctggacaaactgacagtcacctcccagaacctgcagctggagaacctgcgcatgaagcttcccaagcctcccaagcctgtgagcaagatgcgcatggccaccccgctgctgatgcaggcgctgcccatgggagccctgccccaggggcccatgcagaatgccaccaagtatggcaacatgacagaggaccatgtgatgcacctgctccagaatgctgaccccctgaaggtgtacccgccactgaaggggagcttcccggagaacctgagacaccttaagaacaccatggagaccatagactggaaggtctttgagagctggatgcaccattggctcctgtttgaaatgagcaggcactccttggagcaaaagcccactgacgctccaccgaaagagtcactggaactggaggacccgtcttctgggctgggtgtgaccaagcaagatctgggcccagtccccatgtgagagcagcagaggcggtcttcaacatcctgccagccccacacagctacagctttcttgctcccttcagcccccagccccctcccc

SEQ ID NO: 190361 - DNA, 871 bp, Homo Sapiens
ctttgtacaaaaaagttggtgaccccctgaaggtgtacccgccactgaaggggagcttcccggagaacctgagacaccttaagaacaccatggagaccatagactggaagggctttgagagctggatgcaccattggctcctgtttgaaatgagcaggcactccttggagcaaaagcccactgacgctccaccgaaagagtcactggaactggaggacccgtcttctgggctgggtgtgaccaagcaggatctgggcccagtccccatgtgagagcagcagaggcggtcttcaacatcctgccagccccacacagctacagctttcttgctcccttcagcccccagcccctcccccatctcccaccctgtacctcatcccatgagaccctggtgcctggctctttcgtcacccttggacaagacaaaccaagtcggaacagcagataacaatgcagcaaggccctgctgcccaatctccatctgtcaacaggggcgtgaggtcccaggaagtggccaaaagctagacagatccccgttcctgacatcacagcagcctccaacacaaggctccaagacctaggctcatggacgagatgggaaggcacagggagaagggataaccctacacccagaccccaggctggacatgctgactgtcctctcccctccagcctttggccttggcttttctagcctatttacctgcaggctgagccactctcttccctttccccagcatcactccccaaggaagagccaatgttttccacccataatcctttctgccgacccctagttccctctgctcagccaagcttgttatcagctttcagggccatggttcacattagaataaaaggtagtaattag

SEQ ID NO: 190362 - DNA, 1440 bp, Homo Sapiens
ctttgtacaaaaaagttgggcaggagctgtcgggaagatcagaagccagtcatggatgaccagcgcgaccttatctccaacaatgagcaactgcccatgctgggccggcgccctggggccccggagagcaagtgcagccgcggagccctgtacacaggcttttccatcctggtgactctgctcctcgctggccaggccaccaccgcctacttcctgtaccagcagcagggccggctggacaaactgacagtcacctcccagaacctgcagctggagaacctgcgcatgaagcttcccaagcctcccaagcctgtgagcaagatgcgcatggccaccccgctgctgatgcaggcgctgcccatgggagccctgccccaggggcccatgcagaatgccaccaagtatggcaacatgacagaggaccatgtgatgcacctgctccagaatgctgaccccctgaaggtgtacccgccactgaaggggagcttcccggagaacctgagacaccttaagaacaccatggagaccatagactggaaggtctttgagagctggatgcaccattggctcctgtttgaaatgagcaggcactccttggagcaaaagcccactgacgctccaccgaaagtactgaccaagtgccaggaagaggtcagccacatccctgctgtccacccgggttcattcaggcccaagtgcgacgagaacggcaactatctgccactccagtgctatgggagcatcggctactgctggtgtgtcttccccaacggcacggaggtccccaacaccagaagccgcgggcaccataactgcagtgagtcactggaactggaggacccgtcttctgggctgggtgtgaccaagcaggatctgggcccagtccccatgtgagagcagcagaggcggtcttcaacatcctgccagccccacacagctacagctttcttgctcccttcagcccccagcccctcccccatctcccaccctgtacctcatcccatgagaccctggtgcctggctctttcgtcacccttggacaagacaaaccaagtcggaacagcagataacaatgcagcaaggccctgctgcccaatctccatctgtcaacaggggcgtgaggtcccaggaagtggccaaaagctagacagatccccgttcctgacatcacagcagcctccaacacaagggctccaagacctaggctcatggacgagatgggaaggcacagggagaagggataaccctacacccagaccccaggctggacatgctgactgtcctctcccctccagcctttggccttggcttttctagcctatttacctgcaggctgaaaccactctcttccctttccccagcatcactccccaaggaagagccaatgttttccactcataatcctatctgcccgacccctagttacctctgctcaaccaa

SEQ ID NO: 190363 - DNA, 1995 bp, Homo Sapiens; identical to SEQ ID NO: 183210
  misc_feature (1032)..(1050): n is a, c, g, or t
  misc_feature (1823)..(1838): n is a, c, g, or t

SEQ ID NO: 190364 - DNA, 1313 bp, Homo Sapiens; identical to SEQ ID NO: 179930
  misc_feature (389)..(402): n is a, c, g, or t
  misc_feature (738)..(746): n is a, c, g, or t
  misc_feature (984)..(1048): n is a, c, g, or t

SEQ ID NO: 190365 - DNA, 1645 bp, Homo Sapiens; identical to SEQ ID NO: 179931
  misc_feature (796)..(860): n is a, c, g, or t
  misc_feature (1098)..(1106): n is a, c, g, or t
  misc_feature (1443)..(1456): n is a, c, g, or t

SEQ ID NO: 190366 - DNA, 1417 bp, Homo Sapiens; identical to SEQ ID NO: 179932
  misc_feature (669)..(747): n is a, c, g, or t
  misc_feature (971)..(979): n is a, c, g, or t
  misc_feature (1315)..(1328): n is a, c, g, or t

SEQ ID NO: 190367 - DNA, 1359 bp, Homo Sapiens; identical to SEQ ID NO: 183211
  misc_feature (100)..(115): n is a, c, g, or t
  misc_feature (1009)..(1023): n is a, c, g, or t

SEQ ID NO: 190368 - DNA, 1680 bp, Homo Sapiens
ttggcacagtgtccgtatctaaaaaggagaaaaaccggaagcgtaggaaccgaaagaagaagaaaaagccccagcgggtgcgaggggtgtcctctgagagctctggggaccgggagaaagactcaacccggtcccgtggctctgattccccagcagctgatgttgagattgagtatgtgactgaagaacctgaaatttacgagcccaactttatcttctttaagaggatctttgaggcttttaagctcactgatgatgtgaagaaggagaaagagaaggagccagagaaacttgacaaactggagaactctgcagcccccaagaagaagggatttgaagaggagcacaaggacagtgatgatgacagcagtgatgacgagcaggaaaagaagccagaagcccccaagctgtccaagaagaagttgcgccgaatgaaccgcttcactgtggctgaactcaagcagctggtggctcggcccgatgtcgtggagatgcacgatgtgacagcgcaggaccctaagctcttggttcacctcaaggccactcggaactctgtgcctgtgccacgccactggtgttttaagcgcaaatacctgcagggcaaacggggcattgagaagccccccttcgagctgccagacttcatcaaacgcacaggcatccaggagatgcgagaggccctgcaggagaaggaagaacagaagaccatgaagtcaaaaatgcgagagaaagttcggcctaagatgggcaaaattgacatcgactaccagaaactgcatgatgccttcttcaagtggcagaccaagccaaagctgaccatccatggggacctgtactatgaggggaaggagttcgagacacgactgaaggagaagaagccaggagatctgtctgatgagctaaggatttccttggggatgccagtaggaccaaatgcccacaaggtccctcccccatggctgattgccatgcagcgatatggaccacccccatcgtatcccaacctgaaaatccctgggctgaactcgcccatccctgagagctgttcctttgggtaccatgctggtggctggggcaaacctccagtggatgagactgggaaaccgctctatggggacgtgtttggaaccaatgctgctgaatttcagaccaagactgaggaagaagagattgatcggaccccttggggggaactggaaccatctgatgaagaatcctcagaagaagaggaagaggaagaaagtgatgaagacaaaccagatgagacaggctttattacccctgcagacagtggccttatcactcctggaggcttttcatcagtgcctgctggaatggagacccctgaactcattgagctgaggaagaagaagattgaggaggcgatggacggaagtgagacacctcacctcttcactgtgttgccagagaagagaacagccactgttggaggggccatgatgggatcaacccacatttatgacatgtccacggttatgagccggaagggcccggctcctgagctgcaaggtgtggaagtggcgctggcgcctgaagagttggagctggatcctatggccatgaccccgaagtatgaggagcatgtgcgggagcagcaggctcaggtagaaaaggaggacttcagtgacatggtggctgagcacgctgccaaacagatgc

SEQ ID NO: 190369 - DNA, 1179 bp, Homo Sapiens
ttggcctgcggctaagatggcgacggagcatcccgagcctcccaaagcagaattgcagctgccgccgccgccacctccaggccactatggcgcctgggctgcccaggagcttcaggccaagttggcagagatcggagctccgatccagggtaatcgcgaggagctggtggagcggctgcagagctacacccgccagactggcatcgtgctgaatcggccggttttgagaggggaagatggggacaaagccgctccacctcccatgtcggcacagctccctggaattcccatgccaccaccacctttgggactcccccctctgcagcctcctccgccacccccaccacctccaccaggccttggccttggctttcctatggcccacccaccaaatttggggcccccgcctcctctccgtgtgggtgagccagtggcactgtcagaggaggagcggctgaagttggctcagcagcaggcggcattgctgatgcagcaggaggagcgtgccaagcagcagggagatcattcgctgaaggaacatgagctcttggagcagcagaagcgggcagctgtgttactggagcaggaacgacagcaggagattgccaagatgggcaccccagtccctcggcccccacaagacatgggccagattggtgtgcgcactcctctgggtcctcgagtagctgctccagtgggcccagtgggccccactcctacagttttgcccatgggagcccctgttccccggcctcgtggtcccccaccgccccctggagatgagaacagagagatggatgacccctctgtgggccccaagatcccccaggctttggagaagatcctgcagctgaaggagagccgccaggaagagatgaattctcagcaggaggaagaggaaatggaaacagatgctcgctcgtccctgggccagtcagcgtcagagactgaggaggacacagtgtccgtatctaaaaaggaggtagggattggagctgagtgtggaacgaaagccaggagatgggacttgggtacggaaataacacaatttgtaagagttcagtaagtaatagcttctattttgtgccaatttccgccctcagcatcttatagatatttttcatttaattgctttgagttccaagtactatacgtgcctacattttacagctgaaaaag

SEQ ID NO: 190370 - DNA, 2162 bp, Homo Sapiens; identical to SEQ ID NO: 183214
  misc_feature (328)..(604): n is a, c, g, or t
  misc_feature (608)..(624): n is a, c, g, or t
  misc_feature (1665)..(1713): n is a, c, g, or t

SEQ ID NO: 190371 - DNA, 937 bp, Homo Sapiens
caactttgtacaaaaaagttggcgcacctacaccagccaacccagatcccgaggtccgacagcgcccggcccagatccccacgcctgccaggagcaagccgagagccagccggccggcgcactccgactccgagcagtctctgtccttcgacccgagccccgcgccctttccgggacccctgccccgcgggcagcgctgccaacctgccggccatggagaccccgtcccagcggcgcgccacccgcagcggggcgcaggccagctccactccgctgtcgcccacccgcatcacccggctgcaggagaaggaggacctgcaggagctcaatgatcgcttggcggtctacatcgaccgtgtgcgctcgctggaaacggagaacgcagggctgcgccttcgcatcaccgagtctgaagaggtggtcagccgcgaggtgtccggcatcaaggccgcctacgaggccgagctcggggatgcccgcaagacccttgactcagtagccaaggagcgcgcccgcctgcagctggagctgagcaaagtgcgtgaggagtttaaggagctgaaagcgcgcaataccaagaaggagggtgacctgatagctgctcaggctcggctgaaggacctggaggctctgctgaactccaaggaggccgcactgagcactgctctcagtgagaagcgcacgctggagggcgagctgcatgatctgcggggccaggtggccaagcttgaggcagccctaggtgaggccaagaagcaacttcaggatgagatgctgcggcgggtggatgctgagaacaggctgcagaccatgaaggaggaactggacttccagaagaacatctacagtgaggagctgcgtgagaccaagcgccgtcatgagacccgactggtggagattgacaatgggaagcagcgtgagtttgagagccggctgg

SEQ ID NO: 190372 - DNA, 1104 bp, Homo Sapiens
  misc_feature (214)..(222): n is a, c, g, or t
  misc_feature (841)..(861): n is a, c, g, or t
caagtcatcactgcctctgaatacacacaaaggaggctgcctgtcccagggaaagaagaaaacgttcagggaagagaaagatctggtcaaagaaaagggacagacagggtagagccaggaatcaagaatcagggtagtgaagagattcctaaccctgccccccaggcagttgtatactttaggctagatgttaacagagacccccttctcctcnnnnnnnnntgagtgaaggggcacaacactgtggagagaagccttctagtttttactcatttcaaggagaaactggaactaattaatgaatggacctaatatctagtttattttattaagactcccaataactcactcagtaaccttctcaagcccctggcaacgtgttctcagatcccttcctatgtgaagttcgctcttagaagctgcctatagatcctgtccctcagcctctccatctcatgtccagcagtggagaggaaattggcatcccaactaattcctcctctccttcagagttttttccaaacatccctctttggaagggaaatactctaatagtttaacgttctaagcaatgtatatatgtatatatattttatttttgacccgacttcacctccttaaatccttccctttttttggatgtttggaaatgccacagccatcttattactatgaggggaagaaccaatatcctgaagatggcagagcagaaagaggaaagaactgtaatgagcagctcatggaatactcaaaattccatgagctgctgtttttaccaactctggaaacacccaacttcaagacttcttgatatatgaactaagaaatctccttgttattnnnnnnnnnnnnnnnnnnnnncccttccccagcagagaccacttttactacaaacttaaaatgtcttttctttatcctcggcctcaactatatgttgcggcattgaattagcattgccaaacaccgcagccactttttaccccgagccaggagagaaaggaagcatgctatgtggtggggcttgaagtcctcattaggtaggcagctgtatgtctgatcatggcgagaggttcctcttgcttcgcttccctcatccttacccaa

SEQ ID NO: 190373 - DNA, 1184 bp, Homo Sapiens
  misc_feature (87)..(95): n is a, c, g, or t
  misc_feature (929)..(941): n is a, c, g, or t
ttggattcattaattagttccagtttctccttgaaatgagtaaaaactagaaggcttctctccacagtgttgtgccccttcactcannnnnnnnngaggagaagggggtctctgttaacatctagcctaaagtatacaactgcctggggggcagggttaggaatctcttcactaccctgattcttgattcctggctctaccctgtctgtcccttttctttgaccagatctttctcttccctgaacgttttcttctttccctggacaggcagcctcctttgtgtgtattcagaggcagtgatgacttgctgtccaggcagctccctcctgcacacagaatgctcagggtcactgaaccactgcttctcttttgaaagtagagctagctgccactttcacgtggcctccgcagtgtctccacctacacccctgtgctcccctgccacactgatggctcaagacaaggctggcaaaccctcccagaaacatctctggcccagaaagcctctctctccctccctctctcatgaggcacagccaagccaagcgctcatgttgagccagtgggccagccacagagcaaaagagggtttattttcagtcccctctctctgggtcagaaccagagggcatgctgaatgccccctgcttacttggtgagggtgccccgcctgagtcagtgctctcagctggcagtgcaatgcttgtagaagtaggaggaaacagttctcactgggaagaagcaagggcaagaacccaagtgcctcacctcgaaaggaggccctgttccttggagtcagggtgaactgcaaagctttggctgagacctgggatttgagataccacaaaccctgctgaacacagtgtctgttcagcaaactaaccagcattccctacagcctagggcagacaatagtatagaagtctggnnnnnnnnnnnnncagaatttgagaaccttggaccactcctgtccctgtagctcagtcatcaaagcagaagtctggctttgctctattaagattggaaatgtacactaccaaacactcagtccactgttgagcctcagtgctggaagggaggaaggcctttcttctgtgttattgcgtagaggctacagggttagcctggactaaaggcatccttgtcttttgagctattcaccttcagtagaaaaggatctaagg

SEQ ID NO: 190374 - DNA, 1298 bp, Homo Sapiens
  misc_feature (223)..(231): n is a, c, g, or t
  misc_feature (850)..(870): n is a, c, g, or t
gcctggacagcaagtcatcactgcctctgaatacacacaaaggaggctgcctgtccagggaaagaagaaaacgttcagggaagagaaagatctggtcaaagaaaagggacagacagggtagagccaggaatcaagaatcagggtagtgaagagattcctaaccctgccccccaggcagttgtatactttaggctagatgttaacagagacccccttctcctcnnnnnnnnntgagtgaaggggcacaacactgtggagagaagccttctagtttttactcatttcaaggagaaactggaactaattaatgaatggacctaatatctagtttattttattaagactcccaataactcactcagtaaccttctcaagcccctggcaacgtgttctcagatcccttcctatgtgaagttcgctcttagaagctgcctatagatcctgtccctcagcctctccatctcatgtccagcagtggagaggaaattggcatcccaactaattcctcctctccttcagagttttttccaaacatccctctttggaagggaaatactctaatagtttaacgttctaagcaatgtatatatgtatatatattttatttttgacccgacttcacctccttaaatccttccctttttttggatgtttggaaatgccacagccatcttattactatgaggggaagaaccaatatcctgaagatggcagagcagaaagaggaaagaactgtaatgagcagctcatggaatactcaaaattctatgagctgctgtttttaccaactctggaaacacccaacttcaagacttcttgatatatgaactaagaaatctccttgttattnnnnnnnnnnnnnnnnnnnnncccttccccagcagagaccacttttactacaaacttaaaatgtcttttctttatcctcggcctcaactatatgttgcggcattgaattagcattgccaaacaccgcagccactttttaccccgagccaggagagaaaggaagcatgctatgtggtggggcttgaagtcctcattaggtaggcagctgtatgtctgatcatggcgagaggttcctcttgcttcgcttccctcatccttacattcatacatgctaactctctcccccgacaatttacctgctttagaagctttgtgtcaaatgaagttgcttttccattccatctagcaaaagcctgggctgaagataatcaacaggggactacccagaagattctgttttatctctagctcaagccacctacttcaaagctcacaacagctcaagccaa

SEQ ID NO: 190375 - DNA, 1643 bp, Homo Sapiens
  misc_feature (174)..(186): n is a, c, g, or t
  misc_feature (1070)..(1084): n is a, c, g, or t
  misc_feature (1251)..(1369): n is a, c, g, or t
aaagccaactttgtacaaaaaagttggctgttccctggagtcagggtgaactgcaaagctttggctgagacctgggatttgagataccacaaaccctgctgaacacagtgtctgttcagcaaactaaccagcattccctacagcctagggcagacaatagtatagaagtctggnnnnnnnnnnnnncagaatttgagaaccttggaccactcctgtccctgtagctcagtcatcaaagcagaagtctggctttgctctattaagattggaaatgtacactaccaaacactcagtccactgttgagccccagtgctggaagggaggaaggcctttcttctgtgttaattgcgtagaggctacaggggttagcctggactaaaggcatccttgtcttttgagctattcacctcagtagaaaaggatctaagggaagatcactgtagtttagttctgttgacctgtgcacctaccccttggaaatgtctgctggtatttctaattccacaggtcatcagatgcctgcttgataatatataaacaataaaaacaactttcacttcttcctattgtaatcgtgtgccatggatctgatctgtaccatgaccctacataaggctggatggcacctcaggctgagggccccaatgtatgtgtggctgtgggtgtgggtgggagtgtgtctgctgagtaaggaacacgattttcaagattctaaagctcaattcaagtgacacattaatgataaactcagatctgatcaagagtccggatttctaacagtccttgctttggggggtgtgctgacaacttagctcaggtgccttacatcttttctaatcacagtgttgcatatgagcctgccctcactccctctgcagaatccctttgcacctgagaccctactgaagtggctggtagaaaaaggggcctgagtggaggattatcagtatcacgatttgcaggattcccttctgggcttcattctggaaacttttgttagggctgcttttcttaagtgcccacatttgatggagggtggaaataatttgaatgtatttgatttataagnnnnnnnnnnnnnnngggttaaaagatggttgtagcatttaaaatggaaaattttctccttggtttgctagtatcttgggtgtattctctgtaagtgtagctcaaataggtcatcatgaaaggttaaaaaagcgaggtggccatgttatgctggtggttaaggccagggcctctccaaccannnnnnnnnnnnnnnnnnnnnnnnnnnnnnnnnnnnnnnnnnnnnnnnnnnnnnnnnnnnnnnnnnnnnnnnnnnnnnnnnnnnnnnnnnnnnnnnnnnnnnnnnnnnnnnnnnnnnnncatgactaatgctttttagaaagcattttgggatccttcagcacaggaattctcaagacctgagtattttttataataggaatgtccaccatgaacttgatacgtccgtgtgtcccagatgctgtcattagtctatatggttctccaagaaactgaatgaatccattggagaagcggtggataactagccagacaaaatttgagaatacataaacaacgcattgccacggaaacatacagaggatgcctttttctgtgattgggtgggattttt

SEQ ID NO: 190376 - DNA, 1277 bp, Homo Sapiens
  misc_feature (282)..(290): n is a, c, g, or t
  misc_feature (910)..(930): n is a, c, g, or t
tttcaaaagagaacgcagtggttcagtgaccctgagcattctgtgtgcaggagggagctgcctggacagcaagtcatcactgcctctgaatacacacaaaggaggctgcctgtccagggaaagaagaaaacgttcagggaagagaaagatctggtcaaagaaaagggacagacagggtagagccaggaatcaagaatcagggtagtgaagagattcctaaccctgccccccaggcagttgtatactttaggctagatgttaacagagacccccttctcctcnnnnnnnnntgagtgaaggggcacaacactgtggagagaagccttctagtttttactcatttcaaggagaaactggaactaattaatgaatggacctaatatctagtttattttattaagactcccaataactcactcagtaaccttctcaagcccctggcaacgtgttctcagatcccttcctatgtgaagttcgctcttagaagctgcctatagatcctgtccctcagcctctccatctcatgtccagcagtggagaggaaattggcatcccaactaattcctcctctccttcagagtttttttccaaacatccctctttggaagggaaatactctaatagtttaacgttctaagcaatgtatatatgtatatatattttatttttgacccgacttcacctccttaaatccttccctttttttggatgtttggaaatgccacagccatcttattactatgaggggaagaaccaatatcctgaagatggcagagcagaaagaggaaagaactgtaatgagcagctcatggaatactcaaaattccatgagctgctgtttttaccaactctggaaacacccaacttcaagacttcttgatatatgaactaagaaatctccttgttattnnnnnnnnnnnnnnnnnnnnncccttccccagcagagaccacttttactacaaacttaaaatgtcttttctttatcctcggcctcaactatatgttgcggcattgaattagcattgccaaacaccgcagccactttttaccccgagccaggagagaaaggaagcatgctatgtggtggggcttgaagtcctcattaggtaggcagctgtatgtctgatcatggcgagaggttcctcttgcttcgcttccctcatccttacattcatacatgctaactctctcccccgacaatttacctgctttagaagctttgtgtcaaatgaagttgcttttccattccatctagcaaaagcctgggctgaagccaa

SEQ ID NO: 190377 - DNA, 2427 bp, Homo Sapiens; identical to SEQ ID NO: 183217
  misc_feature (2306)..(2326): n is a, c, g, or t

SEQ ID NO: 190378 - DNA, 1447 bp, Homo Sapiens
  misc_feature (449)..(469): n is a, c, g, or t
  misc_feature (1088)..(1096): n is a, c, g, or t
ttgggctccagataactctctttccttgagctgttgtgagctttgaagtaggtggcttgagctagagataaaacagaatcttctgggtagtcccctgttgattatcttcagcccaggcttttgctagatggaatggaaaagcaacttcatttgacacaaagcttctaaagcaggtaaattgtcgggggagagagttagcatgtatgaatgtaaggatgagggaagcgaagcaagaggaacctctcgccatgatcagacatacagctgcctacctaatgaggacttcaagccccaccacatagcatgcttcctttctctcctggctcggggtaaaaagtggctgcggtgtttggcaatgctaattcaatgccgcaacatatagttgaggccgaggataaagaaaagacattttaagtttgtagtaaaagtggtctctgctggggaagggnnnnnnnnnnnnnnnnnnnnnaataacaaggagatttcttagttcatatatcaagaagtcttgaagttgggtgtttccagaattggtaaaaacagcagctcatagaattttgagtattccatgagctgctcattacagttctttcctctttctgctctgccatcttcaggatattggttcttcccctcatagtaataagatggctgtggcatttccaaacatccaaaaaaagggaaggatttaaggaggtgaagtcgggtcaaaaataaaatatatatacatatatacattgcttagaacgttaaactattagagtatttcccttccaaagagggatgtttggaaaaaactctgaaggagaggaggaattagttgggatgccaatttcctctccactgctggacatgagatggagaggctgagggacaggatctataggcagcttctaagagcgaacttcacataggaagggatctgagaacacgttgccaggggcttgagaaggttactgagtgagttattgggagtcttaataaaataaactagatattaggtccattcattaattagttccagtttctccttgaaatgagtaaaaactagaaggcttctctccacagtgttgtgccccttcactcannnnnnnnngaggagaagggggtctctgttaacatctagcctaaagtatagaactgcctggggggcagggttaggaatctcttcactaccctgattcttgattcctggctctaccctgtctgtcccttttctttgaccagatctttctcttccctgaacgttttcttctttccctggacaggcagcctccctttgtgtgtattcagaggcagtgatgactttgctgtccaggcagctccctcctgcacacagaatgctcacgggtcactgaaaccactgcttcctcttttgaaagtaaagctagctgccactttccacgtgggcctccgcagtgtctcaacctacacccctgtgctcccc

SEQ ID NO: 190379 - DNA, 1560 bp, Homo Sapiens; identical to SEQ ID NO: 183218
  misc_feature (336)..(344): n is a, c, g, or t
  misc_feature (754)..(774): n is a, c, g, or t
  misc_feature (1178)..(1190): n is a, c, g, or t

SEQ ID NO: 190380 - DNA, 1060 bp, Homo Sapiens
  misc_feature (905)..(921): n is a, c, g, or t
ttggctggaaaaaaaccaaaacagaatttgagaaccttggaccactcctgtccctgtagctcagtcatcaaagcagaagtctggctttgctctattaagattggaaatgtacactaccaaacactcagtccactgttgagccccagtgctggaagggaggaaggcctttcttctgtgttaattgcgtagaggctacaggggttagcctggactaaaggcatccttgtcttttgagctattcacctcagtagaaaaggatctaagggaagatcactgtagtttagttctgttgacctgtgcacctaccccttggaaatgtctgctggtatttctaattccacaggtcatcagatgcctgcttgataatatataaacaataaaaacaactttcacttcttcctattgtaatcgtgtgccatggatctgatctgtaccatgaccctacataaggctggatggcacctcaggctgagggccccaatgtatgtgtggctgtgggtgtgggtgggagtgtgtctgctgagtaaggaacacgattttcaagattctaaagctcaattcaagtgacacattaatgataaactcagatctgatcaagagtccggatttctaacagtccttgctttggggggtgtgctgacaacttagctcaggtgccttacatcttttctaatcacagtgttgcatatgagcctgccctcactccctctgcagaatccctttgcacctgagaccctactgaagtggctggtagaaaaaggggcctgagtggaggattatcagtatcacgatttgcaggattcccttctgggcttcattctggaaacttttgttagggctgcttttcttaagtgcccacatttgatggagggtggaaataatttgaatgtatttgatttataagnnnnnnnnnnnnnnnnngggttaaaagatggttgtagcatttaaaatggaaaattttctccttggtttgctagtatcttgggtgtattctctgtaagtgtagctcaaataggtcatcatgaaaggttaaaaaagcgaggtggccatgaactataag

SEQ ID NO: 190381 - DNA, 1096 bp, Homo Sapiens
  misc_feature (181)..(201): n is a, c, g, or t
  misc_feature (820)..(828): n is a, c, g, or t
ttggctaatgaggacttcaagccccaccacatagcatgcttcctttctctcctggctcggggtaaaaagtggctgcggtgtttggcaatgctaattcaatgccgcaacatatagttgaggccgaggataaagaaaagacattttaagtttgtagtaaaagtggtctctgctggggaagggnnnnnnnnnnnnnnnnnnnnnaataacaaggagatttcttagttcatatatcaagaagtcttgaagttgggtgtttccagaattggtaaaaacagcagctcatagaattttgagtattccatgagctgctcattacagttctttcctctttctgctctgccatcttcaggatattggttcttcccctcatagtaataagatggctgtggcatttccaaacatccaaaaaaagggaaggatttaaggaggtgaagtcgggtcaaaaataaaatatatatacatatatacattgcttagaacgttaaactattagagtatttcccttccaaagagggatgtttgaaaaaaactctgaaggagaggaggaattagttgggatgccaatttcctctccactgctggacatgagatggagaggctgagggacaggatctataggcagcttctaagagcgaacttcacataggaagggatctgagaacacgttgccaggggcttgagaaggttactgagtgagttattgggagtcttaataaaataaactagatattaggtccattcattaattagttccagtttctccttgaaatgagtaaaaactagaaggcttctctccacagtgttgtgccccttcactcannnnnnnnngaggagaagggggtctctgttaacatctagcctaaagtatacaactgcctggggggcagggttaggaatctcttcactaccctgattcttgattcctggctctaccctgtctgtcccttttctttgaccaaatctttctcttccctgaacgttttcttctttccctggacaggcagcctcctttgtgtgtattcagaggcagtgatgacttgctgtccaggcagctccctcctgcacacagaatgctcagggtcactgaaccactgct

SEQ ID NO: 190382 - DNA, 1178 bp, Homo Sapiens
  misc_feature (102)..(114): n is a, c, g, or t
  misc_feature (998)..(1012): n is a, c, g, or t
ttggatttgagataccacaaaccctgctgaacacagtgtctgttcagcaaactaaccagcattccctacagcctagggcagacaatagtatagaagtctggnnnnnnnnnnnnncagaatttgagaaccttggaccactcctgtccctgtagctcagtcatcaaagcagaagtctggctttgctctattaagattggaaatgtacactaccaaacactcagtccactgttgagccccagtgctggaagggaggaaggcctttcttctgtgttaattgcgtagaggctacaggggttagcctggactaaaggcatccttgtcttttgagctattcacctcagtagaaaaggatctaagggaagatcactgtagtttagttctgttgacctgtgcacctaccccttggaaatgtctgctggtatttctaattccacaggtcatcagatgcctgcttgataatatataaacaataaaaacaactttcacttcttcctattgtaatcgtgtgccatggatctgatctgtaccatgaccctacataaggctggatggcacctcaggctgagggccccaatgtatgtgtggctgtgggtgtgggtgggagtgtgtctgctgagtaaggaacatgattttcaagattctaaagctcaattcaagtgacacattaatgataaactcagatctgatcaagagtccggatttctaacagtccttgctttggggggtgtgctgacaacttagctcaggtgccttacatcttttctaatcacagtgttgcatatgagcctgccctcactccctctgcagaatccctttgcacctgagaccctactgaagtggctggtagaaaaaggggcctgagtggaggattatcagtatcacgatttgcaggattcccttctgggcttcattctggaaacttttgttagggctgcttttcttaagtgcccacatttgatggagggtggaaataatttgaatgtatttgatttataagnnnnnnnnnnnnnnngggttaaaagatggttgtagcatttaaaatggaaaattttctccttggtttgctagtatcttgggtgtattctctgtaagtgtagctcaaataggtcatcatgaaaggttaaaaaagcgaggtggccatgttatgctggtggttaaggccagggcctctccaacca

SEQ ID NO: 190383 - DNA, 850 bp, Homo Sapiens
  misc_feature (327)..(343): n is a, c, g, or t
ttggctcagatctgatcaagagtccggatttctaacagtccttgctttggggggtgtgctgacaacttagctcaggtgccttacatcttttctaatcacagtgttgcatatgagcctgccctcactccctctgcagaatccctttgcacctgagaccctactgaagtggctggtagaaaaaggggcctgagtggaggattatcagtatcacgatttgcaggattcccttctgggcttcattctggaaacttttgttagggctgcttttcttaagtgcccacatttgatggagggtggaaataatttgaatgtatttgatttataagnnnnnnnnnnnnnnnnngggttaaaagatggttgtagcatttaaaatggaaaattttctccttggtttgctagtatcttgggtgtattctctgtaagtgtagctcaaataggtcatcatgactaatgctttttagaaagcattttgggatccttcagcacaggaattctcaagacctgagtattttttataataggaatgtccaccatgaacttgatacgtccgtgtgtcccagatgctgtcattagtctatatggttctccaagaaactgaatgaatccattggagaagcggtggataactagccagacaaaatttgagaatacataaacaacgcattgccacggaaacatacagaggatgccttttctgtgattgggtgggattttttccctttttatgtgggatatagtagttacttgtgacaagaataattttggaataatttctattaatatcaactctgaagctaattgtactaatctgagattgtgtttgttcataataaaagtgaagtgaatctga

SEQ ID NO: 190384 - DNA, 1114 bp, Homo Sapiens
  misc_feature (75)..(85): n is a, c, g, or t
  misc_feature (919)..(931): n is a, c, g, or t
ttgggttccagtttctccttgaaatgagtaaaaactagaaggcttctctccacagtgttgtgccccttcactcannnnnnnnnnngaggagaagggggtctctgttaacatctagcctaaagtatacaactgcctggggggcagggttaggaatctcttcactaccctgattcttgattcctggctctaccctgtctgtcccttttctttgaccagatctttctcttccctgaacgttttcttctttccctggacaggcagcctcctttgtgtgtattcagaggcagtgatgacttgctgtccaggcagctccctcctgcacacagaatgctcagggtcactgaaccactgcttctcttttgaaagtagagctagctgccactttcacgtggcctccgcagtgtctccacctacacccctgtgctcccctgccacactgatggctcaagacaaggctggcaaaccctcccagaaacatctctggcccagaaagcctctctctccctccctctctcatgaggcacagccaagccaagcgctcatgttgagccagtgggccagccacagagcaaaagagggtttattttcagtcccctctctctgggtcagaaccagagggcatgctgaatgccccctgcttacttggtgagggtgccccgcctgagtcagtgctctcagctggcagtgcaatgcttgtagaagtaggaggaaacagttctcactgggaagaagcaagggcaagaacccaagtgcctcacctcgaaaggaggccctgttccctggagtcagggtgaactgcaaagctttggctgagacctgggatttgagataccacaaaccctgctgaacacagtgtctgttcagcaaactaaccagcattccctacagcctagggcagacaatagtatagaagtctggnnnnnnnnnnnnncagaatttgagaaccttggaccactcctgtccctgtagctcagtcatcaaagcagaagtctggctttgctctattaagattggaaatgtacactaccaaacactcagtccactgttgagctccagtgctggaagggaggaaggtctttcttctgtgttaattgcgtagaggctacaggggtta

SEQ ID NO: 190385 - DNA, 1554 bp, Homo Sapiens
  misc_feature (592)..(612): n is a, c, g, or t
  misc_feature (1231)..(1239): n is a, c, g, or t
ttggggcccattgtcctccttttcactttattgctatcgccctcctttcccttattgcctcccaggcaagcagctggtcagtctttgctcagtgtccagcttccaaagcctagacaacctttctgtagcctaaaacgaatggtctttgctccagataactctctttccttgagctgttgtgagctttgaagtaggtggcttgagctagagataaaacagaatcttctgggtagtcccctgttgattatcttcagcccaggcttttgctagatggaatggaaaagcaacttcatttgacacaaagcttctaaagcaggtaaattgtcgggggagagagttagcatgtatgaatgtaaggatgagggaagcgaagcaagaggaacctctcgccatgatcagacatacagctgcctacctaatgaggacttcaagccccaccacatagcatgcttcctttctctcctggctcggggtaaaaagtggctgcggtgtttggcaatgctaattcaatgccgcaacatatagttgaggccgaggataaagaaaagacattttaagtttgtagtaaaagtggtctctgctggggaagggnnnnnnnnnnnnnnnnnnnnnaataacaaggagatttcttagttcatatatcaagaagtcttgaagttgggtgtttccagaattggtaaaaacagcagctcatggaattttgagtattccatgagctgctcattacagttctttcctctttctgctctgccatcttcaggatattggttcttcccctcatagtaataagatggctgtggcatttccaaacatccaaaaaaagggaaggatttaaggaggtgaagtcgggtcaaaaataaaatatatatacatatatacattgcttagaacgttaaactattagagtatttcccttccaaagagggatgtttggaaaaaactctgaaggagaggaggaattagttgggatgccaatttcctctccactgctggacatgagatggagaggctgagggacaggatctataggcagcttctaagagcgaacttcacataggaagggatctgagaacacgttgccaggggcttgagaaggttactgagtgagttattgggagtcttaataaaataaactagatattaggtccattcattaattagttccagtttctccttgaaatgagtaaaaactagaaggcttctctccacagtgttgtgccccttcactcannnnnnnnngaggagaagggggtctctgttaacatctagcctaaagtatacaactgcctggggggcagggttaggaatctcttcactaccctgattcttgattcctggctctaccctgtctgtcccttttctttgaccagatctttctcttccctgaacgttttcttctttccctggacaggcagcctcctttgtgtgtattcagaggcagtgatgacttgctgtccagggcagctctcctcctgcacacagaatgctcagggtcactgaaccactgcttctcttttgaaagtagagctagctgccactttcacgtgggcctcc

SEQ ID NO: 190386 - DNA, 1127 bp, Homo Sapiens
  misc_feature (51)..(63): n is a, c, g, or t
  misc_feature (945)..(961): n is a, c, g, or t
ttggccagcattccctacagcctagggcagacaatagtatagaagtctggnnnnnnnnnnnnncagaatttgagaaccttggaccactcctgtccctgtagctcagtcatcaaagcagaagtctggctttgctctattaagattggaaatgtacactaccaaacactcagtccactgttgagccccagtgctggaagggaggaaggcctttcttctgtgttaattgcgtagaggctacaggggttagcctggactaaaggcatccttgtcttttgagctattcacctcagtagaaaaggatctaagggaagatcactgtagtttagttctgttgacctgtgcacctaccccttggaaatgtctgctggtatttctaattccacaggtcatcagatgcctgcttgataatatataaacaataaaaacaactttcacttcttcctattgtaatcgtgtgccatggctgatctgtaccatgaccctacataaggctggatggcacctcaggctgagggccccaatgtatgtgtggctgtgggtgtgggtgggagtgtgtctgctgagtaaggaacacgattttcaagattctaaagctcaattcaagtgacacattaatgataaactcagatctgatcaagagtccggatttctaacagtccttgctttggggggtgtgctgacaacttagctcaggtgccttacatcttttctaatcacagtgttgcatatgagcctgccctcactccctctgcagaatccctttgcacctgagaccctactgaagtggctggtagaaaaaggggcctgagtggaggattatcagtatcacgatttgcaggattcccttctgggcttcattctggaaacttttgttagggctgcttttcttaagtgcccacatttgatggagggtggaaataatttgaatgtatttgatttataagnnnnnnnnnnnnnnnnngggttaaaagatggttgtagcatttaaaatggaaaattttctccttggtttgctagtatcttgggtgtattctctgtaagtgtagctcaaataggtcatcatgaaaggttaaaaaagcgaggtggccatgttatgctggtggttaaggccagggcctctccaacca

SEQ ID NO: 190387 - DNA, 1507 bp, Homo Sapiens; identical to SEQ ID NO: 183219
  misc_feature (310)..(322): n is a, c, g, or t
  misc_feature (1156)..(1164): n is a, c, g, or t

SEQ ID NO: 190388 - DNA, 960 bp, Homo Sapiens
  misc_feature (779)..(791): n is a, c, g, or t
cctgttcgttcgcacaaattgatgagcaatgctttttcattataaccaactttgtacaaaaaagttggacaggggttagcctggactaaaggcatccttgtcttttgagctattcacctcagtagaaaaggatctaagggaagatcactgtagtttagttctgttgacctgtgcacctaccccttggaaatgtctgctggtatttctaattccacaggtcatcagatgcctgcttgataatatataaacaataaaaacaactttcacttcttcctattgtaatcgtgtgccatggatctgatctgtaccatgaccctacataaggctggatggcacctcaggctgagggccccaatgtatgtgtggctgtgggtgtgggtgggagtgtgtctgctgagtaaggaacacgattttcaagattctaaagctcaattcaagtgacacattaatgataaactcagatctgatcaagagtccggatttctaacagtccttgctttggggggtgtgctgacaacttagctcaggtgccttacatcttttctaatcacagtgttgcatatgagcctgccctcactccctctgcagaatccctttgcacctgagaccctactgaagtggctggtagaaaaaggggcctgagtggaggattatcagtatcacgatttgcaggattcccttctgggcttcattctggaaacttttgttagggctgcttttcttaagtgcccacatttgatggagggtggaaataatttgaatgtatttgatttataagnnnnnnnnnnnnnctggggttaaaagatggttgtagcatttaaaatggaaaattttctccttggtttgctagtatcttgggtgtattctctgtaagtgtagctcaaataggtcatcatgaaaggttaaaaaagcgaggtggccatgttatgctggtggttaaggccagggcctctccaacca

SEQ ID NO: 190389 - DNA, 521 bp, Homo Sapiens
  misc_feature (340)..(355): n is a, c, g, or t
ttggcattaatgataaactcagatctgatcaagagtccggatttctaacagtccttgctttggggggtgtgctgacaacttagctcaggtgccttacatcttttctaatcacagtgttgcatatgagcctgccctcactccctctgcagaatccctttgcacctgagaccctactgaagtggctggtagaaaaaggggcctgagtggaggattatcagtatcacgatttgcaggattcccttctgggcttcattctggaaacttttgttagggctgcttttcttaagtgcccacatttgatggagggtggaaataatttgaatgtatttgatttataagnnnnnnnnnnnnnnnngggttaaaagatggttgtagcatttaaaatggaaaattttctccttggtttgctagtatcttgggtgtattctctgtaagtgtagctcaaataggtcatcatgaaaggttaaaaaagcgaggtggccatgttatgctggtggttaaggccagggcctctccaacca

SEQ ID NO: 190390 - DNA, 845 bp, Homo Sapiens
  misc_feature (664)..(679): n is a, c, g, or t
tttgtacaaaaaagttggctaagggaagatcactgtagtttagttctgttgacctgtgcacctaccccttggaaatgtctgctggtatttctaattccacaggtcatcagatgcctgcttgataatatataaacaataaaaacaactttcacttcttcctattgtaatcgtgtgccatggatctgatctgtaccatgaccctacataaggctggatggcacctcaggctgagggccccaatgtatgtgtggctgtgggtgtgggtgggagtgtgtctgctgagtaaggaacacgattttcaagattctaaagctcaattcaagtgacacattaatgataaactcagatctgatcaagagtccggatttctaacagtccttgctttggggggtgtgctgacaacttagctcaggtgccttacatcttttctaatcacagtgttgcatatgagcctgccctcactccctctgcagaatccctttgcacctgagaccctactgaagtggctggtagaaaaaggggcctgagtggaggattatcagtatcacgatttgcaggattcccttctgggcttcattctggaaacttttgttagggctgcttttcttaagtgcccacatttgatggagggtggaaataatttgaatgtatttgatttataagnnnnnnnnnnnnnnnngggttaaaagatggttgtagcatttaaaatggaaaattttctccttggtttgctagtatcttgggtgtattctctgtaagtgtagctccaataggtcatcatgaaaggttaaaaaagcgaggtggccatgttatgctggtggttaaggccagggcctctccaacca

SEQ ID NO: 190391 - DNA, 1137 bp, Homo Sapiens
  misc_feature (133)..(145): n is a, c, g, or t
  misc_feature (979)..(987): n is a, c, g, or t
ccagcactggggctcaaacagtggactgagtgtttggtagtgtacatttccaatcctaatagagcaaagccagacttctgctttgatgactgagctacagggacaggagtggtccaaggttctcaaattctgnnnnnnnnnnnnnccagacttctatactattgtctgccctaggctgtagggaatgctggttagtttgctgaacagacactgtgttcagcagggtttgtggtatctcaaatcccaggtctcagccaaagctttgcagttcaccctgactccagggaacagggcctcctttcgaggtgaggcacttgggttcttgcccttgcttcttcccagtgagaactgtttcctcctacttctacaagcattgcactgccagctgagagcactgactcaggcggggcaccctcaccaagtaagcagggggcattcagcatgccctctggttctgacccagagagaggggactgaaaataaaccctcttttgctctgtggctggcccactggctcaacatgagcgcttggcttggctgtgcctcatgagagagggagggagagagaggctttctgggccagagatgtttctgggagggtttgccagccttgtcttgagccatcagtgtggcaggggagcacaggggtgtaggtggagacactgcggaggccacgtgaaagtggcagctagctctactttcaaaagagaagcagtggttcagtgaccctgagcattctgtgtgcaggagggagctgcctggacagcaagtcatcactgcctctgaatacacacaaaggaggctgcctgtccagggaaagaagaaaacgttcagggaagagaaagatctggtcaaagaaaagggacagacagggtagagccaggaatcaagaatcagggtagtgaagagattcctaaccctgccccccaggcagttgtatactttaggctagatgttaacagagacccccttctcctcnnnnnnnnntgagtgaaggggcacaacactgtggagagaagccttctagtttttactcatttcaaggagaaactggaactaattaatgaatggacctaatatctagtttattttattaagccaacttttttgtacaaagttgttctatagataaaaaag

SEQ ID NO: 190392 - DNA, 1409 bp, Homo Sapiens
  misc_feature (462)..(482): n is a, c, g, or t
  misc_feature (1101)..(1109): n is a, c, g, or t
acaaaaaagttggctttgctccagataactctctttccttgagctgttgtgagctttgaagtaggtggcttgagctagagataaaacagaatcttctgggtagtcccctgttgattatcttcagcccaggcttttgctagatggaatggaaaagcaacttcatttgacacaaagcttctaaagcaggtaaattgtcgggggagagagttagcatgtatgaatgtaaggatgagggaagcgaagcaagaggaacctctcgccatgatcagacatacagctgcctacctaatgaggacttcaagccccaccacatagcatgcttcctttctctcctggctcggggtaaaaagtggctgcggtgtttggcaatgctaattcaatgccgcaacatatagttgaggccgaggataaagaaaagacattttaagtttgtagtaaaagtggtctctgctggggaagggnnnnnnnnnnnnnnnnnnnnnaataacaaggagatttcttagttcatatatcaagaagtcttgaagttgggtgtttccagaattggtaaaaacagcagctcatggaattttgagtattccatgagctgctcattacagttctttcctctttctgctctgccatcttcaggatattggttcttcccctcatagtaataagatggctgtggcatttccaaacatccaaaaaaagggaaggatttaaggaggtgaagtcgggtcaaaaataaaatatatatacatatatacattgcttagaacgttaaactattagagtatttcccttccaaagagggatgtttggaaaaaactctgaaggagaggaggaattagttgggatgccaatttcctctccactgctggacatgagatggagaggctgagggacaggatctataggcagcttctaagagcgaacttcacataggaagggatctgagaacacgttgccaggggcttgagaaggttactgagtgagttattgggagtcttaataaaataaactagatattaggtccattcattaattagttccagtttctccttgaaatgagtaaaaactagaaggcttctctccacagtgttgtgccccttcactcannnnnnnnngaggagaagggggtctctgttaacatctagcctaaagtatacaactgcctggggggcagggttaggaatctcttcactaccctgattcttgattcctggctctaccctgtctgtcccttttctttgaccagatctttctcttccctgaacgttttcttctttccctggacaggcagcctcctttgtgtgtattcagaggcagtgatgacttgctgtccaggcagctccctcctgcacacagaatgctcagggtcactgaaccactgcttctcttttgaaagtagagctagctgccacttt

SEQ ID NO: 190393 - DNA, 814 bp, Homo Sapiens
  misc_feature (192)..(206): n is a, c, g, or t
  misc_feature (373)..(491): n is a, c, g, or t
ttggccctttgcacctgagaccctactgaagtggctggtagaaaaaggggcctgagtggaggattatcagtatcacgatttgcaggattcccttctgggcttcattctggaaacttttgttagggctgcttttcttaagtgcccacatttgatggagggtggaaataatttgaatgtatttgatttataagnnnnnnnnnnnnnnngggttaaaagatggttgtagcatttaaaatggaaaattttctccttggtttgctagtatcttgggtgtattctctgtaagtgtagctcaaataggtcatcatgaaaggttaaaaaagcgaggtggccatgttatgctggtggttaaggccagggcctctccaaccannnnnnnnnnnnnnnnnnnnnnnnnnnnnnnnnnnnnnnnnnnnnnnnnnnnnnnnnnnnnnnnnnnnnnnnnnnnnnnnnnnnnnnnnnnnnnnnnnnnnnnnnnnnnnnnnnnnnnncatgactaatgctttttagaaagcattttgggatccttcagcacaggaattctcaagacctgagtattttttataataggaatgtccaccatgaacttgatacgtccgtgtgtcccagatgctgtcattagtctatatggttctccaagaaactgaatgaatccattggagaagcggtggataactagccagacaaaatttgagaatacataaacaacgcattgccacggaaacatacagaggatgcctttttctgtgattgggtgggattttttccctttttatgtgggatatagtagttacttgtgacaagaataattttg

SEQ ID NO: 190394 - DNA, 944 bp, Homo Sapiens
  misc_feature (739)..(751): n is a, c, g, or t
ctttgtacaaaaaagttggcccttttctttgaccagatctttctcttccctgaacgttttcttctttccctggacaggcagcctcctttgtgtgtattcagaggcagtgatgacttgctgtccaggcagctccctcctgcacacagaatgctcagggtcactgaaccactgcttctcttttgaaagtagagctagctgccactttcacgtggcctccgcagtgtctccacctacacccctgtgctcccctgccacactgatggctcaagacaaggctggcaaaccctcccagaaacatctctggcccagaaagcctctctctccctccctctctcatgaggcacagccaagccaagcgctcacgttgagccagtgggccagccacagagcaaaagagggtttattttcagtcccctctctctgggtcagaaccagagggcatgctgaatgccccctgcttacttggtgagggtgccccgcctgagtcagtgctctcagctggcagtgcaatgcttgtagaagtaggaggaaacagttctcactgggaagaagcaagggcaagaacccaagtgcctcacctcgaaaggaggccctgttccctggagtcagggtgaactgcaaagctttggctgagacctgggatttgagataccacaaaccctgctgaacacagtgtctgttcagcaaactaaccagcattccctacagcctagggcagacaatagtatagaagtctggnnnnnnnnnnnnncagaatttgagaaccttggaccactcctgtccctgtagctcagtcatcaaagcagaagtctggctttgctctattaagattggaaatgtacactaccaaacactcagtccactgttgagccccagtgctggaagggaggaaggcctttcttctgtgttaattgcgtagaggctacaggggttagcctgactaa

SEQ ID NO: 190395 - DNA, 1234 bp, Homo Sapiens
  misc_feature (553)..(566): n is a, c, g, or t
  misc_feature (929)..(938): n is a, c, g, or t
  misc_feature (958)..(1050): n is a, c, g, or t
caaaaaatttaatatggcagtcttgtattttaagctcacgctttggggatacattctcaggtcttctttaatgtgggaactgcaaaatataactgccattacatggtaatgggagttaaagaatagagtcctcatgtaaaggttagaacatacttttctattagtccttcaaggacagactttcaaaatgtttgattctaataatcccatgctttgagtagattgattactcttcagtttgtaaatgtaagtgggctatgtgaaatttcttaactgatcaagattttggatgttcagttatggatgaaaactatctcaacttaactttacccccattatgatatgcagggtgtgtagacaaaagctttttattagctaactatatgaaaggataaacactgtaataattcatgtgattcaaaatgggcaaaagcaaaagactagcttcccctcaagaagaaaaatttcagacctatgaaaaggacaacaatactaataaaaaaaattgtatttacttagaagcattcagaatgtcaacaaaacagctgcaacnnnnnnnnnnnnnngcaattacagagtggtattcagttaacagaacaacaattatttcgtataagctgcatcagagacaactgaagatgaaaaaactaccatccccatatataactaatttgtgctgtgcaccaacaagaacctgctttaaatttccatgccaatttacaacccccatactgtaccaggcaaggttagtggctattgaaaataccaccaggacagggctatctaaagacacattcggtagtgtgttaactatacaaaaaaagacactgtacagtttaaaaacaaatcttacacagccttacatttcaatttttttctttaaaaggagtgagttgtgtacaggggggttaaatgctttatagacaagnnnnnnnnnnctgcgctagaaccaacttannnnnnnnnnnnnnnnnnnnnnnnnnnnnnnnnnnnnnnnnnnnnnnnnnnnnnnnnnnnnnnnnnnnnnnnnnnnnnnnnnnnnnnnnnnnnctttttcttgcttttttcagccttgacaactcccttttttgctgcatcaggctttcctttagctcgatatgcagcaatatccttccaaagcaaagggaggataaaacagtagggaagaaaaaaacattaaggaaagaaatagaacatggcagaactttatgaaagaaatcaagattctagccaa

SEQ ID NO: 190396 - DNA, 3247 bp, Homo Sapiens; identical to SEQ ID NO: 183220
  misc_feature (409)..(532): n is a, c, g, or t
  misc_feature (921)..(935): n is a, c, g, or t

SEQ ID NO: 190397 - DNA, 1821 bp, Homo Sapiens; identical to SEQ ID NO: 183221
  misc_feature (603)..(704): n is a, c, g, or t
  misc_feature (724)..(734): n is a, c, g, or t
  misc_feature (1097)..(1109): n is a, c, g, or t

SEQ ID NO: 190398 - DNA, 893 bp, Homo Sapiens; identical to SEQ ID NO: 183222
  misc_feature (464)..(580): n is a, c, g, or t
  misc_feature (600)..(609): n is a, c, g, or t

SEQ ID NO: 190399 - DNA, 2715 bp, Homo Sapiens; identical to SEQ ID NO: 183223
  misc_feature (1203)..(1212): n is a, c, g, or t
  misc_feature (1693)..(1785): n is a, c, g, or t
  misc_feature (1805)..(1814): n is a, c, g, or t
  misc_feature (2177)..(2190): n is a, c, g, or t

SEQ ID NO: 190400 - DNA, 923 bp, Homo Sapiens
  misc_feature (800)..(809): n is a, c, g, or t
actttgtacaaaaaagtttggcccgctctcacagccattgcagtacattgagctccatagagacagcgccggggcaagtgagagccggacgggcactgggcgactctgtgcctcgctgaggaaaaataactaaacatgggcaaaggagatcctaagaagccgagaggcaaaatgtcatcatatgcattttttgtgcaaacttgtcgggaggagcataagaagaagcacccagatgcttcagtcaacttctcagagttttctaagaagtgctcagagaggtggaagaccatgtctgctaaagagaaaggaaaatttgaagatatggcaaaagcggacaaggcccgttatgaaagagaaatgaaaacctatatccctcccaaaggggagacaaaaaagaagttcaaggatcccaatgcacccaagaggcctccttcggccttcttcctcttctgctctgagtatcgcccaaaaatcaaaggagaacatcctggcctgtccattggtgatgttgcgaagaaactgggagagatgtggaataacactgctgcagatgacaagcagccttatgaaaagaaggctgcgaagctgaaggaaaaatacgaaaaggatattgctgcatatcgagctaaaggaaagcctgatgcagcaaaaaagggagttgtcaaggctgaaaaaagcaagaaaaagaatgaagaggaggaagatgaggaagatgaagacgatgaggaggacgaggaagatgaacaacatgacgatgacgaacaagatgatgatgatgaataagttggttctagcgcagnnnnnnnnnnccttgtctataaagcatttaacccccctgtacacaactcactccttttaaagaaaaaaattgaaatggtacggctgtgtaagatttgttttaaactgtacagtgtctttttttg

SEQ ID NO: 190401 - DNA, 1474 bp, Homo Sapiens; identical to SEQ ID NO: 183224
  misc_feature (656)..(748): n is a, c, g, or t
  misc_feature (768)..(777): n is a, c, g, or t
  misc_feature (1140)..(1153): n is a, c, g, or t

SEQ ID NO: 190402 - DNA, 1326 bp, Homo Sapiens
ctttgtacaaaaaagttggcacccaaccacgggccagaagctgtcacttcaggacgcagtctcccagggtgtgattgaccaagacatggccaccaggctgaagcctgctcagaaagccttcataggcttcgagggtgtgaagggaaagaagaagatgtcagcagcagaggcagtgaaagaaaaatggctcccgtatgaggctggccagcgcttcctggagttccagtacctcacgggaggtcttgttgacccggaagtgcatgggaggataagcaccgaagaagccatccggaaggggttcatagatggccgcgccgcacagaggctgcaagacaccagcagctatgccaaaatcctgacctgccccaaaaccaaattaaaaatatcctataaggatgccataaatcgctccatggtagaagatatcactgggctgcgccttctggaagccgcctccgtgtcgtccaagggcttacccagcccttacaacatgtcttcggctccgggctcccgctccggctcccgctcgggatctcgctccggatctcgctccgggtcccgcagtgggtcccggagaggaagctttgacgccacagggaattcttcctactcttattcctactcatttagcagtagttctattgggcactagtagtcagttgggagtggttgctataccttgacttcatttatatgaatttccactttattaaataatagaaaagaaaatcccggtgcttgcagtagagtgataggacattctatgcttacagaaaatatagccatgattgaaatcaaatagtaaaggctgttctggctttttatcttcttagctcatcttaaataagcagtacacttggatgcagtgcgtctgaagtgctaatcagttgtaacaatagcacaaatcgaacttaggatttgtttcttctcttctgtgtttcgatttttgatcaattctttaattttggaagcctataatacagttttctattcttggagataaaaattaaatggatcactgatattttagtcattctgcttctcatctaaatatttccatattctgtattaggagaaaattaccctcccagcaccagcccccctctcaaacccccaacccaaaaccaagcattttggaatgagtctcctttaatttcagagtgtggattgtataacccatatactcttcgatgtactttgtttggtttggtatttaatttgactgtgcatgacagcggcaatccttttctttggtcaaagtttttctgattattttgcttgtcgtattcgatgtacttttaaggtgtctttatgagattgctattc

SEQ ID NO: 190403 - DNA, 1143 bp, Homo Sapiens
  misc_feature (883)..(900): n is a, c, g, or t
actttgtacaaaaaagttggttcaaggacccgatctatgacatattccaaaagctcaacagcaacacccaggtagttttgctgtcagccacaatgccttctgatgtgcttgaggtgaccaagaagttcatgagggaccccattcggattcttgtcaagaaggaagagttgaccctggagggtatccgccagttctacatcaacgtggaacgagaggagtggaagctggacacactatgtgacttgtatgaaaccctgaccatcacccaggcagtcatcttcatcaacacccggaggaaggtggactggctcaccgagaagatgcatgctcgagatttcactgtatccgccatgcatggagatatggaccaaaaggaacgagacgtgattatgagggagtttcgttctggctctagcagagttttgattaccactgacctgctggccagaggcattgatgtgcagcaggtttctttagtcatcaactatgaccttcccaccaacagggaaaactatatccacagaatcggtcgaggtggacggtttggccgtaaaggtgtggctattaacatggtgacagaagaagacaagaggactcttcgagacattgagaccttctacaacacctccattgaggaaatgcccctcaatgttgctgacctcatctgaggggctgtcctgccacccagccccagccagggctcaatctctgggggctgaggagcagcaggaggggggagggaagggagccaagggatggacatcttgtcattttttttctttgaataaatgtcactttttgaggcaaaagaaggaaccgtgaacattttagacacccttttctttggggtaggctcttgccccaggcgccggctcttctcccnnnnnnnnnnnnnnnnnncactaatccatttccctaacctagtaacctccagatcccagaggctctcctcacctcagctgagctcctttgaaagtgattcaagggactgtgtcactcagcctcatttgctggaccaaatctggagggagaacccctaaaacccctaagtgaggttgcccagggggttgtccccaggtggggggaagcaggggagagaaaatggtaaccatttttaccttgtttttgtatatatttattgat

SEQ ID NO: 190404 - DNA, 3547 bp, Homo Sapiens; identical to SEQ ID NO: 183226
  misc_feature (3391)..(3435): n is a, c, g, or t

SEQ ID NO: 190405 - DNA, 1342 bp, Homo Sapiens; identical to SEQ ID NO: 183227

SEQ ID NO: 190406 - DNA, 1014 bp, Homo Sapiens; identical to SEQ ID NO: 179935
  misc_feature (150)..(167): n is a, c, g, or t

SEQ ID NO: 190407 - DNA, 1542 bp, Homo Sapiens; identical to SEQ ID NO: 183228

SEQ ID NO: 190408 - DNA, 868 bp, Homo Sapiens
ttggggatcatgtctgcgagccaggattcccgatccagagacaatggccccgatgggatggagcccgaaggcgtcatcgagagtaactggaatgagattgttgacagctttgatgacatgaacctctcggagtcccttctccgtggcatctacgcctatggttttgagaagccctctgccatccagcagcgagccattctaccttgtatcaagggttatgatgtgattgctcaagcccaatctgggactgggaaaacggccacatttgccatatcgattctgcagcagattgaattagatctaaaagccacccaggccttggtcctagcacccactcgagaattggctcagcagatacagaaggtggtcatggcactaggagactacatgggcgcctcctgtcacgcctgtatcgggggcaccaacgtgcgtgctgaggtgcagaaactgcagatggaagctccccacatcatcgtgggtacccctggccgtgtgtttgatatgcttaaccggagatacctgtgtgagtaattcggttctccaatcccctgggtcactttgctcttgtgcacgctttccagtctttcagcgtaagccagagtcattcccaaggatgctggtttctctctgggggaagagctgctctgtgatggagcccatgcgtgtcatctgagcctctggcttccctgccagtgcagccctggcagtgtcctacttcccagggctgttgtctgcctggcgggaaggtcctgggcaaaggatcagtctttgtactctgagagcagactacttggctcctctctgttttttatcagcgaagttggatatatctctcccacatttccctaatcatatgctatatattggc

SEQ ID NO: 190409 - DNA, 1279 bp, Homo Sapiens; identical to SEQ ID NO: 183229

SEQ ID NO: 190410 - DNA, 1106 bp, Homo Sapiens
ctttgtacaaaaaagttgggtctgcgagccaggattcccgatccagagacaatggccccgatgggatggagcccgaaggcgtcatcgagagtaactggaatgagattgttgacagctttgatgacatgaacctctcggagtcccttctccgtggcatctacgcctatggttttgagaagccctctgccatccagcagcgagccattctaccttgtatcaagggttatgatgtgattgctcaagcccaatctgggactgggaaaacggccacatttgccatatcgattctgcagcagattgaattagatctaaaagccacccaggccttggtcctagcacccactcgagaattggctcagcagatacagaaggtggtcatggcactaggagactacatgggcgcctcctgtcacgcctgtatcgggggcaccaacgtgcgtgctgaggtgcagaaactgcagatggaagctccccacatcatcgtgggtacccctggccgtgtgtttgatatgcttaaccggagatacctgtcccccaaatacatcaagatgtttgtactggatgaagctgacgaaatgttaagccgtggattcaaggaccagatctatgacatattccaaaagctcaacagcaacacccaggtagttttgctgtcagccacaatgccttctgatgtgcttgaggtgaccaagaagttcatgagggaccccattcggattcttgtcaagaaggaagagttgaccctggagggtatccgccagttctacatcaacgtggaacgagaggagtggaagctggacacactatgtgacttgtatgaaaccctgaccatcacccaggcagtcatcttcatcaacacccggaggaaggtggactggctcaccgagaagatgcatgctcgagatttcactgtatccgccatgcatggagatatggaccaaaaggaacgagacgtgattatgagggagtttcgttctggctctagcagaattttgattaccactgacctgctggccagaggcattgatgtgcagcaggtttctttagtcatcaactatgaccttcccacccaacagggaaaactatatccacagaatcggtcgaag

SEQ ID NO: 190411 - DNA, 943 bp, Homo Sapiens
actttgtacaaaaaagttggatctccttgaaaaatggtgtcggcaccagcagcagcatgggcagtggtgtcagcgatgatgtttttagcagctcccgacatgaatcagtaagtaagatttccaccatatccagcgtcaggaatttaaccataaggagcagctctttttcagacaccctggaagaatcgagccccattgcagccatctttgacacagaaaacctggagaaaatctccattacagaaggtatagagcggggcatcgttgacagcatcacgggtcagaggcttctggaggctcaggcctgcacaggtggcatcatccacccaaccacgggccagaagctgtcacttcaggacgcagtctcccagggtgtgattgaccaagacatggccaccaggctgaagcctgctcagaaagccttcataggcttcgagggtgtgaagggaaagaagaagatgtcagcagcagaggcagtgaaagaaaaatggctcccgtatgaggctggccagcgcttcctggagttccagtacctcacgggaggtcttgttgacccggaagtgcatgggaggataagcaccgaagaagccatccggaaggggttcatagatggccgcgccgcacagaggctgcaagacaccagcagctatgccaaaatcctgacctgccccaaaaccaaattaaaaatatcctataaggatgccataaatcgctccatggtagaagatatcactgggctgcgccttctggaagccgcctccgtgtcgtccaagggcttacccagcccttacaacatgtcttcggctccgggctcccgctccggctcccgctcgggatctcgctccggatctcgctccgggtcccgcagtgggtcccggagaggaagctttgacgccacagggaattcttcctactcttattcctactcatttagcagtagttc

SEQ ID NO: 190412 - DNA, 850 bp, Homo Sapiens
acacaccggcagaacagggcactgcgtttggaagtttctgaccaagtggtgacagcagagggcaaaacgtgaaggctgtgctggataaggctgaaccttcctcataagcaacaccaactgctttattccaggtcagggccaactcttccgccatgatacatacatggtccctggcgggcactgtccttactgagcccctaggagtccctgcgttgtggcctgaccaccagcccctctctggtgatggcccagttgtagttcttccgggagtccaatgctgcttccacccgtgcctccaggttctctcgggtgatgaagtttttcacctcttcctgcagctgcagcacttcccgctccttgcgctgcgcccaggcctgcacctcttcggccttgcgggcctgctccaacgcctgccgctgctcctgctcccgctcctcctgccgcagcctcgctatccgcagctcgtgcagccgccggttctccgcctggttccaggccatcagctcgcggtgctcggcggcgtccttcagggccttgcgctccgccagaaccccggctcgggcctcgtgcaccttcctctgcacctcggacacgaactccatcctgagggcgcgcacggtctggcggtagtgctggtaacgctccatcagcacgaagaactccgcagggtccaccgcgggcggcatgttcactcgctcgatcttggatttggccagcgggtcgtggcgggtcttgcggccgcgcgctggcagcaccagaggggcccggggcctgcacggggtccccgcgcccaggcggctcagcgcgcgtagcatggccgagtctcctcactgcggccgcggtgccccaa

SEQ ID NO: 190413 - DNA, 1855 bp, Homo Sapiens; identical to SEQ ID NO: 183231
  misc_feature (1658)..(1674): n is a, c, g, or t

SEQ ID NO: 190414 - DNA, 1028 bp, Homo Sapiens; identical to SEQ ID NO: 183232
  misc_feature (799)..(807): n is a, c, g, or t

SEQ ID NO: 190415 - DNA, 1195 bp, Homo Sapiens; identical to SEQ ID NO: 183233
  misc_feature (349)..(370): n is a, c, g, or t

SEQ ID NO: 190416 - DNA, 1279 bp, Homo Sapiens; identical to SEQ ID NO: 183234
  misc_feature (1148)..(1156): n is a, c, g, or t

SEQ ID NO: 190417 - DNA, 1956 bp, Homo Sapiens; identical to SEQ ID NO: 183235

SEQ ID NO: 190418 - DNA, 899 bp, Homo Sapiens
ttgggtcagcaagactgacataggagaagtgattcttgtgggtggcatgactaggatgcccaaggttcagcagactgtacaggatctttttggcagagccccaagtaaagctgtcaatcctgatgaggctgtggccattggagctgccattcagggaggtgtgttggccggcgatgtcacggatgtgctgctccttgatgtcactcccctgtctctgggtattgaaactctaggaggtgtctttaccaaacttattaataggaataccactattccaaccaagaagagccaggtattctctactgccgctgatggtcaaacgcaagtggaaattaaagtgtgtcagggtgaaagagagatggctggagacaacaaactccttggacagtttactttgattggaattccaccagcccctcgtggagttcctcagattgaagttacatttgacattgatgccaatgggatagtacatgtttctgctaaagataaaggcacaggacgtgagcagcagattgtaatccagtcttctggtggattaagcaaagatgatattgaaaatatggttaaaaatgcagagaaatatgctgaagaagaccggcgaaagaaggaacgagttgaagcagttaatatggctgaaggaatcattcacgacacagaaaccaagatggaagaattcaaggaccaattacctgctgatgagtgcaacaagctgaaagaagagatttccaaaatgagggagctcctggctagaaaagacagcgaaacaggagaaaatatttagacaggcagcatcctctcttcagcagcatcactgaagctgttcgaaatggcatacaaaaagatggcatctgagcgagaacgcttctggaggtctctggcactggggaacaaaggaa

SEQ ID NO: 190419 - DNA, 1308 bp, Homo Sapiens; identical to SEQ ID NO: 183236
  misc_feature (165)..(202): n is a, c, g, or t
  misc_feature (237)..(319): n is a, c, g, or t

SEQ ID NO: 190420 - DNA, 2129 bp, Homo Sapiens; identical to SEQ ID NO: 183238
  misc_feature (197)..(236): n is a, c, g, or t
  misc_feature (242)..(544): n is a, c, g, or t
  misc_feature (630)..(750): n is a, c, g, or t

SEQ ID NO: 190421 - DNA, 890 bp, Homo Sapiens
ctttgtacaaaaaagttgggacaatgtggggccccaagcagatgcagcagatccgcatgtcccttcgcgggaaggctgtggtgctgatgggcaagaacaccatgatgcgcaaggccatccgagggcacctggaaaacaacccagctctggagaaactgctgcctcatatccgggggaatgtgggctttgtgttcaccaaggaggacctcactgagatcagggacatgttgctggccaataaggtgccagctgctgcccgtgctggtgccattgccccatgtgaagtcactgtgccagcccagaacactggtctcgggcccgagaagacctcctttttccaggctttaggtatcaccactaaaatctccaggggcaccattgaaatcctgagtgatgtgcagctgatcaagactggagacaaagtgggagccagcgaagccacgctgctgaacatgctcaacatctcccccttctcctttgggctggtcatccagcaggtgttcgacaatggcagcatctacaaccctgaagtgcttgatatcacagaggaaactctgcattctcgcttcctggagggtgtccgcaatgttgccagtgtctgtctgcagattggctacccaactgttgcatcagtaccccattctatcatcaacgggtacaaacgagcgccgcgccttgtctgtggagacggattacacccttcccacttgctgaaaaggtcaaggccttcttggctgatccatctgcctttgtggctgctgcccctgtggctgctgccaccacagctgctcctgctgctgctgcagccccagctaaattgaaacccaagaagagtcggaggagtcggaccgaggatatgggatttggtctctttgactaatcaccaaaaa

SEQ ID NO: 190422 - DNA, 983 bp, Homo Sapiens
agcaatgctttttctataaaagccaactttgtacaaaaaagttgggtctttaaaccctgcgtggcaatccctgacgcaccgccgtgatgcccagggaagacagggcgacctggaagtccaactacttccttaagatcatccaactattggatgattatccgaaatgtttcattgtgggagcagacaatgtgggctccaagcagatgcagcagatccgcatgtcccttcgcgggaaggctgtggtgctgatgggcaagaacaccatgatgcgcaaggccatccgagggcacctggaaaacaacccagctctggagaaactgctgcctcatatccgggggaatgtgggctttgtgttcaccaaggaggacctcactgagatcagggacatgttgctggccaataaggtgccagctgctgcccgtgctggtgccattgccccatgtgaagtcactgtgccagcccagaacactggtctcgggcccgagaagacctcctttttccaggctttaggtatcaccactaaaatctccaggggcaccattgaaatcctgagtgatgtgcagctgatcaagactggagacaaagtgggagccagcgaagccacgctgctgaacatgctcaacatctcccccttctcctttgggctggtcatccagcaggtgttcgacaatggcagcatctacaaccctgaagtgcttgatatcacagaggaaactctgcattctcgcttcctggagggtgtccgcaatgttgccagtgtctgtctgcagattggctacccaactgttgcatcagtaccccattctatcatcaacgggtacaaacgagtcctggccttgtctgtggagacggattacaccttcccacttgctgaaaaggtcaaggccttcttggctgatccatctgcctttgtggctgctgcccctgtggctgctgccacccaagctgctcctgctggctgcttgcagccccagcttaaggtt

SEQ ID NO: 190423 - DNA, 1064 bp, Homo Sapiens
aatggccaactttgtacaaaaaagttgggtcctcgtggaagtgacatcgtctttaaaccctgcgtggcaatccctgacgcaccgccgtgatgcccagggaagacagggcgacctggaagtccaactacttccttaagatcatccaactattggatgattatccgaaatgtttcattgtgggagcagacaatgtgggctccaagcagatgcagcagatccgcatgtcccttcgcgggaaggctgtggtgctgatgggcaagaacaccatgatgcgcaaggccatccgagggcacctggaaaacaacccagctctggagaaactgctgcctcatatccgggggaatgtgggctttgtgttcaccaaggaggacctcactgagatcagggacatgttgctggccaataaggtgccagctgctgcccgtgctggtgccattgccccatgtgaagtcactgtgccagcccagaacactggtctcgggcccgagaagacctcctttttccaggctttaggtatcaccactaaaatctccaggggcaccattgaaatcctgagtgatgtgcagctgatcaagactggagacaaagtgggagccagcgaagccacgctgctgaacatgctcaacatctcccccttctcctttgggctggtcatccagcaggtgttcgacaatggcagcatctacaaccctgaagtgcttgatatcacagaggaaactctgcattctcgcttcctggagggtgtccgcaatgttgccagtgtctgtctgcagattggctacccaactgttgcatcagtaccccattctatcatcaacgggtacaaacgagtcctggccttgtctgtggagacggattacaccttcccacttgctgaaaaggtcaaggccttcttggctgatccatctgcctttgtggctgctgcccctgtggctgctgccaccacagctgctcctgctgctgctgcagccccagctaaggttgaagccaagaaaagtcggaggagtcggacgaggatatgggatttggtctctttgactaatcaccaaaaatcaaccaactta

SEQ ID NO: 190424 - DNA, 708 bp, Homo Sapiens
actttgtacaaaaaagttgggtgccattgccccatgtgaagtcactgtgccagcccagaacactggtctcgggcccgagaagacctcctttttccaggctttaggtatcaccactaaaatctccaggggcaccattgaaatcctgagtgatgtgcagctgatcaagactggagacaaagtgggagccagcgaagccacgctgctgaacatgctcaacatctcccccttctcctttgggctggtcatccagcaggtgttcgacaatggcagcatctacaaccctgaagtgcttgatatcacagaggaaactctgcattctcgcttcctggagggtgtccgcaatgttgccagtgtctgtctgcagattggctacccaactgttgcatcagtaccccattctatcatcaacgggtacaaacgagtcctggccttgtctgtggagacggattacaccttcccacttgctgaaaaggtcaaggccttcttggctgatccatctgcctttgtggctgctgcccctgtggctgctgccaccacagctgctcctgctgctgctgcagccccagctaaggttgaagccaaggaagagtcggaggagtcggacgaggatatgggatttggtctctttgactaatcaccaaaaagcaaccaacttagccagttttatttgcaaaacaaggaaataaaggcttacttctttacatagtc

SEQ ID NO: 190425 - DNA, 616 bp, Homo Sapiens
  misc_feature (435)..(487): n is a, c, g, or t
gccaactttggtacaaaaaagttggggctttaggtatcaccactaaaatctccaggggcaccattgaaatcctgagtgatgtgcagctgatcaagactggagacaaagtgggagccagcgaagccacgctgctgaacatgctcaacatctcccccttctcctttgggctggtcatccagcaggtgttcgacaatggcagcatctacaaccctgaagtgcttgatatcacagaggaaactctgcattctcgcttcctggagggtgtccgcaatgttgccagtgtctgtctgcagattggctacccaactgttgcatcagtaccccattctatcatcaacgggtacaaacgagtcctggccttgtctgtggagacggattacaccttcccacttgctgaaaaggtcaaggccttcttggctgatccatctgcctttnnnnnnnnnnnnnnnnnnnnnnnnnnnnnnnnnnnnnnnnnnnnnnnnnnnnnagccccagctaaggttgaagccaaggaagagtcggaggagtccgacgaggatatgggatttggtctctttgactaatcaccaaaaagcaaccaacttagccagttttatttgcaaaacaaggaaataaa

SEQ ID NO: 190426 - DNA, 1078 bp, Homo Sapiens
aattgatgagcaatgctttttccatttttagcacaactttgtacaaaaaagttgggttgatttggggcctattgaagacacctgctcagtatgacgcttctgagctaaaagcttccatgaaggggctgggaaccgacgaggactctctcattgagatcatctgctccagaaccaaccaggagctgcaggaaattaacagagtctacaaggaaatgtacaagactgatctggagaaggacattatttcggacacatctggtgacttccgcaagctgatggttgccctggcaaagggtagaagagcagaggatggctctgtcattgattatgaactgattgaccaagatgctcgggatctctatgacgctggagtgaagaggaaaggaactgatgttcccaagtggatcagcatcatgaccgagcggagcgtgccccacctccagaaagtatttgataggtacaagagttacagcccttatgacatgttggaaagcatcaggaaagaggttaaaggagacctggaaaatgctttcctgaacctggttcagtgcattcagaacaagcccctgtattttgctgatcggctgtatgactccatgaagggcaaggggacgcgagataaggtcctgatcagaatcatggtctcccgcagtgaagtggacatgttgaaaattaggtctgaattcaagagaaagtacggcaagtccctgtactattatatccagcaagacactaagggcgactaccagaaagcgctgctgtacctgtgtggtggagatgactgaagcccgacacggcctgagcgtccagaaatggtgctcaccatgcttccagctaacaggtctagaaaaccagcttgcgaataacagtccccgtggccatccctgtgagggtgacgttagcattacccccaacctcattttagttgcctaagcattgcctggccttcctgtctagtctctcctgtaagccaaagaaatgaacattccaaggagttggaagtgaagtctatgatgtgaaacactttgcctcctgtgtactgtgtcataaacagatgaataaactgaatttgtacttt

SEQ ID NO: 190427 - DNA, 953 bp, Homo Sapiens
gagcaatgctttttccattatagccaactttgtacaaaaaagttggcttgcttccaaaatgtctactgttcacgaaatcctgtgcaagctcagcttggagggtgatcactctacacccccaagtgcatatgggtctgtcaaagcctatactaactttgatgctgagcgggatgctttgaacattgaaacagccatcaagaccaaaggtgtggatgaggtcaccattgtcaacattttgaccaaccgcagcaatgcacagagacaggatattgccttcgcctaccagagaaggaccaaaaaggaacttgcatcagcactgaagtcagccttatctggccacctggagacgttgattttgggcctattgaagacacctgctcagtatgacgcttctgagctaaaagcttccatgaaggggctgggaaccgacgaggactctctcattgagatcatctgctccagaaccaaccaggagctgcaggaaattaacagagtctacaaggaaatgtacaagactgatctggagaaggacattatttcggacacatctggtgacttccgcaagctgatggttgccctggcaaagggtagaagagcagaggatggctctgtcattgattatgaactgattgaccaagatgctcgggatctctatgacgctggagtgaagaggaaaggaactgatgttcccaagtggatcagcatcatgaccgagcggagcgtgccccacctccagaaagtatttgataggtacaagagttacagcccttatgacatgttggaaagcatcagaaagaggttaaaggagacctggaaaatgctttcctgaacctggttcagtgcattcagaacaagcccctgtattttgctgatcggctgtatgactccatgaagggcaaggggacgcgagataaggtcctgatcagaatcatggtctcccgcagtgaagtgga

SEQ ID NO: 190428 - DNA, 508 bp, Homo Sapiens
aaactttgtacaaaaaagttggctccatgaagggcaaggggacgcgagataaggtcctgatcagaatcatggtctcccgcagtgaagtggacatgttgaaaattaggtctgaattcaagagaaagtacggcaagtccctgtactattatatccagcaagacactaagggcgactaccagaaagcgctgctgtacctgtgtggtggagatgactgaagcccgacacggcctgagcgtccagaaatggtgctcaccatgcttccagctaacaggtctagaaaaccagcttgcgaataacagtccccgtggccatccctgtgagggtgacgttagcattaccccctacctcattttagttgcctaagcattgcctggccttcctgtctagtctctcctgtaagccaaagaaatgaacattccaaggagttggaagtgaagtctatgatgtgaaacactttgcctcctgtgtactgtgtcataaacagatgaataaactgaatttgtacttt

SEQ ID NO: 190429 - DNA, 1481 bp, Homo Sapiens; identical to SEQ ID NO: 183242
  misc_feature (1052)..(1069): n is a, c, g, or t

SEQ ID NO: 190430 - DNA, 2269 bp, Homo Sapiens; identical to SEQ ID NO: 183243
  misc_feature (294)..(306): n is a, c, g, or t

SEQ ID NO: 190431 - DNA, 1048 bp, Homo Sapiens; identical to SEQ ID NO: 183244

SEQ ID NO: 190432 - DNA, 1565 bp, Homo Sapiens
gccaactttgtacaaaaaagttggctcagtgcacagtgctgcctcgtctgaggggacaggaggatcaccctcttcgtcgcttcggccagtgtgtcgggctgggccctgacaagccacctgaggagaggctcggagccgggcccggaccccggcgattgccgcccgcttctctctagtctcacgaggggtttcccgcctcgcacccccacctctggacttgcctttccttctcttctccgcgtgtggagggagccagcgcttaggccggagcgagcctgggggccgcccgccgtgaagacatcgcggggaccgattcaccatggagggcgccggcggcgcgaacgacaagaaaaagataagttctgaacgtcgaaaagaaaagtctcgagatgcagccagatctcggcgaagtaaagaatctgaagttttttatgagcttgctcatcagttgccacttccacataatgtgagttcgcatcttgataaggcctctgtgatgaggcttaccatcagctatttgcgtgtgaggaaacttctggatgctggtgatttggatattgaagatgacatgaaagcacagatgaattgcttttatttgaaagccttggatggttttgttatggttctcacagatgatggtgacatgatttacatttctgataatgtgaacaaatacatgggattaactcagtttgaactaactggacacagtgtgtttgattttactcatccatgtgaccatgaggaaatgagagaaatgcttacacacagaaatggccttgtgaaaaagggtaaagaacaaaacacacagcgaagcttttttctcagaatgaagtgtaccctaactagccgaggaagaactatgaacataaagtctgcaacatggaaggtattgcactgcacaggccacattcacgtatatgataccaacagtaaccaacctcagtgtgggtataagaaaccacctatgacctgcttggtgctgatttgtgaacccattcctcacccatcaaatattgaaattcctttagatagcaagactttcctcagtcgacacagcctggatatgaaattttcttattgtgatgaaagaattaccgaattgatgggatatgagccagaagaacttttaggccgctcaatttatgaatattatcatgctttggactctgatcatctgaccaaaactcatcatgatatgtttactaaaggacaagtcaccacaggacagtacaggatgcttgccaaaagaggtggatatgtctgggttgaaactcaagcaactgtcatatataacaccaagaattctcaaccacagtgcattgtatgtgtgaattacgttgtgagtggtattattcagcacgacttgattttctcccttcaacaaacagaatgtgtccttaaaccggttgaatcttcagatatgaaaatgactcagctattcaccaaagttgaatcagaagatacaagtagcctctttgacaaacttaagaaggaacctgatgcttaaactttgctggccccagccgctggagacacaatcatatctttagattttggcagca

SEQ ID NO: 190433 - DNA, 572 bp, Homo Sapiens
  misc_feature (79)..(105): n is a, c, g, or t
ttggatttttaagaagatgccaatataatttttgtaagaaggcagtaacctttcatcatgatcataggcagttgaaaannnnnnnnnnnnnnnnnnnnnnnnnnnacataaataataatgctttgccagcagtacgtggtagccacaattgcacaatatattttcttaaaaaataccagcagttactcatggaatatattctgcgtttataaaactagtttttaagaagaaattttttttggcctatgaaattgttaaacctggaacatgacattgttaatcatataataatgattcttaaatgctgtatggtttattatttaaatgggtaaagccatttacataatatagaaagatatgcatatatctagaaggtatgtggcatttatttggataaaattctcaattcagagaaatcatctgatgtttctatagtcactttgccagctcaaaagaaaacaataccctatgtagttgtggaagtttatgctaatattgtgtaactgatattaaacctaaatgttctgcctaccctgttggtataaagatattttgagcagactgtaaacaag

SEQ ID NO: 190434 - DNA, 2700 bp, Homo Sapiens; identical to SEQ ID NO: 183247
  misc_feature (2326)..(2382): n is a, c, g, or t
  misc_feature (2450)..(2476): n is a, c, g, or t
  misc_feature (2604)..(2612): n is a, c, g, or t

SEQ ID NO: 190435 - DNA, 1288 bp, Homo Sapiens
  misc_feature (446)..(454): n is a, c, g, or t
  misc_feature (923)..(953): n is a, c, g, or t
aaaatcacaacagacatgccttcctagaacatttagagggatggccaggtgtaatcactggtttaataaaaacaggagaatatccaaaatgaaaatatttgagtttcaaaatgaattttcatcactgtattctgaagaatgtagttctttcctcttgttagccctccacctcgcaccactcagtccaccattcactggaaagaacaaacctcactgctcttgaatcttttttatactttaagctatgaggcaaggttcagaatcaccagaatgaatcccaagttgccactatttaaaaagtaggtgaagaatgataatgcctgcctgtgtactggtgcagatgggacattttcacccactaaaaccactgcaaaataatttctcaatagataactgaatagtgcatcttccttgaaccagataaatcatacaatatttaattaccnnnnnnnnnccaagcgggtactcaaacttttgataagcaataaagagttctaagaaaggtaaggcaaagaatcttcctgagccaaatggatacaacatggagattttcttatctttcatactaagctaattaatgataggctcaaaaaatgcagtatacttataaaaagccgctttcataaagccagtgcttactaaatgttagcatatcaaagtgggagaaacactgccattttaaaacaataaacttaaaatttcaagaaacagcctatgagaaatagcacttcctatacaaattaggtataaaaaaattaccaaaaatgtattatagtcacaatcacagtctttggagtagtacgtagaaagtctggttttgcttttgtcttttaaaaaagagtaaatacatagcaaagttttattttcagcaagttcatcctcctgttagaacacaaataattcctggtttagggcttcaattnnnnnnnnnnnnnnnnnnnnnnnnnnnnnnntgcagagtgctattcctcaacatggctgttggaaaatttaactccaggaagtgcaatgagtgagatcaggcaaaactacagtaaatacacactcaccataactataacttagtcccaaaggaatgaacaatcctctatacaaggtaaatggggtgaaatgagaaaattggtgacctgtgttttatctttcttttatataggatggataacgcattctttaggtcatctacattaaatgtactttagaaacaaaaatttacttgatattttgacaaacccacccttcattccttaggttaatttctgtgttaatttttacattactaatcatccaa

SEQ ID NO: 190436 - DNA, 1678 bp, Homo Sapiens; identical to SEQ ID NO: 183248
  misc_feature (619)..(649): n is a, c, g, or t
  misc_feature (1118)..(1126): n is a, c, g, or t

SEQ ID NO: 190437 - DNA, 1208 bp, Homo Sapiens
tttgtacaaaaaagttggctacattcttcagaatacagtgatgaaaattcattttgaaactcaaatattttcattttggatattctcctgtttttattaaaccagtgattacacctggccatccctctaaatgttctaggaaggcatgtctattgtgattttgatgaagacagaattatttttctctgtagaaacacagataccactttatcagggaagttagtcaaatgaaatggaaattggtaaatggacaaaagctagctagtaaaaaggacgacccagcaacatgctttaaccccattgtatgtttgtggaaagagcatagtttaacatcttgagaaatttgggacataaagttttcatggtagacagttcatgcagtatatgaattgacataatggaaataatctgattttatttttacaactaacatccattccccttcatttaaacaccttttgtgttttacttcagtgaggagattggagtctgaatggatctgttttccaagagattctgagaaatttttgtattcagcagttggaaagctctctattctagttgataaaacttcccttttttgatgtagatgcagatattctatacagttctgttgtcttttactaggactgtaaacttttgtgataaaattcaaataagattttatttcttggtaattttggctttcacaatttatctttaaatccttgagcaatctgtatacaattaagagatttctgacatttattcttacactaaatggatcaactctaggatttaggcatgttaacttctgttgtgttttgaatctctccagagttgcatgtagatagcatttatttctgtgcccttaaacccatttagaaaataactacaaagtaaaaatgtagaggaaatagaaatgtattttttcatgaacattttgatacaaatttcatcatttaatgattcaccaatttcttgcattaatttgaatttaagcatttaattcaaagagaggggagcatccattattgatacatgtgggcttttaaaaactccatcctttataaatagtcaaggtttgggccacacaaagtatatttttatcatggaaaaatttcaactcctcaagccgtaatgttgaacagaattggagtattttctttataatttcttgaacagggcaaatgaaagcttattatagaatgcatgtattttcttttatc

SEQ ID NO: 190438 - DNA, 1231 bp, Homo Sapiens
  misc_feature (83)..(91): n is a, c, g, or t
ttggatttggctcaggaagattctttgccttacctttcttagaactctttattgcttatcaaaagtttgagtacccgcttggnnnnnnnnnggtaattaaatattgtatgatttatctggttcaaggaagatgcactattcagttatctattgagaaattattttgcagtggttttagtgggtgaaaatgtcccatctgcaccagtacacaggcaggcattatcattcttcacctactttttaaatagtggcaacttgggattcattctggtgattctgaaccttgcctcatagcttaaagtataaaaaagattcaagagcagtgaggtttgttctttccagtgaatggtggactgagtggtgcgaggtggagggctaacaagaggaaagaactacattcttcagaatacagtgatgaaaattcattttgaaactcaaatattttcattttggatattctcctgtttttattaaaccagtgattacacctggccatccctctaaatgttctaggaaggcatgtctattgtgattttgatgaagacagaattatttttctctgtagaaacacagataccactttatcagggaagttagtcaaatgaaatggaaattggtaaatggacaaaagctagctagtaaaaaggacgacccagcaacatgctttaaccccattgtatgtttgtggaaagagcatagtttaacatcttgagaaatttgggacataaagttttcatggtagacagttcatgcagtatatgaattgacataatggaaataatctgattttatttttacaactaacatccattccccttcatttaaacaccttttgtgttttacttcagtgaggagattggagtctgaatggatctgttttccaagagattctgagaaatttttgtattcagcagttggaaagctctctattctagttgataaaacttcccttttttgatgtagatgcagatattctatacagttctgttgtcttttactaaggactgtaaacttttgtgataaaattcaaataagattttatttcttggtaattttggctttcacaatttatctttaaatcctttgagcaacctgtatacaattaagagatttctgacatttattcttacactaaatggatcaactctaaggatttaaggcatgtttaaccttctgttgtgtttttgaatctctccgagtttgcatgtaatagcatttattttctgtgccc

SEQ ID NO: 190439 - DNA, 2267 bp, Homo Sapiens; identical to SEQ ID NO: 183249
  misc_feature (43)..(69): n is a, c, g, or t
  misc_feature (2128)..(2158): n is a, c, g, or t

SEQ ID NO: 190440 - DNA, 1521 bp, Homo Sapiens
  misc_feature (566)..(596): n is a, c, g, or t
  misc_feature (1065)..(1073): n is a, c, g, or t
ctttgtacaaaaaagttggagcattttatccttaaaagagaaactgatgggcacctgatactctgtctaaatacgtttgttatatgtgttttgccctgtgccattcatttggaactttattgcattctttattttaaaaagcttgtttttacgtaatcatagagcttgctatttgtacatctgttgagcaacactacataactgatttttagttgacttagctatagcagtacaatgattagtaatgtaaaaattaacacagaaattaacctaaggaatgaagggtgggtttgtcaaaatatcaagtaaatttttgtttctaaagtacatttaatgtagatgacctaaagaatgcgttatccatcctatataaaagaaagataaaacacaggtcaccaattttctcatttcaccccatttaccttgtatagaggattgttcattcctttgggactaagttatagttatggtgagtgtgtatttactgtagttttgcctgatctcactcattgcacttcctggagttaaattttccaacagccatgttgaggaatagcactctgcannnnnnnnnnnnnnnnnnnnnnnnnnnnnnnaattgaagccctaaaccaggaattatttgtgttctaacaggaggatgaacttgctgaaaataaaactttgctatgtatttactcttttttaaaagacaaaagcaaaaccagactttctacgtactactccaaagactgtgattgtgactataatacatttttggtaatttttttatacctaatttgtataggaagtgctatttctcataggctgtttcttgaaattttaagtttattgctttaaaatggcagtgtttctcccactttgatatgctaacatttagtaagcactggctttatgaaagcggctttttataagtatactgcattttttgagcctatcattaattagcttagtatgaaagataagaaaatctccatgttgtatccatttggctcaggaagattctttgccttacctttcttagaactctttattgcttatcaaaagtttgagtacccgcttggnnnnnnnnnggtaattaaatattgtatgatttatctggttcaaggaagatgcactattcagttatctattgagaaattattttgcagtggttttagtgggtgaaaatgtcccatctgcaccagtacacaggcaggcattatcattcttcacctactttttaaatagtggcaacttgggattcattctggtgattctgaaccttgcctcatagcttaaagtataaaaaaagattcaagagcagtgaggtttgttctttccagtgaatggtggactgagtggtgcgaggtggagggctaacaagaggaaagaactacattcttcagaatacagtgatgaaaattcattttgaaactcaaatattttcattttggatattctcctgtttttattaaaccagtgattacacctggccatccctctaaatgttctaggaaggcatgtctgttgtgattttga

SEQ ID NO: 190441 - DNA, 872 bp, Homo Sapiens
gccaactttgtacaaaaaagttgggtgttgtctcctacccaatgctcaggagcttcctagcatgtaccagcgcctagggctggactacgaggaacgagtgttgccgtccattgtcaacgaggtgctcaagagtgtggtggccaagttcaatgcctcacagctgatcacccagcgggcccaggtatccctgttgatccgccgggagctgacagagagggccaaggacttcagcctcatcctggatgatgtggccatcacagagctgagctttagccgagagtacacagctgctgtagaagccaaacaagtggcccagcaggaggcccagcgggcccaattcttggtagaaaaagcaaagcaggaacagcggcagaaaattgtgcaggccgagggtgaggccgaggctgccaagatgcttggagaagcactgagcaagaaccctggctacatcaaacttcgcaagattcgagcagcccagaatatctccaagacgatcgccacatcacagaatcgtatctatctcacagctgacaaccttgtgctgaacctacaggatgaaagtttcaccaggggaagtgacagcctcatcaagggtaagaaatgagcctagtcaccaagaactccacccccagaggaagtggatctgcttctccagtttttgaggagccagccaggggtccagcacagccctaccccgccccagtatcatgcgatggtcccccacaccggttccctgaacccctcttggattaaggaagactgaagactagccccttttctggggaattactttcctcctccctgtgttaactggggctgttggggacagtgcgtgatttctcagtgatttctacagtgttgttccctccctc

SEQ ID NO: 190442 - DNA, 2076 bp, Homo Sapiens; identical to SEQ ID NO: 183253

SEQ ID NO: 190443 - DNA, 1936 bp, Homo Sapiens; identical to SEQ ID NO: 179938

SEQ ID NO: 190444 - DNA, 760 bp, Homo Sapiens
  misc_feature (410)..(457): n is a, c, g, or t
actttcgtacaaaaaaagttggccacagacctcatggaagccatggccatgggcagcgtggaggcttcttataagtgtttagcagcagctttgatagttctgacggagtctggcaggtctgctcaccaggtggccagataccgcccacgtgcccccatcattgctgtgacccggaatccccagacagctcgtcaggcccacctgtaccgtggcatcttccctgtgctgtgcaaggacccagtccaggaggcctgggctgaggacgtggacctccgggtgaactttgccatgaatgttggcaaggcccgaggcttcttcaagaagggagatgtggtcattgtgctgaccggatggcgccctggctccggcttcaccaacaccatgcgtgttgttcctgtgccgtgatggannnnnnnnnnnnnnnnnnnnnnnnnnnnnnnnnnnnnnnnnnnnnnnnatccattaggccagcaacgcttgtagaactcactctgggctgtaacgtggcactggtaggttgggacaccagggaagaagatcaacgcctcactgaaacatggctgtgtttgcagcctgctctagtgggacagcccagagcctggctgcccatcatgtgaccccacccattcaagggaagaaggaggaatgctggactggaggcccctggagccagatggcaagagggtgacagcttcctttcctgtgtgtactctgtccagttcctttagaaaaaatggatgccccagaggactcccaaccc

SEQ ID NO: 190445 - DNA, 1369 bp, Homo Sapiens
  misc_feature (113)..(161): n is a, c, g, or t
tgcaaacacagccatgtttcagtgaggcgttgatcttcttccctggtgtcccaactaccagtgccacgttacagcccagagtgagttctacaagcgttgctggctaatggatnnnnnnnnnnnnnnnnnnnnnnnnnnnnnnnnnnnnnnnnnnnnnnnnnccatcacggcacaggaacaacacgcatggtgttggtgaagccggagccagggcgccatccggtcagcacaatgaccacatctcccttcttgaagaagcctcgggccttgccaacattcatggcaaagttcacccggaggtccacgtcctcagcccaggcctcctggactgggtccttgcacagcacagggaagatgccacggtacaggtgggcctgacgagctgtctggggattccgggtcacagcaatgatgggggcacgtgggcggtatctggccacctggtgagcagacctgccagacttggtgaggacgattatggccccactgcagcacttgaaggaggcctccacggcacccacggcggtggcttctgtggggtcgctggtaatgggcgccaggcggcggagttcctcaaataattgcaagtggtagatggcagcctctgcctcacgggcaatcaggtgctgcatgcgcacagcctccagaggatagtcccctttggctgtttctccagacagcatgatgcagtcggctccatccaggactgcattggccacatcactgccttcagcccgagtggggcggggcttcttgatcatgctctccagcatctgagtagcacagatgacaggcttcccagctcggttgcaccgtccaatcatcatcttctgagcaaggaagaccttctctgcaggaatctcaatgcctagatcaccacgagccaccatgatcccatcactggcctccaggatttcatcaaacctccgaaccccctcatgattctcgattttgctgataatcttgatgttctttcccttctctcccaggaccttcctaacttcatggacatcagatgccttgcggatgaatgacgcaaacaccatatcaacatcctgctcgaccccaaacttcagatcctggatgtccttctccgacacagcaggcaagtccacattcattccagacttaatcatctccttcaacgtctccactgatcgggaagctgggccaatggtacagatgatgccagtgttccgggctgtgatgggtggtgaatcaatgtccaggcggcacatgtgctccaggaatgtgtcagccatggctgcgtgcagctgctgggtctgaatgaaggcagtcccggcttcactatggggcttcgacatggctgctgaggtcctccggcgctgaccgactcgggctacgccaa

SEQ ID NO: 190446 - DNA, 933 bp, Homo Sapiens
ggatttcatcaaacctccgaaccccctcatgattctcgattttgctgataatcttgatgttctttccttctctcccaggaccttcctaacttcatggacatcagatgccttgcggatgaatgacgcaaacaccatatcaacatcctgctcgaccccaaacttcagatcctggatgtccttctccgacacagcaggcaagtccacagcagccccaggaaggttcacacccttcttgctgcccaaggagccaccattttccacctccgtcaccaggaagtcggcacctttctgcttcacctggagagaaataagcccatcatccacgtagatcttgctgcccacttccaccaccttgcagatgttcttgtagtccagccacaggatgttctcgtcacacttttccatgtaggcgttatccagcgtgattttgagagtggctcccttcttcagctccacctctgcagtgccgctgcccttgatgagcccagttcggatctcaggtcctttagtgtctagagccacagcaacgggccggtagaggatggggtcagaagcaaagctttccgtggctgtgcgcacattcttgatggtctccgcatggtactcatgagttccatgagagaagttcagacgagccacattcattccagacttaatcatctccttcaacgtctccactgatcgggaagctgggccaatggtacagatgatgccagtgttccgggctgtgatgggtggtgaatcaatgtccaggcggcacatgtgctccaggaatgtgtcagccatggctgcgtgcagctgctgggtctgaatgaaggcagtcccggcttcactatggggcttcgacatggctgctgaggtcctccggcgctgaccgactcgggctacgctgcaaagacgaccaacttttttgtacaaagttggctttataag

SEQ ID NO: 190447 - DNA, 1304 bp, Homo Sapiens
ttggccagtttggactcttgcttactctcttgtccctagagcggcactgcagaggtggagctgaagaagggagccactctcaaaatcacgctggataacgcctacatggaaaagtgtgacgagaacatcctgtggctggactacaagaacatctgcaaggtggtggaagtgggcagcaagatctacgtggatgatgggcttatttctctccaggtgaagcagaaaggtgccgacttcctggtgacggaggtggaaaatggtggctccttgggcagcaagaagggtgtgaaccttcctggggctgctgtggacttgcctgctgtgtcggagaaggacatccaggatctgaagtttggggtcgagcaggatgttgatatggtgtttgggtcattcatccgcaaggcatctgatgtccatgaagttaggaaggtcctgggagagaagggaaagaacatcaagattatcagcaaaatcgagaatcatgagggggttcggaggtttgatgaaatcctggaggccagtgatgggatcatggtggctcgtggtgatctaggcattgagattcctgcagagaaggtcttccttgctcagaagatgatgattggacggtgcaaccgagctgggaagcctgtcatctgtgctactcagatgctggagagcatgatcaagaagccccgccccactcgggctgaaggcagtgatgtggccaatgcagtcctggatggagccgactgcatcatgctgtctggagaaacagccaaaggggactatcctctggaggctgtgcgcatgcagcacctgatagctcgtgaggctgaggcagccatgttccaccgcaagctgtttgaagaacttgtgcgagcctcaagtcactccacagacctcatggaagccatggccatgggcagcgtggaggcttcttataagtgtttagcagcagctttgatagttctgacggagtctggcaggtctgctcaccaggtggccagataccgcccacgtgcccccatcattgctgtgacccggaatccccagacagctcgtcaggcccacctgtaccgtggcatcttccctgtgctgtgcaaggacccagtccaggaggcctgggctgaggacgtggacctccgggtgaactttgccatgaatgttggcaaggcccgaggcttcttcaagaagggagatgtggtcattgtgctgaccggatggcgccctggctccggcttcaccaacaccatgcgtgttgttcctgtgccgtgatggaccccagagcccctcctccagcccctgtcccacccccttccccc

SEQ ID NO: 190448 - DNA, 836 bp, Homo Sapiens
aaaagccaactttgtacaaaaaagttggggcagtgcaaatatccaagaagaggaagtttgtcgctgatggcatcttcaaagctgaactgaatgagtttcttactcgggagctggctgaagatggctactctggagttgaggtgcgagttacaccaaccaggacagaaatcattatcttagccaccagaacacagaatgttcttggtgagaagggccggcggattcgggaactgactgctgtagttcagaagaggtttggctttccagagggcagtgtagagctttatgctgaaaaggtggccactagaggtctgtgtgccattgcccaggcagagtctctgcgttacaaactcctaggagggcttgctgtgcggagggcctgctatggtgtgctgcggttcatcatggagagtggggccaaaggctgcgaggttgtggtgtctgggaaactccgaggacagagggctaaatccatgaagtttgtggatggcctgatgatccacagcggagaccctgttaactactacgttgacactgctgtgcgccacgtgttgctcagacagggtgtgctgggcatcaaggtgaagatcatgctgccctgggacccaactggtaagattggccctaagaagcccctgcctgaccacgtgagcattgtggaacccaaagatgagatactgcccaccacccccatctcagaacagaagggtgggaagccagagccgcctgccatgccccagccagtccccacagcataacagggtctccttggcagctgtattctggagtctggatgttgctctctaaagacctttaataaaattttgtacaaagac

SEQ ID NO: 190449 - DNA, 556 bp, Homo Sapiens
ctttgtacaaaaaagttggccagaacactgttcttggtgagaagggccggcggattcgggaactgactgctgtagttcagaagaggtttggctttccagagggcagtgtagagctttatgctgaaaaggtggccactagaggtctgtgtgccattgcccaggcagagtctctgcgttacaaactcctaggagggcttgctgtgcggagggcctgctatggtgtgctgcggttcatcatggagagtggggccaaaggctgcgaggttgtggtgtctgggaaactccgaggacagagggctaaatccatgaagtttgtggatggcctgatgatccacagcggagaccctgttaactactacgttgacactgctgtgcgccacgtgttgctcagacagggtgtgctgggcatcaaggtgaagatcatgctgccctgggacccaactggtaagattggccctaagaagcccctgcctgaccacgtgagcattgtggaacccaaagatgagatactgcccaccacccccctctcacaacaaaagggtgggaaaccagagcc

SEQ ID NO: 190450 - DNA, 1752 bp, Homo Sapiens; identical to SEQ ID NO: 183256

SEQ ID NO: 190451 - DNA, 1334 bp, Homo Sapiens; identical to SEQ ID NO: 183259
  misc_feature (1054)..(1068): n is a, c, g, or t

SEQ ID NO: 190452 - DNA, 1713 bp, Homo Sapiens; identical to SEQ ID NO: 183260
  misc_feature (1194)..(1208): n is a, c, g, or t

SEQ ID NO: 190453 - DNA, 664 bp, Homo Sapiens
ctttgtacaaaaaagttggaatcctttgtcctaaaaaaaggtagctaccacatcattttgaaaggaccatgagcaactataagcaaagccataagaagtggtttgatcgatatattaggggtagctcttgattttgttaacattaagataaggtgactttttccccctgcttttaggattaaaatcaaagatacttctatatttttatcactatagatcatagttattatacaatgtagtgagtcctgcatgggtactcgatgtgtaatgaaacctgaaataataagataataagaaaagcaataattttctaaagctgtgctgtcggtgatacagagatgatactcaaattataataaaactcttcattttgtgaattatagaagctactttttataaagccatatttttttagggaaactaaggagtgacatagaactgatgaatgagcaaaagtaagttttgctggatttttgtagaactctggacgttgaggattcattatgctgtggttaactttaaatatttttgaattccaaatatctgaattaatgagccttgtctttacaaatatgtgccattgtgcaacatcggtggattttctaaaaataatgtaaatgtcttctattaaatgttgagtgcaataaaatacagaagaattctc

SEQ ID NO: 190454 - DNA, 1365 bp, Homo Sapiens; identical to SEQ ID NO: 183261
  misc_feature (193)..(253): n is a, c, g, or t
  misc_feature (1152)..(1166): n is a, c, g, or t

SEQ ID NO: 190455 - DNA, 925 bp, Homo Sapiens
tacaaaaaagttggggttcgtacacgcgaggccgggcgcgcgcagccggcaggcgggtgaagtcttcccaggtgctgcaggcggtgctgaggcacagggtctgctgcaggagcagcggcccgaacccgctccagcggcccgccgccgccagcggctcccgcgtcgcgtgtgtacccccgcgcactgaaggaggtccaccagccctcaccagcccccgcggaccgtgcaatggcccagcgtaagaatgccaagagcagcggcaacagcagcagcagcggctccggcagcggtagcacgagtgcgggcagcagcagccccggggcccggagagagacaaagcatggaggacacaagaatgggaggaaaggcggactctcaggaacttcattcttcacgtggtttatggtgattgcattgctgggcgtctggacatctgtagctgtcgtttggtttgatcttgttgactatgaggaagttctaggaaaactaggaatctatgatgctgatggtgatggagattttgatgtggatgatgccaaagttttattaggacttaaagagagatctacttcagagccagcagtcccgccagaagaggctgagccacacactgagcccgaggagcaggttcctgtggaggcagaaccccagaatatcgaagatgaagcaaaagaacaaattcagtcccttctccatgaaatggtacacgcagaacatgttgagggagaagacttgcaacaagaagatggacccacaggagaaccacaacaagaggatgatgagtttcttatggcgactgatgtagatgatagatttgagaccctggaacctgaagtatctcatgaagaaaccgagcatagttaccacgtggaagagacagtttcacaagactgtaatcaaggatatgggaagagatgatgtctga

SEQ ID NO: 190456 - DNA, 999 bp, Homo Sapiens
  misc_feature (905)..(924): n is a, c, g, or t
ttgttggcatggagagcggggcctacggcgcggccaaggcgggcggctccttcgacctgcggcgcttcctgacgcagccgcaggtggtggcgcgcgccgtgtgcttggtcttcgccttgatcgtgttctcctgcatctatggtgagggctacagcaatgcccacgagtctaagcagatgtactgcgtgttcaaccgcaacgaggatgcctgccgctatggcagtgccatcggggtgctggccttcctggcctcggccttcttcttggtggtcgacgcgtatttcccccagatcagcaacgccactgaccgcaagtacctggtcattggtgacctgctcttctcagctctctggaccttcctgtggtttgttggtttctgcttcctcaccaaccagtgggcagtcaccaacccgaaggacgtgctggtgggggccgactctgtgagggcagccatcaccttcagcttcttttccatcttctcctggggtgtgctggcctccctggcctaccagcgctacaaggctggcgtggacgacttcatccagaattacgttgaccccactccggaccccaacactgcctacgcctcctacccaggtgcatctgtggacaactaccaacagccacccttcacccagaacgcggagaccaccgagggctaccagccgccccctgtgtactgagcggcggttagcgtgggaagggggacagagagggccctcccctctgccctggactttcccatgagcctcctggaactgccagcccctctctttcacctgttccatcctgtgcagctgacacacagctaaggagcctcatagcctggcgggggctggcagagccacaccccaagtgcctgtgcccagagggcttcagtcagctgctcactcctccagggcacnnnnnnnnnnnnnnnnnnnnagctaatgtttttcctcgcttttaatgacctcagccccgcctgcagtggctagaagccagcaggtgcccatgtgc

SEQ ID NO: 190457 - DNA, 1264 bp, Homo Sapiens
  misc_feature (1112)..(1140): n is a, c, g, or t
actttgtacaaaaaagttggttcgggttttcttgccaccctctgggagtccccatcccattttcatcctgagcccaaccaggccctgccattggcctcttgtcccttggcacacttgtacccacaggtgaggggcaggacctgaaggtattggcctgttcaacaatcagtcatcatgggtgtttttgtcaactgcttgttaattgatttggggatgtttgccccgaatgagaggttgaggaaaagactgtgggtggggaggccctgcctgacccatcccttttcctttctggccccagcctaggtggaggcaagtggaatatcttatattgggcgatttgggggctcggggaggcagagaatctcttgggagtcttgggtggcgctggtgcattctgtttcctcttgatctcaaagcacaatgtggatttggggaccaaaggtcagggacacatccccttagaggacctgagtttgggagagtggtgagtggaagggaggagcagcaagaagcagcctgttttcactcagcttaattctccttcccagataaggcaagccagtcatggaatcttgctgcaggccctccctctactcttcctgtcctaaaaataggggccgttttcttacacacccccagagagaggagggactgtcacactggtgctgagtgaccgggggctgctgggcgtctgttctttaccaaaaccatccatccctagaagagcacagagccctgaggggctgggctgggctgggctgagcccctggtcttctctacagttcacagaggtctttcagctcatttaatcccaggaaagaggcatcaaagctagaatgtgaatataacttttgtggaccaatactaagaataacaagaagcccagtggtgaggaaagtgcgttctcccagcactgcctcctgttttctccctctcatgtccctccagggaaaatgactttattgcttaatttctgcctttcccccctcacacatgcacttttgggcctttttttatagctggaaaaaacaaaataccaccctacaaacctgtatttaaaaagaaacagaaatgaccacgtgaaatttgcctctgtccaaacatttcatccnnnnnnnnnnnnnnnnnnnnnnnnnnnnnaagccgccagttcatctttttatatggggttgttgtctcattttggtctgttttgggtcccctccctcgtgggcttgtgctcgggatcaaacctttctggcctgttatgattctgaacatttga

SEQ ID NO: 190458 - DNA, 462 bp, Homo Sapiens
  misc_feature (252)..(280): n is a, c, g, or t
ttggctaagaataacaagaagcccagtggtgaggaaagtgcgttctcccagcactgcctcctgttttctccctctcatgtccctccagggaaaatgactttattgcttaatttctgcctttcccccctcacacatgcacttttgggcctttttttatagctggaaaaaacaaaataccaccctacaaacctgtatttaaaaagaaacagaaatgaccacgtgaaatttgcctctgtccaaacatttcatccnnnnnnnnnnnnnnnnnnnnnnnnnnnnnaagccgccagttcatctttttatatggggttgttgtctcattttggtctgttttggtcccctccctcgtgggcttgtgctcgggatcaaacctttctggcctgttatgattctgaacatttgacttgaaccacaagtgaatctttctcctggtgactcaaataaaagtataatttttacctg

SEQ ID NO: 190459 - DNA, 864 bp, Homo Sapiens
  misc_feature (656)..(684): n is a, c, g, or t
ctttgtacaaaaaagttgggggagagtgctgagtggaagggaggagcagcaagaagcagcctgttttcactcagcttaattctccttcccagataaggcaagccagtcatggaatcttgctgcaggccctccctctactcttcctgtcctaaaaataggggccgttttcttacacacccccagagagaggagggactgtcacactggtgctgagtgaccgggggctgctgggcgtctgttctttaccaaaaccatccatccctagaagagcacagagccctgaggggctgggctgggctgggctgagcccctggtcttctctacagttcacagaggtctttcagctcatttaatcccaggaaagaggcatcaaagctagaatgtgaatataacttttgtggaccaatactaagaataacaagaagcccagtggtgaggaaagtgcgttctcccagcactgcctcctgttttctccctctcatgtccctccagggaaaatgactttattgcttaatttctgcctttcccccctcacacatgcacttttgggcctttttttatagctggaaaaaacaaaataccaccctacaaacctgtatttaaaaagaaacagaaatgaccacgtgaaatttgcctctgtccaaacatttcatccnnnnnnnnnnnnnnnnnnnnnnnnnnnnnaagccgccagttcatctttttatatggggttgttgtctcattttggtctgttttggtcccctccctcgtgggcttgtgctcgggatcaaaccctttctggcctgttatgattctgaacatttgacttgaaccccaagtgaatcttttctcctggtgactcaaataaaagtatacttttta

SEQ ID NO: 190460 - DNA, 965 bp, Homo Sapiens
  misc_feature (790)..(818): n is a, c, g, or t
ttggaaactggaagcacagcctcggggaggcagagaatctcttgggagtcttgggtggcgctggtgcattctgtttcctcttggatctcaaagcacaatgtggatttggggaccaaaggtcagggacacatccccttagaggacctgagtttgggagagtggtgagtggaagggaggagcagcaagaagcagcctgttttcactcagcttaattctccttcccagataaggcaagccagtcatggaatcttgctgcaggccctccctctactcttcctgtcctaaaaataggggccgttttcttacacacccccagagagaggagggactgtcacactggtgctgagtgaccgggggctgctgggcgtctgttctttaccaaaaccatccatccctagaagagcacagagccctgaggggctgggctgggctgggctgagcccctggtcttctctacagttcacagaggtctttcagctcatttaatcccaggaaagaggcatcaaagctagaatgtgaatataacttttgtggaccaatactaagaataacaagaagcccagtggtgaggaaagtgcgttctcccagcactgcctcctgttttctccctctcatgtccctccagggaaaatgactttattgcttaatttctgcctttcccccctcacacatgcacttttgggccttttttttatagctggaaaaaacaaaataccaccctacaaacctgtatttaaaaagaaacagaaatgaccacgtgaaatttgcctctgtccaaacatttcatccnnnnnnnnnnnnnnnnnnnnnnnnnnnnnaagccgccagttcatctttttatatggggttgttgtctcaatatgggtctgttttggtcccctccctcgtgggcttgtgctcgggatcaaacccttttctggcctgttatgattctgaacatttgacttgaaccacaatgaatcttt

SEQ ID NO: 190461 - DNA, 990 bp, Homo Sapiens
agcaatgcttttcctataaggccaactttgtacaaaaaagttgggttgggttggtcagtccctccaacaacagcaaggaggatgccttctccgggacagattggatgttggagaaaatggatttgaaggagttcgacttggatgccctgttgggtatagatgacctggaaaccatgccagatgaccttctgaccacgttggatgacacttgtgatctctttgcccccctagtccaggagactaataagcagcccccccagacggtgaacccaattggccatctcccagaaagtttaacaaaacccgaccaggttgcccccttcaccttcttacaacctcttcccctttccccaggggtcctgtcctccactccagatcattcctttagtttagagctgggcagtgaagtggatatcactgaaggagataggaagccagactacactgcttacgttgccatgatccctcagtgcataaaggaggaagacaccccttcagataatgatagtggcatctgtatgagcccagagtcctatctggggtctcctcagcacagcccctctaccaggggctctccaaataggagcctcccatctccaggtgttctctgtgggtctgcccgtcccaaaccttacgatcctcctggagagaagatggtagcagcaaaagtaaagggtgagaaactggataagaagctgaaaaaaatggagcaaaacaagacagcagccactaggtaccgccagaagaagagggcggagcaggaggctcttactggtgagtgcaaagagctggaaaagaagaacgaggctctaaaagagagggcggattccctggccaaggagatccagtacctgaaagatttgatagaagaggtccgcaaggcaagggggaaaaaagggtcccctagttgaggatagtcaggagcgtcaatgtgcttgtacatagagtgctgtagctgtgtgttccaataaattattttgtagggaaagt

SEQ ID NO: 190462 - DNA, 953 bp, Homo Sapiens
actttgtacaaaaaagttggcacagatgtagttttctctgcgcgtgtgcgttttccctcctccccgccctcagggtccacggccaccatggcgtattaggggcagcagtgcctgcggcagcattggcctttgcagcggcggcagcagcaccaggctctgcagcggcaacccccagcggcttaagccatggcgcttctcacggcattcagcagcagcgttgctgtaaccgacaaagacaccttcgaattaagcacattcctcgattccagcaaagcaccgcaacatgaccgaaatgagcttcctgagcagcgaggtgttggtgggggacttgatgtcccccttcgaccagtcgggtttgggggctgaagaaagcctaggtctcttagatgattacctggaggtggccaagcacttcaaacctcatgggttctccagcgacaaggctaaggcgggctcctccgaatggctggctgtggatgggttggtcagtccctccaacaacagcaaggaggatgccttctccgggacagattggatgttggagaaaatggatttgaaggagttcgacttggatgccctgttgggtatagatgacctggaaaccatgccagatgaccttctgaccacgttggatgacacttgtgatctctttgcccccctagtccaggagactaataagcagcccccccagacggtgaacccaattggccatctcccagaaagtttaacaaaacccgaccaggttgcccccttcaccttcttacaacctcttcccctttccccaggggtcctgtcctccactccagatcattcctttagtttagagctgggcagtgaagtggatatcactgaaggagataggaagccagactacactgcttacgttgccatgatccctcagtgcataaaggaggaagacaccccttcagataatgatagtggcatctgtatga

SEQ ID NO: 190463 - DNA, 836 bp, Homo Sapiens
ccccagctattaaactaaagggaatgatctggagtggaggacaggacccctggggaaagggggaagaggttgtaagaaggtgaagggggcaaccctggtcgggttttgttaaactttctgggagatggccaattgggttcaccgtctgggggggctgcttattagtctcctggactagggggggcaaagagatcacaagtgtcatccaacgtggtcagaaggtcatctggcatggtttccaggtcatctatacccaacagggcatccaagtcgaactccttcaaatccattttctccaacatccaatctgtcccggagaaggcatcctccttgctgttgttggagggactgaccaacccatccacagccagccattcggaggagcccgccttagccttgtcgctggagaacccatgaggtttgaagtgcttggccacctccaggtaatcatctaagagacctaggctttcttcagcccccaaacccgactggtcgaagggggacatcaagtcccccaccaacacctcgctgctcaggaagctcatttcggtcatgttgcggtgctttgctggaatcgaggaatgtgcttaattcgaaggtgtctttgtcggttacagcaacgctgctgctgaatgccgtgagaagcgccatggcttaagccgctgggggttgccgctgcagagcctggtgctgctgccgccgctgcaaaggccaatgctgccgcaggcactgctgcccctaatacgccatggtggccgtggaccctgagggcggggaggagggaaaacgcacacgcgcagagccaacttttttgtacaaagttggcttttataagg

SEQ ID NO: 190464 - DNA, 1243 bp, Homo Sapiens; identical to SEQ ID NO: 183264

SEQ ID NO: 190465 - DNA, 1074 bp, Homo Sapiens; identical to SEQ ID NO: 179941

SEQ ID NO: 190466 - DNA, 1124 bp, Homo Sapiens; identical to SEQ ID NO: 183266

SEQ ID NO: 190467 - DNA, 1941 bp, Homo Sapiens; identical to SEQ ID NO: 183267

SEQ ID NO: 190468 - DNA, 1302 bp, Homo Sapiens; identical to SEQ ID NO: 183271
  misc_feature (645)..(666): n is a, c, g, or t

SEQ ID NO: 190469 - DNA, 888 bp, Homo Sapiens; identical to SEQ ID NO: 179943
  misc_feature (508)..(563): n is a, c, g, or t

SEQ ID NO: 190470 - DNA, 778 bp, Homo Sapiens; identical to SEQ ID NO: 183272

SEQ ID NO: 190471 - DNA, 1433 bp, Homo Sapiens; identical to SEQ ID NO: 183273

SEQ ID NO: 190472 - DNA, 2689 bp, Homo Sapiens; identical to SEQ ID NO: 183274
  misc_feature (2070)..(2093): n is a, c, g, or t

SEQ ID NO: 190473 - DNA, 338 bp, Homo Sapiens
  misc_feature (225)..(248): n is a, c, g, or t
aacccggggccagaggaagcaggacagattaggagggagccgggaggatgggctgcagctgtggaggagggtttcagaggagagaggttggagagcagaggcctgagaagccagaggcaggtggagagagggtggaaagtgagcagcgggctgggctggagccgcacacgctttcctcccatgttaaatagcacctttagaaaaattcacaagtccccatccacnnnnnnnnnnnnnnnnnnnnnnnntatctttgttaataaaaatagacccaacttttttgtacaaagttgtcctttttaggagcatgctcatcaatttgtgcaaggaacaggtca

SEQ ID NO: 190474 - DNA, 598 bp, Homo Sapiens; identical to SEQ ID NO: 183275

SEQ ID NO: 190475 - DNA, 1070 bp, Homo Sapiens; identical to SEQ ID NO: 183276

SEQ ID NO: 190476 - DNA, 665 bp, Homo Sapiens; identical to SEQ ID NO: 183277
  misc_feature (546)..(570): n is a, c, g, or t

SEQ ID NO: 190477 - DNA, 2263 bp, Homo Sapiens; identical to SEQ ID NO: 183278
  misc_feature (344)..(381): n is a, c, g, or t

SEQ ID NO: 190478 - DNA, 891 bp, Homo Sapiens; identical to SEQ ID NO: 183279
  misc_feature (529)..(566): n is a, c, g, or t

SEQ ID NO: 190479 - DNA, 775 bp, Homo Sapiens; identical to SEQ ID NO: 183280
  misc_feature (203)..(240): n is a, c, g, or t

SEQ ID NO: 190480 - DNA, 997 bp, Homo Sapiens; identical to SEQ ID NO: 183281
  misc_feature (84)..(104): n is a, c, g, or t
  misc_feature (866)..(890): n is a, c, g, or t

SEQ ID NO: 190481 - DNA, 1251 bp, Homo Sapiens
  misc_feature (136)..(175): n is a, c, g, or t
ttggcccgctgcccggacccgacaccgccaccctcgctccccgccggcagccggcagccagcggcagtggatcgaccccgttctgcggccgttgagtagttttcaattccggttgatttttgtccctctgcgcttnnnnnnnnnnnnnnnnnnnnnnnnnnnnnnnnnnnnnnnnggcactcgctctcctcctctcacggaaaggtcgcggcctgtggccctgcgggcagccgtgccgagatgaaccccagtgcccccagctaccccatggcctcgctctacgtgggggacctccaccccgacgtgaccgaggcgatgctctacgagaagttcagcccggccgggcccatcctctccatccgggtctgcagggacatgatcacccgccgctccttgggctacgcgtatgtgaacttccagcagccggcggacgcggagcgtgctttggacaccatgaattttgatgttataaagggcaagccagtacgcatcatgtggtctcagcgtgatccatcacttcgcaaaagtggagtaggcaacatattcattaaaaatctggacaaatccattgataataaagcactgtatgatacattttctgcttttggtaacatcctttcatgtaaggtggtttgtgatgaaaatggttccaagggctatggatttgtacactttgagacgcaggaagcagctgaaagagctattgaaaaaatgaatggaatgctcctaaatgatcgcaaagtatttgttggacgatttaagtctcgtaaagaacgagaagctgaacttggagctagggcaaaagaattcaccaatgtttacatcaagaattttggagaagacatggatgatgagcgccttaaggatctctttggcaagtttgggcctgccttaagtgtgaaagtaatgactgatgaaagtggaaaatccaaaggatttggatttgtaagctttgaaaggcatgaagatgcacagaaagctgtggatgagatgaacggaaaggagctcaatggaaaacaaatttatgttggtcgagctcagaaaaaggtggaacggcagacggaacttaagcgcaaatttgaacagatgaaacaagataggatcaccagataccagggtgttaatctttatgtgaaaaatcttgatgatgggtattgatgatgaacgtctccgggaaagagtattctccatttggtacaatcactactgcaaaggttatggatggaagggtggtcgcagcaaaggctttgg

SEQ ID NO: 190482 - DNA, 1577 bp, Homo Sapiens; identical to SEQ ID NO: 183282
  misc_feature (221)..(260): n is a, c, g, or t

SEQ ID NO: 190483 - DNA, 1739 bp, Homo Sapiens; identical to SEQ ID NO: 183283
  misc_feature (1342)..(1419): n is a, c, g, or t
  misc_feature (1503)..(1546): n is a, c, g, or t

SEQ ID NO: 190484 - DNA, 1563 bp, Homo Sapiens
  misc_feature (1178)..(1262): n is a, c, g, or t
  misc_feature (1336)..(1378): n is a, c, g, or t
tttgtacaaaaaagttggctcagaaaaaggttaggaacggcagacggaacttaagcgcaaatttgaacagatgaaacaagataggatcaccagataccagggtgttaatctttatgtgaaaaatcttgatgatggtattgatgatgaacgtctccggaaagagttttctccatttggtacaatcactagtgcaaaggttatgatggagggtggtcgcagcaaagggtttggttttgtatgtttctcctccccagaagaagccactaaagcagttacagaaatgaacggtagaattgtggccacaaagccattgtatgtagctttagctcagcgcaaagaagagcgccaggctcacctcactaaccagtatatgcagagaatggcaagtgtacgagctgttcccaaccctgtaatcaacccctaccagccagcacctccttcaggttacttcatggcagctatcccacagactcagaaccgtgctgcatactatcctcctagccaaattgctcaactaagaccaagtcctcgctggactgctcagggtgccagacctcatccattccaaaatatgcccggtgctatccgcccagctgctcctagaccaccatttagtactatgagaccagcttcttcacaggttccacgagtcatgtcaacacagcgtgttgctaacacatcaacacagacaatgggtccacgtcctgcagctgcagccgctgcagctactcctgctgtccgcaccgttccacagtataaatatgctgcaggagttcgcaatcctcagcaacatcttaatgcacagccacaagttacaatgcaacagcctgctgttcatgtacaaggtcaggaacctttgactgcttccatgttggcatctgcccctcctcaagagcaaaagcaaatgttgggtgaacggctgtttcctcttattcaagccatgcaccctactcttgctggtaaaatcactggcatgttgttggagattgataattcagaacttcttcatatgctcgagtctccagagtcactccgttctaaggttgatgaagctgtagctgtactacaagcccaccaagctaaagaggctgcccagaaagcagttaacagtgccaccggtgttccaactgtttaaaattgatcagggaccatgaaaagaaacttgtgcttcaccgaannnnnnnnnnnnnnnnnnnnnnnnnnnnnnnnnnnnnnnnnnnnnnnnnnnnnnnnnnnnnnnnnnnnnnnnnnnnnnnnnnnnnctttgaaccttatgtaccgagcaaatgccaggtctagcaaacataatgctagtcctagattacttattgatttnnnnnnnnnnnnnnnnnnnnnnnnnnnnnnnnnnnnnnnnnnnttaatgttttatagaccctgggaaaaagaattttcagcaaagtacaaaaatttaaagcattcctttctttaattttgtaattctttactgtggaatagctcagatgtcagttctgttttaagtaacagaattgataactgagcaaggaaacgtatttggattataaaattcttgctttaataaaa

SEQ ID NO: 190485 - DNA, 1341 bp, Homo Sapiens
gatgagcaatgcttttttataatgccaactttgtacaaaaaagttggcgcatcatgtggctcagcgtgatccatcacttcgcaaaagtggagtaggcaacatattcattaaaaatctggacaaatccattgataataaagcactgtatgatacattttctgcttttgttggcatcctttcatgtaaggtggtttgtgatgaaaatggttccaagggctatggatttgtacactttgagacgcaggaagcagctgaaagagctattgaaaaaatgaatggaatgctcctaaatgatcgcaaagtatttgttggacgatttaagtctcgtaaagaacgagaagctgaacttggagctagggcaaaagaattcaccaatgtttacatcaagaattttggagaagacatggatgatgagcgccttaaggatctctttggcaagtttgggcctgccttaagtgtgaaagtaatgactgatgaaagtggaaaatccaaaggatttggatttgtaagctttgaaaggcatgaagatgcacagaaagctgtggatgagatgaacggaaaggagctcaatggaaaacaaatttatgttggtcgagctcagaaaaaggtggaacggcagacggaacttaagcgcaaatttgaacagatgaaacaagataggatcaccagataccagggtgttaatctttatgtgaaaaatcttgatgatggtattgatgatgaacgtctccggaaagagttttctccatttggtacaatcactagtgcaaaggttatgatggagggtggtcgcagcaaagggtttggttttgtatgtttctcctccccagaagaagccactaaagcagttacagaaatgaacggtagaattgtggccacaaagccattgtatgtagctttagctcagcgcaaagaagagcgccaggctcacctcactaaccagtatatgcagagaatggcaagtgtacgagctgttcccaaccctgtaatcaacccctaccagccagcacctccttcaggttacttcatggcagctatcccacagactcagaaccgtgctgcatactatcctcctagccaaattgctcaactaagaccaagtcctcgctggactgctcagggtgccagacctcatccattccaaaatatgcccggtgctatccgcccagctgctcctagaccaccatttagtactatgagaccagcttcttcacaggttccacgagtcatgtcaacacagcgtgttgctaacacatcaacacagacaatggggtccacgtcctgcagctgcagccgctgcagctactcctgctgtccgcaccgttccacagtataaatatg

SEQ ID NO: 190486 - DNA, 1031 bp, Homo Sapiens
ccaactttgtacaaaaaagttggcccgccgctccttgggctacgcgtatgtgaacttccagcagccggcggacgcggagcgtgctttggacaccatgaattttgatgttataaagggcaagccagtacgcatcatgtggtctcagcgtgatccatcacttcgcaaaagtggagtaggcaacatattcattaaaaatctggacaaatccattgataataaagcactgtatgatacattttctgcttttggtaacatcctttcatgtaaggtggtttgtgatgaaaatggttccaagggctatggatttgtacactttgagacgcaggaagcagctgaaagagctattgaaaaaatgaatggaatgctcctaaatgatcgcaaagtatttgttggacgatttaagtctcgtaaagaacgagaagctgaacttggagctagggcaaaagaattcaccaatgtttacatcaagaattttggagaagacatggatgatgagcgccttaaggatctctttggcaagtttgggcctgccttaagtgtgaaagtaatgactgatgaaagtggaaaatccaaaggatttggatttgtaagctttgaaaggcatgaagatgcacagaaagctgtggatgagatgaacggaaaggagctcaatggaaaacaaatttatgttggtcgagctcagaaaaaggtggaacggcagacggaacttaagcgcaaatttgaacagatgaaacaagataggatcaccagataccagggtgttaatctttatgtgaaaaatcttgatgatggtattgatgatgaacgtctccggaaagagttttctccatttggtacaatcactagtgcaaaggttatgatggagggtggtcgcagcaaagggtttggttttgtatgtttctcctccccagaagaagccactaaagcagttacagaaatgaacggtagaattgtggccacaaagccattgtatgtagctttagctcagcgcaaagaagagcgccaggctcacttcactaaccagtatatgc

SEQ ID NO: 190487 - DNA, 1615 bp, Homo Sapiens; identical to SEQ ID NO: 183284
  misc_feature (249)..(306): n is a, c, g, or t

SEQ ID NO: 190488 - DNA, 1163 bp, Homo Sapiens
agcaatgcttttccataatagccaactttgtacaaaaaagttggctttatgtgaaaaatcttgatgatggtattgatgatgaacgtctccggaaagagttttctccatttggtacaatcactagtgcaaaggttatgatggagggtggtcgcagcaaagggtttggttttgtatgtttctcctccccagaagaagccactaaagcagttacagaaatgaacggtagaattgtggccacaaagccattgtatgtagctttagctcagcgcaaagaagagcgccaggctcacctcactaaccagtatatgcagagaatggcaagtgtacgagctgttcccaaccctgtaatcaacccctaccagccagcacctccttcaggttacttcatggcagctatcccacagactcagaaccgtgctgcatactatcctcctagccaaattgctcaactaagaccaagtcctcgctggactgctcagggtgccagacctcatccattccaaaatatgcccggtgctatccgcccagctgctcctagaccaccatttagtactatgagaccagcttcttcacaggttccacgagtcatgtcaacacagcgtgttgctaacacatcaacacagacaatgggtccacgtcctgcagctgcagccgctgcagctactcctgctgtccgcaccgttccacagtataaatatgctgcaggagttcgcaatcctcagcaacatcttaatgcacagccacaagttacaatgcaacagcctgctgttcatgtacaaggtcaggaacctttgactgcttccatgttggcatctgcccctcctcaagagcaaaagcaaatgttgggtgaacggctgtttcctcttattcaagccatgcaccctactcttgctggtaaaatcactggcatgttgttggagattgataattcagaacttcttcatatgctcgagtctccagagtcactccgttctaaggttgatgaagctgtagctgtactacaagcccaccaagctaaagaggctgcccagaaagcagttaacagtgccaccggtgttccaactgtttaaaattgatcagggaccatgaaaagaaacttgtgcttcaccgaagaaaaatatctaaacatcgaaaaacttaaatattatgggaaaaaaacattg

SEQ ID NO: 190489 - DNA, 713 bp, Homo Sapiens
tttgtacaaaaaagttggcttcttcacaggtttcaacagtcatgtcaacacagcgtgttgctaacacatcaacacagacaatgggtccacgtcctgcagctgcagccgctgcagctactcctgctgtccgcaccgttccacagtataaatatgctgcaggagttcgcaatcctcagcaacatcttaatgcacagccacaagttacaatgcaacagcctgctgttcatgtacaaggtcaggaacctttgactgcttccatgttggcatctgcccctcctcaagagcaaaagcaaatgttgggtgaacggctgtttcctcttattcaagccatgcaccctactcttgctggtaaaatcactggcatgttgttggagattgataattcagaacttcttcatatgctcgagtctccagagtcactccgttctaaggttgatgaagctgtagctgtactacaagcccaccaagctaaagaggctgcccagaaagcagttaacagtgctaccggtgttccaactgtttaaaattgatcagggaccatgaaaagaaacttgtgcttcaccgaagaaaaatatctaaacatcgaaaaacttaaatattatggaacaagaacattgcaaactataaaataaataaaaaaaggaaaggaaactttgaaccttatgtaccgagcaaatgccatgtctagcaaacataatgctagtcctagatta

SEQ ID NO: 190490 - DNA, 1712 bp, Homo Sapiens; identical to SEQ ID NO: 183285
  misc_feature (1470)..(1484): n is a, c, g, or t

SEQ ID NO: 190491 - DNA, 1754 bp, Homo Sapiens; identical to SEQ ID NO: 183286
  misc_feature (263)..(296): n is a, c, g, or t
  misc_feature (314)..(370): n is a, c, g, or t
  misc_feature (384)..(562): n is a, c, g, or t
  misc_feature (1076)..(1089): n is a, c, g, or t

SEQ ID NO: 190492 - DNA, 1498 bp, Homo Sapiens; identical to SEQ ID NO: 183288
  misc_feature (46)..(55): n is a, c, g, or t
  misc_feature (322)..(362): n is a, c, g, or t
  misc_feature (1297)..(1310): n is a, c, g, or t
  misc_feature (1346)..(1354): n is a, c, g, or t

SEQ ID NO: 190493 - DNA, 1018 bp, Homo Sapiens
ttggattgctctggtattcatgccaaagacacaccagccctcagtcactgggagaagaacctctcataccctcggtgctccagtccccagctcactcagccacatacaccatgtgtgaagaggagaccaccgcgctcgtgtgtgacaatggctctggcctgtgcaaggcaggcttcgcaggagatgatgccccccgggctgtcttcccctccattgtgggccgccctcgccaccagggtgtgatggtgggaatgggccagaaagacagctatgtgggggatgaggctcagagcaagcgagggatcctaactctcaaataccccattgaacacggcatcatcaccaactgggatgacatggagaagatctggcaccactccttctacaatgagctgcgtgtagcacctgaagagcaccccaccctgctcacagaggctcccctaaatcccaaggccaacagggagaagatgacccagatcatgtttgaaaccttcaatgtccctgccatgtacgtcgccattcaagctgtgctctccctctatgcctctggccgcacgacaggcatcgtcctggattcaggtgatggcgtcacccacaatgtccccatctatgaaggctatgccctgccccatgccatcatgcgcctggacttggctggccgtgacctcacggactacctcatgaagatcctcacagagagaggctattcctttgtgaccacagctgagagagaaattgtgcgagacatcaaggagaagctgtgctatgtggccctggattttgagaatgagatggccacagcagcttcctcttcctccctggagaagagctatgagctgccagatgggcaggttatcaccattggcaatgagcgcttccgctgccctgagaccctcttccagccttcctttattggcatggagtccgctggaattcatgagacacctacaattccatcatgaagtgtggacattgacttccgtaaggacttatatgccacaatggtctctctgggggc

SEQ ID NO: 190494 - DNA, 372 bp, Homo Sapiens
  misc_feature (170)..(216): n is a, c, g, or t
  misc_feature (235)..(261): n is a, c, g, or t
ctttgtacaaaaaagttgggtcattccaaatctgagatgcattgttacaggaagtcccttgccatcctaaaagccaccccacttctctctaaggagaatggcccagtcctctcccaagtccacacaggggaggtgatagcattgctttcgtgtaaattatgtaatgcaannnnnnnnnnnnnnnnnnnnnnnnnnnnnnnnnnnnnnnnnnnnnnngaatgatgagccttcgtgnnnnnnnnnnnnnnnnnnnnnnnnnnnaacttgagatgtatgaaggcttttggtctccctgggagtgggtggaggcagccagggcttacctgtacactgacttgagaccagttgaataaaagtgcacaccttaccaac

SEQ ID NO: 190495 - DNA, 1559 bp, Homo Sapiens
actttgtacaaaaaagttggtgccggctctcgcactctgttcttccgccgctccgccgtcgcgtttctctgccggtcgcaatggaagaagagatcgccgcgctggtcattgacaatggctccggcatgtgcaaagctggttttgctggggacgacgctccccgagccgtgtttccttccatcgtcgggcgccccagacaccagggcgtcatggtgggcatgggccagaaggactcctacgtgggcgacgaggcccagagcaagcgtggcatcctgaccctgaagtaccccattgagcatggcatcgtcaccaactgggacgacatggagaagatctggcaccacaccttctacaacgagctgcgcgtggccccggaggagcacccagtgctgctgaccgaggcccccctgaaccccaaggccaacagagagaagatgactcagattatgtttgagaccttcaacaccccggccatgtacgtggccatccaggccgtgctgtccctctacgcctctgggcgcaccactggcattgtcatggactctggagacggggtcacccacacggtgcccatctacgagggctacgccctcccccacgccatcctgcgtctggacctggctggccgggacctgaccgactacctcatgaagatcctcactgagcgaggctacagcttcaccaccacggccgagcgggaaatcgtgcgcgacatcaaggagaagctgtgctacgtcgccctggacttcgagcaggagatggccaccgccgcatcctcctcttctctggagaagagctacgagctgcccgatggccaggtcatcaccattggcaatgagcggttccggtgtccggaggcgctgttccagccttccttcctgggtatggaatcttgcggcatccacgagaccaccttcaactccatcatgaagtgtgacgtggacatccgcaaagacctgtacgccaacacggtgctgtcgggcggcaccaccatgtacccgggcattgccgacaggatgcagaaggagatcaccgccctggcgcccagcaccatgaagatcaagatcatcgcacccccagagcgcaagtactcggtgtggatcggtggctccatcctggcctcactgtccaccttccagcagatgtggattagcaagcaggagtacgacgagtcgggcccctccatcgtccaccgcaaatgcttctaaacggactcagcagatgcgtagcatttgctgcatgggttaattgagaatagaaatttgcccctggcaaatgcacacacctcatgctagcctcacgaaactggaataagccttcgaaaagaaattgtccttgaagcttgtatctgatatcagcactggattgtagaacttgttgctgattttgaccttgtattcaagttaactgttccccttggtattaacatgtcagggctgagtgttctgggatttctctagaggctggcaagaaccagttgtttttgtcttgcgggtctgtcaggtttggaaagtccaagccgtagaacccagtttcctttcttagctgatgtctttggg

SEQ ID NO: 190496 - DNA, 792 bp, Homo Sapiens
taatagccaactttgtacaaaaaagttggcgacgagtcgggcccctccatcgtccaccgcaaatgcttctaaacggactcagcagatgcgtagcatttgctgcatgggttaattgagaatagaaatttgcccctggcaaatgcacacacctcatgctagcctcacgaaactggaataagccttcgaaaagaaattgtccttgaagcttgtatctgatatcagcactggattgtagaacttgttgctgattttgaccttgtattgaagttaactgttccccttggtatttgtttaataccctgtacatatctttgagttcaacctttagtacgtgtggcttggtcacttcgtggctaaggtaagaacgtgcttgtggaagacaagtctgtggcttggtgagtctgtgtggccagcagcctctgatctgtgcagggtattaacgtgtcagggctgagtgttctgggatttctctagaggctggcaagaaccagttgttttgtcttgcgggtctgtcagggttggaaagtccaagccgtaggacccagtttcctttcttagctgatgtctttggccagaacaccgtgggctgttacttgctttgagttggaagcggtttgcatttacgcctgtaaatgtattcattcttaatttatgtaaggttttttttgtacgcaattctcgattctttgaagagatgacaacaaattttggttttctactgttatgtgagaacattaggccccagcaacacgtcattgtgtaaggaaaaataaaagtgctgccgtaacccaa

SEQ ID NO: 190497 - DNA, 1788 bp, Homo Sapiens; identical to SEQ ID NO: 183289
  misc_feature (106)..(132): n is a, c, g, or t
  misc_feature (151)..(197): n is a, c, g, or t
  misc_feature (469)..(508): n is a, c, g, or t

SEQ ID NO: 190498 - DNA, 480 bp, Homo Sapiens
  misc_feature (107)..(133): n is a, c, g, or t
  misc_feature (152)..(198): n is a, c, g, or t
taaggtgtgcacttttattcaactggtctcaagtcagtgtacaggtaagccctggctgcctccacccactcccagggagaccaaaagccttcatacatctcaagttnnnnnnnnnnnnnnnnnnnnnnnnnnncacgaaggctcatcattcnnnnnnnnnnnnnnnnnnnnnnnnnnnnnnnnnnnnnnnnnnnnnnnttgcattacataatttacacgaaagcaatgctatcacctcccctgtgtggacttgggagaggactgggccattctccttagagagaagtggggtggcttttaggatggcaagggacttcctgtaacaacgcatctcatatttggaatgactattaaaaaaacaacaatgtgcaatcaaagtcctcggccacattgtgaactttgggggatgctcgctccaaccgactgctgtcaccttcaccgttccagtttttaaatcctgccaacttttttgtacaaagt

SEQ ID NO: 190499 - DNA, 1239 bp, Homo Sapiens
  misc_feature (200)..(234): n is a, c, g, or t
ttggcgctgccaactctcgcactctgttcttccgccgctccgccgtcgcgtttctctgccggtgagcgccccgccccggggcctgagctggacgtcgcaggcctgcgccccccgaccccggctggccccgcttccagctgccgaggcctcgtcgcgccttccccgggaacaaaaggcggggtgggccgggtcaggcggannnnnnnnnnnnnnnnnnnnnnnnnnnnnnnnnnncccggccgcagtgcagacttccgagccgtggacgttacgtaaaaggcccggccttcggttccaggcggttgcgatcttggaggccacggccgctggggttggggcagggccgaggctgccccgcgggagggcattaggtggctgtggggaggggaccgtgttacagacgcgcccgcctgagtccatccttttccgggcaggtcgcaatggaagaagagatcgccgcgctggtcattgacaatggctccggcatgtgcaaagctggttttgctggggacgacgctccccgagccgtgtttccttccatcgtcgggcgccccagacaccaggtgagtggatggcgccgcggggctcctgggttctgcgttgcggggtgggttcggtgtcgccggcgaggctgacgggtcgtcccctgcagggcgtcatggtgggcatgggccagaaggactcctacgtgggcgacgaggcccagagcaagcgtggcatcctgaccctgaagtaccccattgagcatggcatcgtcaccaactgggacgacatggagaagatctggcaccacaccttctacaacgagctgcgcgtggccccggaggagcacccagtgctgctgaccgaggcccccctgaaccccaaggccaacagagagaagatgactcagattatgtttgagaccttcaacaccccggccatgtacgtggccatccaggccgtgctgtccctctacgcctctgggcgcaccactggcattgtcatggactctggagacggggtcacccacacggtgcccatctacgagggctacgccctcccccacgccatcctgcgtctggacctggctggccgggacctgaccgactacctcatgaagatcctcactgagcgaggctacagcttcaccaccacggccgagcgggaaatcgtgcgcgacatcaagggagaaagctgtgctacgtcgctctgggactttcgagcaggagatgggccaccgccgcatcctcctcttct

SEQ ID NO: 190500 - DNA, 1364 bp, Homo Sapiens
  misc_feature (284)..(324): n is a, c, g, or t
gatttaaaaaattttgcattacataattacacgaaagcaatgctatcacctcccctgtgtggacttgggagaggactgggccattctccttagagagaagtggggtggcttttaggatggcaagggacttcctgtaacaacgcatttcatatttggaatgactattaaaaaaacaacaatgtgcaatcaaagtcctgggccacattgtgaactttgggggatgctcgctccaaccgactgctgtcaccttcaccgttccagtttttaaatcctgagtcaagccnnnnnnnnnnnnnnnnnnnnnnnnnnnnnnnnnnnnnnnnntaaagccatgccaatctcatcttgttttctgcgcaagttaggttttgtcaagaaagggtgtaacgcaactaagtcatagtccgcctagaagcatttgcggtggacgatggaggggccggactcgtcatactcctgcttgctgatccacatctgctggaaggtggacagcgaggccaggatggagccgccgatccacacggagtacttgcgctcaggaggagcaatgatcttgatcttcattgtgctgggtgccagggcagtgatctccttctgcatcctgtcggcaatgccagggtacatggtggtgccgccagacagcactgtgttggcgtacaggtctttgcggatgtccacgtcacacttcatgatggagttgaaggtagtttcgtggatgccacaggattccatgcccaggaaggaaggctggaagagtgcctcagggcaccggaaccgctcattgccaatggtgatgacctggccatcgggcagctgcgtagctcttatccagagaagaggaggatgcggcggtggccatctcctgctcgaagtccagggcgacgtagcacagcttctccttgatgtcgcgcacgatttcccgctcggccgtggtggtgaagctgtagcctcgctcagtgaggatcttcatgaggtagtcggtcaggtcccggccagccaggtccagacgcaggatggcgtgggggagggcgtagccctcgtagatgggcaccgtgtgggtgaccccgtctccagagtccatgacaatgccagtggtgcgcccagaggcgtagagggacagcacggcctggatggccacgtacatggccggggtgttgaaggtctcaaacataatgtgagtcatattctctctgtgggcctcggggttcaggggggcctcggtcagcagcattgggtgctcctccggggccacgcgcagctcgttgtagaaggtgtggtgccagatcttctccatgtcgtcccagttggtgacgatgccatgctcaatggggtacttcagggtcagccaacttttttgtacaaag

SEQ ID NO: 190501 - DNA, 668 bp, Homo Sapiens
  misc_feature (359)..(399): n is a, c, g, or t
ttgggtggacatccgcaaagacctgtacgccaacacagtgctgtctggcggcaccaccatgtaccctggcattgccgacaggatgcagaaggagatcactgccctggcacccagcacaatgaagatcaagatcattgctcctcctgagcgcaagtactccgtgtggatcggcggctccatcctggcctcgctgtccaccttccagcagatgtggatcagcaagcaggagtatgacgagtccggcccctccatcgtccaccgcaaatgcttctaggcggactatgacttagttgcgttacaccctttcttgacaaaacctaacttgcgcagaaaacaagatgagattggcatggctttannnnnnnnnnnnnnnnnnnnnnnnnnnnnnnnnnnnnnnnnggcttgactcaggatttaaaaactggaacggtgaaggtgacagcagtcggttggagcgagcatcccccaaagttcacaatgtggccgaagactttgattgcacattgttgtttttttaataatcattccaaatatgaaatgcgttgttacaggaagtcccttgccatcctaaaagccaccccacttctctctaaggagaatggcccagtcctctcccaagtccacacaggggaggtgatagcattgctttcgtgtaaattatgtaatgc

SEQ ID NO: 190502 - DNA, 1394 bp, Homo Sapiens; identical to SEQ ID NO: 183290
  misc_feature (271)..(314): n is a, c, g, or t

SEQ ID NO: 190503 - DNA, 863 bp, Homo Sapiens
  misc_feature (571)..(584): n is a, c, g, or t
ttggtgtccttaaacttccaatcttactttgtctcttggagattgttgaacgcagcttgtctaggaaggggatgggactagattctaaaatttatttgggaccatgggaatgatagttgggaagaaaactatttgcacacgacagatttctagatactttttgctgctagttttatgtaatatttattgaacattttgacaaatatttatttttgtaagcctaaaagtgattctttgaaagtttaaagaaacttgaccaaaagacagtacaaaaacactggcacttgaatgttgaatgtcaccgtatgcgtgaaattatatatttcggggtagtgtgagcttttaatgtttaagtcatattaaactcttaagtcaaattaagcagacccggcgttggcagtgtagccataactttctgatgttagtaaaaacaaaattggcgacttgaaattaaatcatgccaaggttttgatacacttgtcttaagatattaatgaaacacttcaaaacactgatgtgaagtgtccagattctcagatgtttgttgtgtggattttgtttaattgtgtgnnnnnnnnnnnnnncagtgaatgtctggcacattgcaatcctcaaacatgtggttatctttgttgtattggcataatcagtgacttgtacattcagcaatagcatttgagcaaagttttatcagcaagcaatattttcagttaataaggtttcaaaaatcatgtaaggatttaaacttgctgagtgtaaagattgaacctcaagtcactgcagctttagtaattgcttattgtattagtttagatgctagcactgcatgtgctgtgcatattctgattttattaaaataaaaa

SEQ ID NO: 190504 - DNA, 1160 bp, Homo Sapiens; identical to SEQ ID NO: 179948

SEQ ID NO: 190505 - DNA, 1994 bp, Homo Sapiens; identical to SEQ ID NO: 183298
  misc_feature (1810)..(1823): n is a, c, g, or t

SEQ ID NO: 190506 - DNA, 2109 bp, Homo Sapiens; identical to SEQ ID NO: 183299
  misc_feature (1900)..(1909): n is a, c, g, or t

SEQ ID NO: 190507 - DNA, 1092 bp, Homo Sapiens; identical to SEQ ID NO: 183300

SEQ ID NO: 190508 - DNA, 886 bp, Homo Sapiens
  misc_feature (724)..(736): n is a, c, g, or t
ctttgtacaaaaaagttgggacagtattgaggtcatttgttatggtgctatttcaattagtctaggtttaggcccttgtacattttgcccataactttttacaaagtacttcttttattgcacattcagagaattttatatatatgtcttgtgtgcgtgtccttaaacttccaatcttactttgtctcttggagattgttgaacgcagcttgtctaggaaggggatgggactagattctaaaatttatttgggaccatgggaatgatagttgggaagaaaactatttgcacacgacagatttctagatactttttgctgctagttttatgtaatatttattgaacattttgacaaatatttatttttgtaagcctaaaagtgattctttgaaagtttaaagaaacttgaccaaaagacagtacaaaaacactggcacttgaatgttgaatgtcaccgtatgcgtgaaattatatatttcggggtagtgtgagcttttaatgtttaagtcatattaaactcttaagtcaaattaagcagacccggcgttggcagtgtagccataactttctgatgttagtaaaaacaaaattggcgacttgaaattaaatcatgccaaggttttgatacacttgtcttaagatattaatgaaacacttcaaaacactgatgtgaagtgtccagattctcagatgtttgttgtgtggattttgtttagttgtgtgnnnnnnnnnnnnncagcgaatgtctggcacattgcaatcctcaaacatgtggttatctttgttgtattggcataatcagtgacttgtacattcagcaatagcatttgagcaagttttatcagcaagccatattttcagttaatacggtttcaaaaatcatgta

SEQ ID NO: 190509 - DNA, 982 bp, Homo Sapiens
  misc_feature (773)..(781): n is a, c, g, or t
aactttgtacaaaaaagttggccagtttttatattgacctgcagtgtaaaaagcacatttaattataaacaatatattcaaaatgggcaaattttattttcaaatgcagtgtagagctagattaaaagcaactctttgccacctactctgcccttttggcaaagttaccttgaacaaagaatcttaagggtttattaagaactctttattttcttcataccctgttctctgcagtgctttctaacagcttctgggtgcagattttcttcggcatccttttgcactcagcttattacaggtaggtagtgcttaagaaaagtcatggaggactaaagcctaagtccttttcacttttcctccatctgaaggtaggtgagttcatcctcttcatagtaatgctgttttaccaagactttatagcagatggacccagaaagaattttctgctattgtgttcactacaacaggatagggacatcagacagccccagaaaccccttccagatctgatatgggactattaatttttatgctgttaattggtattcattcacaatgcagttgaagggggaaggctccactgcattctttggctaaggcctgaatgcttgctcatctgtaagatctatactcgaggttttgttttccttttaaaattctttaaggagagagggatggtttctgaggggttctgaaagtatgattcaatgtgcaacatacaggtaggtcttcagcataagctgaaatatatgcatgtaaaaactttgacatcnnnnnnnnnaattttccactttcttcttaactttacttctctttttgtccccccccatcttacagaagttgaggccaagggagaatggtagcacagagaaacatggcaaactgctctgtgctttcaaaccaaagtgttccccccaaccccaatttgtctaagcactggccagtctgttgtgggcaatgttttctacaaccaaattctggg

SEQ ID NO: 190510 - DNA, 1727 bp, Homo Sapiens; identical to SEQ ID NO: 183301
  misc_feature (112)..(132): n is a, c, g, or t
  misc_feature (1508)..(1516): n is a, c, g, or t
  misc_feature (1556)..(1564): n is a, c, g, or t

SEQ ID NO: 190511 - DNA, 1098 bp, Homo Sapiens
actttgtacaaaaaagttggattggttttatttcccttcacactctgcctccccacttctccccccgttactgaaaaataaccattttagtgtcaggctagaaattgaattgctgagttttgtgtatcctttaaattaaaaaccacaagtgtttattgtagtggttaaactgtagcatctcagcatctgggtggaagctgcctatatttcttcccagtttaactggggaccatctgtgaaattaattttccatccagacagctgctgtgagcaaatgaacataaatgctcgctggaaatttactaaccagtttttatattgacctgcagtgtaaaaagcacatttaattataaacaatatattcaaaatgggcaaattttattttcaaatgcagtgtagagctagattaaaagcaactctttgccacctactctgcccttttggcaaagttaccttgaacaaagaatcttaagggtttattaagaactctttattttcttcataccctgttctctgcagtgctttctaacagcttctgggtgcagattttcttcggcatccttttgcactcagcttattacaggtaggtagtgcttaagaaaagtcatggaggactaaagcctaagtccttttcacttttcctccatctgaaggtaggtgagttcatcctcttcatagtaatgctgttttaccaagactttatagcagatggacccagaaagaattttctgctattgtgttcactacaacaggatagggacatcagacagccccagaaaccccttccagatctgatatgggactattaatttttatgctgttaattggtattcattcacaatgcagttgaagggggaaggctccactgcattctttggctaaggcctgaatgcttgctcatctgtaagatctatactcgaggttttgttttccttttaaaattctttagggagagagggatggtttctgaggggttctgaaagtatgattcaatgtgcaacatacaggtaggtcttcagcataagctgaaatatatgcatgtaaaactttgacatcttttttttaatttccactttctctaactttacttctcttttg

SEQ ID NO: 190512 - DNA, 1025 bp, Homo Sapiens
  misc_feature (151)..(208): n is a, c, g, or t
  misc_feature (211)..(219): n is a, c, g, or t
cattaaagaacaactttgtacaaaaaattgggttttccttttaaaattctttagggagagagggatggtttctgaggggttctgaaagtatgattcaatgtgcaacatacaggtaggtcttcagcataagctgaaatatatgcatgtaaannnnnnnnnnnnnnnnnnnnnnnnnnnnnnnnnnnnnnnnnnnnnnnnnnnnnnnnnngtnnnnnnnnnatcttacagaagttgaggccaagggagaatggtaggcacagaagaaacatggcaaactgctctgtgctttcaaaccaaagtgttccccccaaccccaaatttgtctaagcactggccagtctgttgtgggcattgttttctacaaccaaattctgggtttttttcttctttctttaaacatagaggtaccaccacaagggatgccctactctctcgcagctcttgaaagcatctgtttgagggaaaggtctctgggcaagcaagtggttatttggattgcttgcttccctttttccacctgggacattgtaatcataaaataacagtaaattccaaacctcaaaaactattatggcctgagcacagctgaaatctagcagagtttaactcttctgcctccatgtctgtcacttataattcaggttctgctgttggcttcagaacatgagcagaagaatcgttttatgctagttattgcattcatggttgaaactcaacttagggaaagggttccaatgtattaagcaatgggctgcttctccccaatcctccctaacaattcgttgtgtggacttctcatctaaaaggttagtggcttttgcttgggatcagtgctctctattgatgttcttgctggtctccagacacattcctgttgcattaagacttgaaagacttgtagatgtgtgatgttcaggcacaggatgctgaaagctatgttactattcttagtttgtaaattgtccttttgataccatcatcttgttttctttttgtaggtataaataaaaacactgttgacaata

SEQ ID NO: 190513 - DNA, 1137 bp, Homo Sapiens
ctttgtacaaaaaagttggaactgtagcatcctcagcatctgggtggaagctgcctatatttcttcccagtttaactggggaccatctgtgaaattaattttccatccagacagctgctgtgagcaaatgaacataaatgctcgctggaaatttactaaccagtttttatattgacctgcagtgtaaaaagcacatttaattataaacaatatattcaaaatgggcaaattttattttcaaatgcagtgtagagctagattaaaagcaactctttgccacctactctgcccttttggcaaagttaccttgaacaaagaatcttaagggtttattaagaactctttattttcttcataccctgttctctgcagtgctttctaacagcttctgggtgcagattttcttcggcatccttttgcactcagcttattacaggtaggtagtgcttaagaaaagtcatggaggactaaagcctaagtccttttcacttttcctccatctgaaggtaggtgagttcatcctcttcatagtaatgctgttttaccaagactttatagcagatggacccagaaagaattttctgctattgtgttcactacaacaggatagggacatcagacagccccagaaaccccttccagatctgatatgggactattaatttttatgctgttaattggtattcattcacaatgcagttgaagggggaaggctccactgcattctttggctaaggcctgaatgcttgctcatctgtaagatctatactcgaggttttgttttccttttaaaattctttagggagagagggatggtttctgaggggttctgaaagtatgattcaatgtgcaacatacaggtaggtcttcagcataagctgaaatatatgcatgtaaaaactttgacatctcattttttaattttccactttcttcttaactttacttctctttttgtccccccccatcttacagaagttgaggcccagggagaatggtaggcacagaagaaacatggcaaactgctctgtgctttcaaaccaaagtgttccccccaccccaaatttgtctaagcactggccagtctgttgtgggcattgttttctacaaccaaatctgggttttttttcttctttc

SEQ ID NO: 190514 - DNA, 3487 bp, Homo Sapiens; identical to SEQ ID NO: 183303
  misc_feature (218)..(247): n is a, c, g, or t
  misc_feature (3236)..(3292): n is a, c, g, or t
  misc_feature (3319)..(3332): n is a, c, g, or t

SEQ ID NO: 190515 - DNA, 549 bp, Homo Sapiens
aactttgtacaaaaaagttggccacagcttgcctactctcggcctagaagcagttattctctctccatattgggctttgatttgtgctgagggtcagcttttggctccttcttcctgagacagtggaaacaatgccagctctgtggcttctgccctggggatgggccgggttggggggtgggttggtgaggctttggatgccactgcctgtgggttgctggcttaaaggacaattctcttcattggtgagagcccaggccattaacacctacacagtgttattgaaagaagagaggtgggggtggaggggaattagtctgtcccagctagagggagataaagagggctagttagttcttggagcagctgcttttgaggagaaaatatatagctttggacacgaggaagatctagaaaattatcattgaacatattaatggttatttctttttcttggatttccagaaaagcctcttaattttatgctttctcatcgaagtaatgtaccctttttttctgaaactgaattaaatactctttttatctttg

SEQ ID NO: 190516 - DNA, 1345 bp, Homo Sapiens
  misc_feature (74)..(88): n is a, c, g, or t
  misc_feature (798)..(807): n is a, c, g, or t
  misc_feature (1182)..(1193): n is a, c, g, or t
ttggctccaggaggctgccagcccctcctcttatttaattctgagttttgggggccagcctagagggaattccnnnnnnnnnnnnnnnaaccccccaggggggtagttgggagtgagactataggccataaagaatgggactgcattggaccaaaataaatgggaaaatcgtggtttgaaaagaagcttttgggaagtgatgagtcattttgcaccaggtaataggggaaaattgtgtgacctccagcaaacacatgaatggttatttcctggagccggaagcacttgggggtcgtggtaattcccagtgttttctgtgtcctagttttaccctttctaaacactgtcctttttgaaagttttgaatatatccacattctattgaaaccttgaaactaaaaatttagactcttatcgtcatcttaagttcttcatgctactcttaacctcccaaaaagcagtatctaagtcacatacatgatgtcttgggcattttctgagccatggagaactctgaaaggaagaatcgctgcttttctcaagcaaatcggtttcttgatgtcttttggttctccttgcctgctcctgatgcttggaccccttttattgatcagagtgctctagaataatggatggtcttggatgatggataaatagggacagggacagttaaattgggagcctttcttacaaccttgatgggatttttccccccaagtttccttctccactgaaatgccacactaatgcttgttggattcatgaggtggccagaccaatgtgttgttttgttgttgnnnnnnnnnnaagcttcccttgagagaataaatggtaatggagagaactatttaacaaggtcctggtttctcttgcaacacagtagctaaacttgcctgcttttatatgcatttttgtagggatcagcttggtagacagtattagcggagaaacaccttgatcttggtttgcaagcccttctcccatcagtcctagattaggccctgttcagccatgcaggggtgttggtttatgcgtgctgcagcagtgggcataatgaatataatttacccagtggacaaaggtgtgtaccaagtgaatttaaataattggtgtggattggccagtagctaagtgggcttttaaagagtattgaagattgaaagggtttttctttcttttttnnnnnnnnnnnncaaactattgattgtagataatgaaaagctagggtttgccctcttcatgtctactctccttccaaatagttatatccaaaactgtttttccctctcccctaccttgtcccccctattaaaatagaaacagggattgattaatgtcccgctcc

SEQ ID NO: 190517 - DNA, 927 bp, Homo Sapiens
  misc_feature (229)..(239): n is a, c, g, or t
ttggccttgcctgctcctgatgcttggaccccttttattgatcagagtgctctagaataatggatggtcttggatgatggataaatagggacagggacagttaaattgggagcctttcttacaaccttgatgggatttttccccccaagtttccttctccactgaaatgccacactaatgcttgttggattcatgaggtggccagaccaatgtgttgttttgttgttgnnnnnnnnnnnaagcttcccttgagagaataaatggtaatggagagaactatttaacaaggtcctggtttctcttgcaacacagtagctaaacttgcctgcttttatatgcatttttgtagggatcagcttggtagacagtattagcggagaaacaccttgatcttggtttgcaagcccttctcccatcagtcctagattaggccctgttcagccatgcaggggtgttggtttatgcgtgctgcagcagtgggcataatgaatataatttacccagtggacaaaggtgtgtaccaagtgaatttaaataattggtgtggattggccagtagctaagtgggcttttaaagagtattgaagattgaaagggtttttctttcttttttaaaaaagaaaaacaaactattgattgtagataatgaaaagctagggtttgccctcttcatgtctactctccttccaaatagttatatccaaaactgtttttccctctcccctaccttgtcccccctattaaaatagaaacagggattgattaatgtcccgctcctgaatacatgtaaaatttgtacaaaatatcttctatgaaaatgatttgtaatctgtagacttattacctgggagatgtcttgatgtaaaatcccatcctttgggttgtgggttttttgttttctccaaataaatctgatctttaaagttc

SEQ ID NO: 190518 - DNA, 2407 bp, Homo Sapiens; identical to SEQ ID NO: 183305
  misc_feature (2250)..(2264): n is a, c, g, or t

SEQ ID NO: 190519 - DNA, 1152 bp, Homo Sapiens
  misc_feature (45)..(59): n is a, c, g, or t
  misc_feature (769)..(778): n is a, c, g, or t
cttatttaattctgagttttgggggccagcctagagggaattccnnnnnnnnnnnnnnnaaccccccaggggggtagttgggagtgagactataggccataaagaatgggactgcattggaccaaaataaatgggaaaatcgtggtttgaaaagaagcttttgggaagtgatgagtcattttgcaccaggtaataggggaaaattgtgtgacctccagcaaacacatgaatggttatttcctggagccggaagcacttgggggtcgtggtaattcccagtgttttctgtgtcctagttttaccctttctaaacactgtcctttttgaaagttttgaatatatccacattctattgaaaccttgaaactaaaaatttagactcttatcgtcatcttaagttcttcatgctactcttaacctcccaaaaagcagtatctaagtcacatacatgatgtcttgggcattttctgagccatggagaactctgaaaggaagaatcgctgcttttctcaagcaaatcggtttcttgatgtcttttggttctccttgcctgctcctgatgcttggaccccttttattgatcagagtgctctagaataatggatggtcttggatgatggataaatagggacagggacagttaaattgggagcctttcttacaaccttgatgggatttttccccccaagtttccttctccactgaaatgccacactaatgcttgttggattcatgaggtggccagaccaatgtgttgttttgttgttgnnnnnnnnnnaagcttcccttgagagaataaatggtaatggagagaactatttaacaaggtcctggtttctcttgcaacacagtagctaaacttgcctgcttttatatgcatttttgtagggatcagcttggtagacagtattagcggagaaacaccttgatcttggtttgcaagcccttctcccatcagtcctagattaggccctgttcagccatgcaggggtgttggtttatgcgtgctgcagcagtgggcataatgaatataatttacccagtggacaaaggtgtgtaccaagtgaatttaaataattggtgtggattggccagtagctaagtgggcttttaaagagtattgaagattgaaagggtttttctttctttttt

SEQ ID NO: 190520 - DNA, 930 bp, Homo Sapiens; identical to SEQ ID NO: 183307

SEQ ID NO: 190521 - DNA, 1009 bp, Homo Sapiens
  misc_feature (896)..(904): n is a, c, g, or t
ctttgtacaaaaaagttggcgtatttgctgttggcacacggaaagccttggtgcgactacagaaagagatgcaggatttgagtgagttttgtagtgataaacctaagtctggagcaaagtatggactgccggactctttggccatcctgtcagagatgggagaagtcacagacggaatgatggatacaaagatggttcactttcttacacactatgctgacaagattgaatctgttcatttttcagaccagttctctggtccaaaaattatgcaagaggaaggtcagcctttaaagctacctgacactaagaggacactgttgtttacatttaatgtgcctggctcaggtaacacttacccaaaggatatggaggcactgctacccctgatgaacatggtgatttattctattgataaagccaaaaagttccgactcaacagagaaggcaaacaaaaagcagataagaaccgtgcccgagtagaagagaacttcttgaaactgacacatgtgcaaagacaggaagcagcacagtctcggcgggaggagaaaaaaagagcagagaaggagcgaatcatgaatgaggaagatcctgagaaacagcgcaggctggaggaggctgcattgaggcgtgagcaaaagaagttggaaaagaagcaaatgaaaatgaaacaaatcaagtgaaagccatgtaaagccctcccagagatttgagttctgatgccacctgtaagctctgaattcacaggaaacatgaaaaacgccagtccatttctcaaccttaaatttcagacagtcttgggcaactgagaaatccttatttcatcatctactctgtttggggtttggggttttacagagattgaagatacctggaaagggctctgtttcaagaannnnnnnnnccagataatcaaattattttgattattttataaaaggaatgatctatgaaatctgtgtaggttttaaatattttaaaattatatacaaatcatcagtgcttttag

SEQ ID NO: 190522 - DNA, 1262 bp, Homo Sapiens
  misc_feature (155)..(192): n is a, c, g, or t
ttggctggaaaagtatccagagtctcaaaaggcaatgatttgtgagataatatggcatgcccggagccctgctcatcaatgaaaaacccatatgtaataatcgaattcatttaacatgaatcttgagtacgtggaccattgcttgcatgttaacnnnnnnnnnnnnnnnnnnnnnnnnnnnnnnnnnnnnnnaactccagatatcctaaagctcaattgtttggtctctggttttcatccttagagaagccatggagaacagacttgaaaagtttaggaaatcataatgtggcagaggtggtgggaagaagaaagttgagctttttccccttgagaaacttctgcatttagtttctatctttccaggcaaaacaaatgggtattcttttcatacaaccattttcaaatgaaccttagaaaagtcttaacatttaaggtattttatgcacagaatacacttagattgataggaaagaactcgtaatggagtttgagtaaagaaaatgactgatgtactaaacccagtaaaaattgttgaaaatgttaaaggtcagcatgttctaattgggaatctagatatagcttagatttcctattggcttagagtatttgctataacaaatgaagtgcaatgacaattatatattcctactcggtcatactggactggcttcgttctcttaatatactcagtaatgactcaagcctctggctattaacataccctagttgccgttttttaattgccatgagccaaatacttcttggtatacaattgatccatttattttaatggctgccttttcattttcatcttttcttgctgctacccatctatgtatgtagtcattggggggaaaatgtagccacattttttatgggaagactttgtgttaaaagtgaacattttgaaggtttttaactggtgaaactagcctggaataatgccaccagagactgagtggaaatcgccccttttgaaggtgccattcttatgagccaaaagtttgtcatttaaaagttcattttgagggaataacatgtaatataatttgaaataaaggtatagtaaccttaaaaagaacattataactgattgttgtgaatggggtgaatttgttaaaatgagtaactttgataaagtttttcatgcacaggcaaaatgtattcactagatttctacgtagtgatctgcttttactttgtaatttgtagttctcaaaagacttttttttaaaaaaataaagtccatacttacactt

SEQ ID NO: 190523 - DNA, 1501 bp, Homo Sapiens
  misc_feature (1147)..(1184): n is a, c, g, or t
ttggaccagatggcggcagctgcggcttctattctaggggtagtgttgggcccgaggggcgcgaggctccccggaatccgtgccccatcggagctcgtaaggagctccagaaagaacttcaagaacagatgtcccgtggtgatgcatttaaggatataattttatatgtcaaggaggagatgaaaaaaaacaacatcccagagccagttgtcatcggaatagtctggtcaagtgtaatgagcactgtggaatggaacaaaaaagaggagcttgtatcaaagcaagccatcaagcacttgaagcaatacagccctctacttgctgcctttactactcaaggtcagtctgagctgactctgttactgaagattcaggagtattgctatgacaacattcatttcatgaaagccttccagaaaatagtggtgcttttttataaagctgaagtcctgagcgaggagcccattttgaagtggtataaagatgcacatgttgcaaaggggaagagtgttttccttgagcaaatgaaaaagtttgtagaatggctcaaaaatgctgaagaagaatctgaatctgaagctgaagaaggtgactgaattttgaaactacaccctcagtaaagcaaacaggagttgtagataaaatgtcatgtctcatgtgtcctggttcttacatcttcctacctccctgtatcaagcatgatataagggctttcatggcaaattttattttaactgtttctatggttgctggaaatgttgggtttagtttctaaaaccatgttttaagtagctacaggagctatagatttgaatctaatgttgcattagtcttttcagttatcttctacctcctgtattttctactgtaataatgtaatttaaggccttccacaatgaacagttcactttattccctgggttttctataaacagttttaaggatatgatttggttaaaaaataatttgttataaaaattctgtttgcaaattaaactggaaaagtatccagagtctcaaaaggcaatgatttgtgagataatatggcatgcccggagccctgctcatcaatgaaaaacccatatgtaataatcgaattcatttaacatgaatcttgagtacgtggaccattgcttgcatgttaacnnnnnnnnnnnnnnnnnnnnnnnnnnnnnnnnnnnnnnaactccagatatcctaaagctcaattgtttggtctctggttttcatccttagagaagccatggagaacagacttgaaaagtttagaaatcataatgtggcagaggtggtgggaagaagaaagttgagctttttctccttgagaaacttctgcatttagtttctatctttccaggcaaaacaaatgggtattcttttcatacaaccattttcaaatgaaccttagaaaagtcttaacatttaagtattttatgcacagaatacacttagattgataggaaggactcgtaatggagtttgagtaaggaaatgactgatg

SEQ ID NO: 190524 - DNA, 929 bp, Homo Sapiens
  misc_feature (537)..(574): n is a, c, g, or t
ctttgtacaaaaaagttgggttgtagataaccattgtcatgtctcatgtgtcctggttcttacatcttcctacctccctgtatcaagcatgatataagggctttcatggcaaattttattttaactgtttctatggttgctggaaatgttgggtttagtttctaaaaccatgttttaagtagctacaggagctatagatttgaatctaatgttgcattagtcttttcagttatcttctacctcctgtattttctactgtaataatgtaatttaaggccttccacaatgaacagttcactttattccctgggttttctataaacagttttaaggatatgatttggttaaaaaataatttgttataaaaattctgtttgcaaattaaactggaaaagtatccagagtctcaaaaggcaatgatttgtgagataatatggcatgcccggagccctgctcatcaatgaaaaacccatatgtaataatcgaattcatttaacatgaatcttgagtacgtggaccattgcttgcatgttaacnnnnnnnnnnnnnnnnnnnnnnnnnnnnnnnnnnnnnnaactccagatatcctaaagctcaattgtttggtctctggttttcatccttagagaagccatggagaacagacttgaaaagtttaggaaatcataatgtggcagaggtggtgggaagaagaaagttgagctttttccccttgagaaacttctgcatttagtttctatctttccaggcaaaacaaatgggtattcttttcatacaaccattttcaaatgaaccttagaaaagtcttaacatttaaggtattttatgcacagaatacacttagattgataggaaagaactcgtaatggagtttgagtaaagaaaatgactgatgtactaaacccagtaaaaattgttgaaaatgttaa

SEQ ID NO: 190525 - DNA, 1021 bp, Homo Sapiens
  misc_feature (773)..(810): n is a, c, g, or t
ttgtacaaaaaagttggcattcatttcctgaaagccttccagaaaatagtggtgcttttttataaagctgaagtcctgagcgaggagcccattttgaagtggtataaagatgcacatgttgcaaaggggaagagtgttttccttgagcaaatgaaaaagtttgtagaatggctcaaaaatgctgaagaagaatctgaatctgaagctgaagaaggtgactgaattttgaaactacaccctcagtaaagcaaacaggagttgtagataaaatgtcatgtctcatgtgtcctggttcttacatcttcctacctccctgtatcaagcatgatataagggctttcatggcaaattttattttaactgtttctatggttgctggaaatgttgggtttagtttctaaaaccatgttttaagtagctacaggagctatagatttgaatctaatgttgcattagtcttttcagttatcttctacctcctgtattttctactgtaataatgtaatttaaggccttccacaatgaacagttcactttattccctgggttttctataaacagttttaaggatatgatttggttaaaaaataatttgttataaaaattctgtttgcaaattaaactggaaaagtatccagagtctcaaaaggcaatgatttgtgagataatatggcatgcccggagccctgctcatcaatgaaaaacccatatgtaataatcgaattcatttaacatgaatcttgagtacgtggaccattgcttgcatgttaacnnnnnnnnnnnnnnnnnnnnnnnnnnnnnnnnnnnnnnaactccagatatcctaaagctcaattgtttggtctctggttttcatccttagagaagccatggagaacagacttgaaaagtttatgaaatcataatgtggcagaggtggtgggaagaagaaagttgagctttttcctcttgagaaacttctgcatttagtttctatctttccaggcaaaacaaatgggtattcttttcatacaaccatttt

SEQ ID NO: 190526 - DNA, 1184 bp, Homo Sapiens
  misc_feature (529)..(537): n is a, c, g, or t
ttggcttccctggcctctcctttcctgcttactcctctatttttacagtgccctgcaaatccgctttcactttcaaataacacagcagctgctgttcgtgaccggtttttcacattcggaaaggaagcctgcttgctcttgactggtgttcttctggctaatggaacacttaatgcatccattcttaatagcatttataatgaaaatttggttaacgaaggattttcagcaccttttgctgtgaaactcttaaattcatggataaatgaaaaagatatccatgcagtagctgcaagtcttcggaaagtcagcatggataacagactgatggaactctttcctgccaataagcaaagtgttgaacacttcacaaaatattttactgaggcaggcttgaaagagctttcagaatatgttcggaatcagcaaaccatcggagctcgtaaggagctccagaaagaacttcaagaacagatgtcccgtggtgatccatttaaggatataattttatatgtcaaggaggagatgnnnnnnnnncaacatcccagagccagttgtcatcggaatagtctggtcaagtgtaatgagcactgtggaatggaacaaaaaagaggagcttgtagcagagcaagccatcaagcacttgaagcaatacagccctctacttgctgcctttactactcaaggtcagtctgagctgactctgttactgaagattcaggagtattgctatgacaacattcatttcatgaaagccttccagaaaatagtggtgcttttttataaagctgaagtcctgagcgaggagcccattttgaagtggtataaagatgcacatgttgcaaaggggaagagtgttttccttgagcaaatgaaaaagtttgtagaatggctcaaaaatgctgaagaagaatctgaatctgaagctgaagaaggtgactgaattttgaaactacaccctcagtaaagcaaacaggagttgtagataaaatgtcatgtctcatgtgtcctggattcttacatcttcctacctccctgtatcaagcatgatataagggctttcatggcaaattttattttaactgtttctatggttgctggaaatgttgggtttagtttctaaaaccatgttttaagtagctacaggagctatagatttgaatctaatgttgcattagtctttt

SEQ ID NO: 190527 - DNA, 2076 bp, Homo Sapiens; identical to SEQ ID NO: 183309
  misc_feature (1905)..(1942): n is a, c, g, or t

SEQ ID NO: 190528 - DNA, 502 bp, Homo Sapiens
ctttgtacaaaaaagttggagccagttgtcatcggaatagtctggtcaagtgtaatgagcactgtggaatggaacaaaaaagaggagcttgtagcagagcaagccatcaagcacttgaagcaatacagccctctacttgctgcctttactactcaaggtcagtctgagctgactctgttactgaagattcaggagtattgctatgacaacattcatttcatgaaagccttccagaaaatagtggtgcttttttataaagctgaagtcctgagcgaggagcccattttgaagtggtataaagatgcacatgttgcaaaggggaagagtgttttccttgagcaaatgaaaaagtttgtagaatggctcaaaaatgctgaagaagaatctgaatctgaagctgaagaaggtgactgaattttgaaactacaccctcagtaaagcaaacaggagttgtagataaaatgtcatgtctcatgtgtcctggttcttacatcttcctacc

SEQ ID NO: 190529 - DNA, 1223 bp, Homo Sapiens; identical to SEQ ID NO: 183312

SEQ ID NO: 190530 - DNA, 1056 bp, Homo Sapiens; identical to SEQ ID NO: 183313

SEQ ID NO: 190531 - DNA, 917 bp, Homo Sapiens; identical to SEQ ID NO: 183314

SEQ ID NO: 190532 - DNA, 1831 bp, Homo Sapiens; identical to SEQ ID NO: 183315
  misc_feature (133)..(183): n is a, c, g, or t

SEQ ID NO: 190533 - DNA, 2012 bp, Homo Sapiens; identical to SEQ ID NO: 183316

SEQ ID NO: 190534 - DNA, 920 bp, Homo Sapiens
  misc_feature (518)..(579): n is a, c, g, or t
ttggctaagatattgcttagcgttaagtttttaacgtaattttaatagcttaagattttaagagaaaatatgaagacttagaagagtagcatgaggaaggaaaagataaaaggtttctaaaacatgacggaggttgagatgaagcttcttcatggagtaaaaaatgtatttaaaagaaaattgagagaaaggactacagagccccgaattaataccaatagaagggcaatgcttttagattaaaatgaaggtgacttaaacagcttaaagtttagtttaaaagttgtaggtgattaaaataatttgaaggcgatcttttaaaaagagattaaaccgaaggtgattaaaagaccttgaaatccatgacgcagggagaattgcgtcatttaaagcctagttaacgcatttactaaacgcagacgaaaatggaaagattaattgggagtggtaggatgaaacaatttggagaagatagaagtttgaagtggaaaactggaagacagaagtacgggaaggcnnnnnnnnnnnnnnnnnnnnnnnnnnnnnnnnnnnnnnnnnnnnnnnnnnnnnnnnnnnnnngataaatttaaacctgaaaagtaggaagcagaagaaaaaagacaagctaggaaacaaaaagctaagggcaaaatgtacaaacttagaagaaaattggaagatagaaacaagatagaaaatgaaaatattgtcaagagtttcagatagaaaatgaaaaacaagctaagacaagtattggagaagtatagaagatagaaaaatataaagccaaaaattgggataaaatagcactgaaaaaatgaggaaattattggtaaccaatttattttaaaagcccatcaatttaatttctggtggtgcagaagttagaactaaagcttgagagatgaggtgtttacgta

SEQ ID NO: 190535 - DNA, 4294 bp, Homo Sapiens; identical to SEQ ID NO: 179951
  misc_feature (1957)..(1968): n is a, c, g, or t
  misc_feature (2173)..(2181): n is a, c, g, or t
  misc_feature (3375)..(3383): n is a, c, g, or t
  misc_feature (3568)..(3577): n is a, c, g, or t

SEQ ID NO: 190536 - DNA, 1338 bp, Homo Sapiens; identical to SEQ ID NO: 183317

SEQ ID NO: 190537 - DNA, 947 bp, Homo Sapiens
  misc_feature (672)..(683): n is a, c, g, or t
  misc_feature (888)..(896): n is a, c, g, or t
gtacaaaaaagttggatttttaaatccccgaaagactagcattaattgacagctgacccaggtgctacacagaagtggattcagtgaatctaggaagacagcagcagacaggattccaggaaccagtgtttgatgaagctaggactgaggagcaagcgagcaagcagcagttcgtggtgaagataggaaaagagtccaggagccagtgcgatttggtgaaggaagctaggaagaaggaaggagcgctaacgatttggtggtgaagctaggaaaaaggattccaggaaggagcgagtgcaatttggtgatgaaggtagcaggcggcttggcttggcaaccacacggaggaggcgagcaggcgttgtgcgtagaggatcctagaccagcatgccagtgtgccaaggccacagggaaagcgagtggttggtaaaaatccgtgaggtcggcaatatgttgtttttctggaacttacttatggtaaccttttatttattttctaatataatgggggagtttcgtactgaggtgtaaagggatttatatggggacgtaggccgatttccgggtgttgtaggtttctctttttcaggcttatactcatgaatcttgtctgaagcttttgagggcagactgccaagtcctggagaaatagtagatggcaagtttgtgggnnnnnnnnnnnnacacgaatttgaggaaaaccaaatgaatttgatagccaaattgagacaatttcagcaaatctgtaagcagtttgtatgtttagttggggtaatgaagtatttcagttttgtgaatagatgacctgtttttacttcctcaccctgaattcgttttgtaaatgtagagtttggatgtgtaactgaggcgggggggagttttcagtannnnnnnnngtgggggtgggggcaaaatatgttttcagttctttttcccttaggtctgtc

SEQ ID NO: 190538 - DNA, 1295 bp, Homo Sapiens; identical to SEQ ID NO: 179952

SEQ ID NO: 190539 - DNA, 1172 bp, Homo Sapiens
ctttgtacaaaaaagttggagataacatcttctgagtcataaccagcctggcagtatgatggcctagatgcagagaaaacagctccttggtgaattgataagtaaaggcagaaaagattatatgtcatacctccattggggaataagcataaccctgagattcttactactgatgagaacattatctgcatatgccaaaaaattttaagcaaatgaaagctaccaatttaaagttacggaatctaccattttaaagttaattgcttgtcaagctataaccacaaaaataatgaattgatgagaaatacaatgaagaggcaatgtccatctcaaaatactgcttttacaaaagcagaataaaagcgaaaagaaatgaaaatgttacactacattaatcctggaataaaagaagccgaaataaatgagagatgagttgggatcaagtggattgaggaggctgtgctgtgtgccaatgtttcgtttgcctcagacaggtatctcttcgttatcagaagagttgcttcatttcatctgggagcagaaaacagcaggcagctgttaacagataagtttaacttgcatctgcagtattgcatgttagggataagtgcttatttttaagagctgtggagttcttaaatatcaaccatggcactttctcctgaccccttccctaggggatttcaggattgagaaatttttccatcgagcctttttaaaattgtaggacttgttcctgtgggcttcagtgatgggatagtacacttcactcagaggcatttgcatctttaaataatttcttaaaagcctctaaagtgatcagtgccttgatgccaactaaggaaatttgtttagcattgaatctctgaaggctctatgaaaggaatagcatgatgtgctgttagaatcagatgttactgctaaaatttacatgttgtgatgtaaattgtgtagaaaaccattaaatcattcaaaataataaactatttttattagagaatgtatacttttagaaagctgtctccttatttaaataaaatagtgtttgtctgtagttcagtgttggggcaatcttgggggggattcttctctaatctttcagaaactttgtctgcgaacactctttaatggaccagatcaggatttgagcggaagaacgaaactctgtttct

SEQ ID NO: 190540 - DNA, 1964 bp, Homo Sapiens; identical to SEQ ID NO: 183318

SEQ ID NO: 190541 - DNA, 1575 bp, Homo Sapiens
  misc_feature (309)..(479): n is a, c, g, or t
ttggcaatagttttgatttcttacgtacttcaataagaaaaagagaagattgtagcaaacaagaaatagtgtggagtaaagtagaagtaattgtaccttttaaactgggtagtatgctactgattagcatagtttgattagaaacttcattatcagtcctgtgacattcccagtgggaatgatacaaacattctattttatcaatttgtgcatttttttaccttcatatgaataattcatactgtaattctcttatttatgtaaaattgtttgaagtttacatgtgttgaatcatgaggctctagcttnnnnnnnnnnnnnnnnnnnnnnnnnnnnnnnnnnnnnnnnnnnnnnnnnnnnnnnnnnnnnnnnnnnnnnnnnnnnnnnnnnnnnnnnnnnnnnnnnnnnnnnnnnnnnnnnnnnnnnnnnnnnnnnnnnnnnnnnnnnnnnnnnnnnnnnnnnnnnnnnnnnnnnnnnnngctaaaatgttagtagtgtcatggctgacaaaccttgctctagatcttttttactactctatagcaaatattatattgtgtgaatacacttgatttatttatccatttttctgttaatggaaattcagtttgtaaaagaccttgttttggagactaaacttaaaggattggaactgaggtattgttaattagagaaggaagagtcaaaaataagatttctctcctcccgccgcccaagatgccgaaaggaaagaaggccaagggaaagaaggtggctccggccccagctgtcgtgaagaagcaggaggctaagaaagtggtgaatcccctgtttgagaaaaggcctaagaattttggcattggacaggacatccagcccaaaagagacctcacccgctttgtgaaatggccccgctatatcaggttgcagcggcagagagccatcctctataagcggctgaaagtgcctcctgcgattaaccagttcacccaggccctggaccgccaaacagctactcagctgcttaagctggcccacaagtacagaccagagacaaagcaagagaagaagcagagactgttggcccgggccgagaagaaggctgctggcaaaggggacgtcccaacgaagagaccacctgtccttcgagcaggagttaacaccgtcaccaccttggtggagaacaagaaagctcagctggtggtgattgcacacgacgtggatcccatcgagctggttgtcttcttgcctgccctgtgtcgtaaaatgggggtcccttactgcattatcaagggaaaggcaagactgggacgtctagtccacaggaagacctgcaccactgtcgccttcacacaggtgaactcggaagacaaaggcgctttggctaagctggtggaagctatcaggaccaattacaatgacagatacgatgagatccgccgtcactggggtggcaatgtcctgggtcctaagtctgtggctcgtatcgccaagctcgaaaaggcaaaggctaaagaacttgccactaaactgggttaaatgtacactgttgagttttctgtacataaaaataatttgaaataatacaaattttcc

SEQ ID NO: 190542 - DNA, 880 bp, Homo Sapiens
tttgtacaaaaaagttggggccgaacaaaggaaagaaggccaagggaaagaaggtggctccggccccagctgtcgtgaagaagcaggaggctaagaaagtggtgaatcccctgtttgagaaaaggcctaagaattttggcattggacaggacatccagcccaaaagagacctcacccgctttgtgaaatggccccgctatatcaggttgcagcggcagagagccatcctctataagcggctgaaagtgcctcctgcgattaaccagttcacccaggccctggaccgccaaacagctactcagctgcttaagctggcccacaagtacagaccagagacaaagcaagagaagaagcagagactgttggcccgggccgagaagaaggctgctggcaaaggggacgtcccaacgaagagaccacctgtccttcgagcaggagttaacaccgtcaccaccttggtggagaacaagaaagctcagctggtggtgattgcacacgacgtggatcccatcgagctggttgtcttcttgcctgccctgtgtcgtaaaatgggggtcccttactgcattatcaagggaaaggcaagactgggacgtctagtccacaggaagacctgcaccactgtcgccttcacacaggtgaactcggaagacaaaggcgctttggctaagctggtggaagctatcaggaccaattacaatgacagatacgatgagatccgccgtcactggggtggcaatgtcctgggtcctaagtctgtggctcgtatcgccaagctcgaaaaggcaaaggctaaagaacttgccactaaactgggttaaatgtacactgttgagttttctgtacataaaaataattgaaataatacaaattttccttc

SEQ ID NO: 190543 - DNA, 2363 bp, Homo Sapiens; identical to SEQ ID NO: 183320

SEQ ID NO: 190544 - DNA, 2656 bp, Homo Sapiens; identical to SEQ ID NO: 183321
  misc_feature (1752)..(1798): n is a, c, g, or t

SEQ ID NO: 190545 - DNA, 1154 bp, Homo Sapiens
  misc_feature (1070)..(1081): n is a, c, g, or t
ttgggaagaaattctctttcaagaagcctttcttcttcttcttgggggtctccttgggggggacctccaagaagaagaagaaattctctttcaagaagcctttcaaattgagcggcctgtccttcaagagaaatcggaaggagggtgggggtgattcttctgcctcctcacccacagaggaagagcaggagcagggggagatcggtgcctgcagcgacgagggcactgctcaggaagggaaggccgcagccacccctgagagccaggaaccccaggccaagggggcagaggctagtgcagcctcagaagaagaggcagggccccaggctacagagccatccactccctcggggccggagagtggccctacaccagccagcgctgagcagaatgagtagctaggtaggggcaggtgggtgatctctaagctgcaaaaactgtgctgtccttgtgaggtcactgcctggacctggtgccctggctgccttcctgtgcccagaaaggaaggggctattgcctcctcccagccacgttccctttcctcctctccctcctgtggattctcccatcagccatctggttctcctcttaaggccagttgaagatggtcccttacagcttcccaagttaggttagtgatgtgaaatgctcctgtccctggccctacctccttccctgtccccacccctgcataaggcagttgttggttttcttccccaattcttttccaagtaggttttgtttaccctactccccaaatccctgagccagaagtggggtgcttatactcccaaaccttgagtgtccagccttcccctgttgtttttagtctcttgtgctgtgcctagtggcacctgggctggggaggacactgccccgtctaggtttttataaatgtcttactcaagttcaaacctccagcctgtgaatcaactgtgtctcttttttgacttggtaagcaagtattaggctttggggtggggggaggtctgtaatgtgaaacaacttcttgtctttttttctcccactgttgtaaataacttttaatggccaaaccccagatttgtacnnnnnnnnnnnnctaactgctaaaaccattctcttccacctggttttactgtaacatttgaaaaaggaataaatgtcgtcacttt

SEQ ID NO: 190546 - DNA, 1318 bp, Homo Sapiens
  misc_feature (379)..(395): n is a, c, g, or t
  misc_feature (1179)..(1212): n is a, c, g, or t
cattggtctgtcaattttattgggcattgcgttcatctctttacagaagaactcagccccacacccctagaatgtagacctttggaaaaaggagaagtgctccgttaagcaagctacaatgcaggggcagatcctaggaagggagcagaactgccagggttccaaccaaagaaagaggttaattaataatgggcaatattggggagatgggtggggaaaagaggaaaaagctccgctaacctaagaataccacaaccctgaaaggagcgccttctagaacaaaggtaaaatcactaggacagatctgttagggttttcctttcactcttgtagtagaatgctgatctaacgggagttttgaagtgtggagcaggggggnnnnnnnnnnnnnnnnntgagaattttaatttttgaaataacggcaatttatccattgcacataccactgtattatgcaaatcaacgttttggaaaatttagacacagaagggaactagacagttttccccctggagagatgaaaagctttttggctcttaagtctttgataaaaggcgtacataattcttgtgtctactgtacagaatactgccgctagctggatttcccaattctgagtaacactctgcaatccaaacagggttcaaccctccaccttacaggcctgcattacaggacttaaacacataatccaagaatttcttacactaatttatacattttaattggttgcatatattaacatgtactataagattcttttctaagaagcattacataataaatggatactgtaaaaagatctgattagttaaaagtaacaagcattaacagatagatacatacaaaactcagcctgatcagactgggtgtgagcctgtaatggggcatggggcaccagccttcccaaggggtagccttcaaggagggaggggaaagggggggtaaaaagaccacaagaccaataaaaaaaatcagataattagacacagattaactgtaaacagttctctctctctccagtgaacaaaaagaataagcttccaatgccaactccatatcagaatgacttccaccgctggcttgtcctgctgccatactcgcgggctcatgtgggtgggcaggcagaccccaaggagccatcacgggcaagggctggagtttgattacgtcagatcnnnnnnnnnnnnnnnnnnnnnnnnnnnnnnnnnnagagatatgtggggtgtaactgtgtttgatggggttttcttttggcagctggatgtgagagatcaatgtatgttttgtttggaagaggagaggggaattgtgccaa

SEQ ID NO: 190547 - DNA, 1523 bp, Homo Sapiens
cccccaaagtgcaacaccccagcgccccgtgcctggagctccagggcccctttgcgcagtgcggtgtccagccaggcacaggggccggccctggaccggggccagcgttagggaagaggccagggctgcccactgggagcctggtcccagcataggggcggcggagggccccagaccactgaagctcctgcgccgcgggtgcgtgaggcccccccgagagcacgcccccctcgaggcctagtcgagcagggatggctcggctgggcggataatggtgggccggctgggcgcagcagggggtcttctgctgggcactcctgggggaatccctggggggatccgaactggccgagatgggatctgaggcggggctgggaagaggtcactgttggcaaacacgctctggggtccaggccgggatgggattgggggcgccgagaaggaggctgctgcccccacgggaacaggaatcagggggggccctggagtggggcccctcactgctgggggccggccaggggggtgtatgctggacaccggtcggcgctgtggagtggggctgtggctgctggcgctctggagccaggtgtcatcgacaggcgggggtacaggcgtggacacagtgctggtgctgatgtcaccgatgatgttgagcgcctccttgagggcatggtacatgcgcagcatgtcgtcccgccgctgtgcctggtcggccgactcctccatgaggctgctctggtctgccgaggagtataggtaggccagcagctcgtggtggatgaaggccttcgtattgttgatcatgaggtgcatgatggtctttggcatgaggtcgcggatggacttgttgatgatggccacgtatgagtccaccaggttgcgaatggtctccacctgccgctccagttgggggtccatggagaaggtgttctcctgggccccatcctcgttttctgcctggtccttctcggggtagacgccagctcggaggaacgaggccttccagctgtccacgtcttcctgggagtcacaggccagctcgatctgccgcaggtccttgtagacgtttctctgctccgtgttgaagatggcgaagacgtgcttgttggacatgaagcccttctccacatcacggatcttgaggttgtccagaggcagcatgtacttcttctctttctcctcctcatccttgtaccaggacagtgactcggcagtcagcacaaaccagtactccttggagccgcctttcatcaggctgatgttgttgatggtcagccagcccctgcggatcacctgggggaaagcgcgcagcttagcagggaacctcgctccgtgccccagccatcccccagcgcagcagccttgcccacagctcagtgggaagccagggaccgcaatagagacacctccagccccaaagcccaggaaacccagttccaccctgtcccaagcatttccagcaggaaaccaacatgaggcgccacctgggcaggtgggcggacagacagacccaacttttttgt

SEQ ID NO: 190548 - DNA, 1650 bp, Homo Sapiens; identical to SEQ ID NO: 183327

SEQ ID NO: 190549 - DNA, 1450 bp, Homo Sapiens; identical to SEQ ID NO: 183328

SEQ ID NO: 190550 - DNA, 1562 bp, Homo Sapiens; identical to SEQ ID NO: 179953

SEQ ID NO: 190551 - DNA, 410 bp, Homo Sapiens
aaaattttgtacaaaaaagttgggtaaaagacgtccaccagcaggagttcgtcagagctctggcagccttcctcaaaaagtccgggaagctgaaagtccccgaatgggtggataccgtcaagctggccaagcacaaagagcttgctccctacgatgagaactggttctacacgcgagctgcttccacagcgcggcacctgtacctccggggtggcgctggggttggctccatgaccaagatctatgggggacgtcagagaaacggcgtcatgcccagccacttcagccgaggctccaagagtgtggcccgccgggtcctccaagccctggaggttctgaaaatggtggaaaaggaccaagatggtggccgctcaccgatacctcaaggacaacgagatctggacagaatc

SEQ ID NO: 190552 - DNA, 1866 bp, Homo Sapiens; identical to SEQ ID NO: 183329

SEQ ID NO: 190553 - DNA, 1511 bp, Homo Sapiens; identical to SEQ ID NO: 183330

SEQ ID NO: 190554 - DNA, 1500 bp, Homo Sapiens
  misc_feature (547)..(595): n is a, c, g, or t
ttggcaacttagaataatcactcttactggtgataatactaagaaggaaaagaagttcataatgatgaaagtagagaaaaaagaaaactctatacaattatttgaagaatgtcttcttttaaatgtacatggaatgatagatttggaaaaattaccattttacaacccttaatgtaattaaatctggcaaaaatcgatggtaaaacccattaagtggaaaaaattttaaggaactttgtttacaaggtgtcagaacatcacagatatctattgcaaaagaattgcctttacagtgagatttggctatcaaactgcatttcactacttctggaataagccagcattatgtggctcttgatgggatgcggtatgaagcatgtgtgatcatccttgatgtactgccgaaaatgtttacctcaaatttaattaaatcttttgtctagacttatcttcctgtttaaagaaatacaggaatagaggaacaagttgaattacacagtatggaaataaatagacaagtccagagttggtataggacaactggacnnnnnnnnnnnnnnnnnnnnnnnnnnnnnnnnnnnnnnnnnnnnnnnnnaaacataacacgaggaagctgttaaaactggtgtaatagctcaaaagaactaagtattccagatttcgggagggatgaagagggagatattcagaacccttcaccagattccccccaacttgatcatagtggattaatgatgtgctttgtggatgtggttagtcaatgacaccagcttgacggatctttctttctgcaccaaaccccattgagttatctggtccccttggctgacgaagaaccattaggcgaggagcactggcatcatccagagtgatattcttcaagcgattgaccaaccgatcaggtcgaggagctgcaacagccttggggccctcacagactcgccaaacattacaggcgctgcacttgccagtgcgctgattaagaatcactgagaactccacctcatctcctgcctgtagctcaatgccatcctgaacttctttcacatggaaaaagagcttcttgctatctcctacttcatagttaatgaagccaaactgatctttcacacattccactgtggccctgcgcaggggtgtgatgttgtaagccatagtttgtgcattttggcccaggacacacaattggaacttgacgctctcccctttctgcaggcaatcccctttgttggccatcccaacgatgccaaatggatagacctcacctttcatatcgccctcctccacaatctcaatcattccttggtactcagtctgtgttggatcaacactcctcagggggcgaattactttgccagagtaaatggtgggatcagcttcctcagtaatgccattcactgagtgtgttttgttcactttttctgcactgactttgttgcctttgcctttggacaagctatactcgacgcatgtcccccagccaacttttttgtacaaagt

SEQ ID NO: 190555 - DNA, 989 bp, Homo Sapiens
  misc_feature (894)..(911): n is a, c, g, or t
ctttgtacaaaaaagttggctctggatgcattgccaagagtggctcctcgcctaatggttcttcgtcagccaaggggaccagataactcaatggggtttggtgcagaaagaaagatccgtcaagctggtgtcattgactaaccacatccacaaagcacaccattaatccactatgatcaagttggggggaatctggtgaagggttctgaatatctccctcttcatccctcccgaaatctggaatacttattctattgagctattacaccagttttaacaccttcctcgtgttatgtttaaaaaaataaataaatttaagaaaaccattttaaataatgcacagttgcagcctggaaaaacttaaggtggcgccttatagtatcaattttaggagctttatttggtgcatttaacgcaactggtaattgcagaatccactttgcctgtgtaagtgaaaaatatagactgttatcttgttggccctatgaaattctgcacttttcattatatactctaccttcattaattacttctggcaagatgttctgccttagcactcagttgcattcttttcctttttcttcctgttcattatgctttaattctgaggaccatatgagggtagaatatattatcttttaaaaattacaaaaatttgtataggcaaaccatttcttaaagttgatggccaaattttaaaatgttatttttcatatcatttataatcttgtcacaatccacttaaagaagtttggttatatttcagtgaaaattttcttccagagtaggttttttttcgtgggttggggggtaactttactacaattagtaagtatggtgcagaatttcatgcaaatgaggagtgccagcagtgtgataatttaaacatatttnnnnnnnnnnnnnnnnnntgaatgcacaaacttgctgctgcttagatcactgcagcttctaggacccggtttcttttactgatttaaaaacaaaac

SEQ ID NO: 190556 - DNA, 1074 bp, Homo Sapiens
  misc_feature (593)..(610): n is a, c, g, or t
  misc_feature (678)..(703): n is a, c, g, or t
  misc_feature (726)..(734): n is a, c, g, or t
caactttgtacaaaaaagttggattttaaataatcgcacagttgcagcctggaaaaagcttaaggtggcgccttatagtatcaattttaggagctttatttggtgcatttaacgcaactggtaattgcagaatccactttgcctgtgtaagtgaaaaatatagactgttatcttgttggccctatgaaattctgcacttttcattatatactctaccttcattaattacttctggcaagatgttctgccttagcactcagttgcattcttttcctttttcttcctgttcattatgctttaattctgaggaccatatgagggtagaatatattatcttttaaaaattacaaaaatttgtataggcaaaccatttcttaaagttgatggccaaattttaaaatgttatttttcatatcatttataatcttgtcacaatccacttaaagaagtttggttatatttcagtgaaaattttcttccagagtaggttttttttcgtgggttggggggtaactttactacaattagtaagtatggtgcagaatttcatgcaaatgaggagtgccagcagtgtgataatttaaacatatttnnnnnnnnnnnnnnnnnntgaatgcacaaacttgctgctgcttagatcactgcagcttctaggacccggtttcttttactgatttnnnnnnnnnnnnnnnnnnnnnnnnnngttgtgcctgaaatgaatcttgnnnnnnnnnataagtagccgcctggttactgtgtcctgtaaaatacagacacttgacccttggtgtagcttctgttcaactttatatcacgggaatggatgggtctgatttcttggccctcttcttgaattggccatatacagggtccctggccagtggactgaaggctttgtctaagatgacaagggtcagctcaagggatgtgggggagggcggttttatcttcccccttgtcgtttgaggttttgatctctgggtaaagaggccgtttatctttgtaaacacgaaacatttttgcttttctccagttttctgttaatggcgaaagaatggaaagcgaataagtttt

SEQ ID NO: 190557 - DNA, 1260 bp, Homo Sapiens; identical to SEQ ID NO: 183331

SEQ ID NO: 190558 - DNA, 1412 bp, Homo Sapiens
ctttgtacaaaaaagttgggtcgagtatagcttgtccaaaggcaaaggcaacaaagtcagtgcagaaaaagtgaacaaaacacactcagtgaatggcattactgaggaagctgatcccaccatttactctggcaaagtaattcgccccctgaggagtgttgatccaacacagactgagtaccaaggaatgattgagattgtggaggagggcgatatgaaaggtgaggtctatccatttggcatcgttgggatggccaacaaaggggattgcctgcagaaaggggagagcgtcaagttccaattgtgtgtcctgggccaaaatgcacaaactatggcttacaacatcacacccctgcgcagggccacagtggaatgtgtgaaagatcagtttggcttcattaactatgaagtaggagatagcaagaagctctttttccatgtgaaagaagttcaggatggcattgagctacaggcaggagatgaggtggagttctcagtgattcttaatcagcgcactggcaagtgcagcgcctgtaatgtttggcgagtctgtgagggccccaaggctgttgcagctcctcgacctgatcggttggtcaatcgcttgaagaatatcactctggatgatgccagtgctcctcgcctaatggttcttcgtcagccaaggggaccagataactcaatggggtttggtgcagaaagaaagatccgtcaagctggtgtcattgactaaccacatccacaaagcacaccattaatccactatgatcaagttggggggaatctggtgaagggttctgaatatctccctcttcatccctcccgaaatctggaatacttattctattgagctattacaccagttttaacaccttcctcgtgttatgtttaaaaaaataaataaatttaagaaaaccattttaaataatgcacagttgcagcctggaaaaacttaaggtggcgccttatagtatcaattttaggagctttatttggtgcatttaacgcaactggtaattgcagaatccactttgcctgtgtaagtgaaaaatatagactgttatcttgttggccctatgaaattctgcacttttcattatatactctaccttcattaattacttctggcaagatgttctgccttagcactcagttgcattcttttcctttttcttcctgttcattatgctttaattctgaggaccatatgagggtagaatatattatcttttaaaaattacaaaaatttgtataggcaaaccatttccttaaagttgatggccaaattttaaaatgttatttttcatatcatttataatcttgtcacaatccacttaaaaaaggttttggttatattttcattgaaaattttctttccaaagtaaagttttttttcgtggagttgggggggg

SEQ ID NO: 190559 - DNA, 428 bp, Homo Sapiens; identical to SEQ ID NO: 183333

SEQ ID NO: 190560 - DNA, 1092 bp, Homo Sapiens; identical to SEQ ID NO: 183334

SEQ ID NO: 190561 - DNA, 2115 bp, Homo Sapiens; identical to SEQ ID NO: 183335
  misc_feature (1835)..(1866): n is a, c, g, or t

SEQ ID NO: 190562 - DNA, 981 bp, Homo Sapiens; identical to SEQ ID NO: 183336

SEQ ID NO: 190563 - DNA, 1228 bp, Homo Sapiens; identical to SEQ ID NO: 183337
  misc_feature (367)..(581): n is a, c, g, or t

SEQ ID NO: 190564 - DNA, 1279 bp, Homo Sapiens
ttgttggaggacagcagggccaacagtcacagcagccctgaccagagcattcctggagctcaagctcctctacaaagaggtggacagagaagacagcagagaccatgggacccccctcagcccctccctgcagattgcatgtcccctggaaggaggtcctgctcacagcctcacttctaaccttctggaacccacccaccactgccaagctcactattgaatccacgccattcaatgtcgcagaggggaaggaggttcttctactcgcccacaacctgccccagaatcgtattggttacagctggtacaaaggcgaaagagtggatggcaacagtctaattgtaggatatgtaataggaactcaacaagctaccccagggcccgcatacagtggtcgagagacaatataccccaatgcatccctgctgatccagaacgtcacccagaatgacacaggattctataccctacaagtcataaagtcagatcttgtgaatgaagaagcaaccggacagttccatgtatacccggagctgcccaagccctccatctccagcaacaactccaaccccgtggaggacaaggatgctgtggccttcacctgtgaacctgaggttcagaacacaacctacctgtggtgggtaaatggtcagagcctcccggtcagtcccaggctgcagctgtccaatggcaacatgaccctcactctactcagcgtcaaaaggaacgatgcaggatcctatgaatgtgaaatacagaacccagcgagtgccaaccgcagtgacccagtcaccctgaatgtcctctatggcccagatggccccaccatttccccctcaaaggccaattaccgtccaggggaaaatctgaacctctcctgccacgcagcctctaacccacctgcacagtactcttggtttatcaatgggacgttccagcaatccacacaagagctctttatccccaacatcactgtgaataatagcggatcctatatgtgccaagcccataactcagccactggcctcaataggaccacagtcacgatgatcacagtctctgattggaccagaccctgaattcttctagctcctccaatcccattttatcccatggaaccactaaaaacaagtctgctctgctcctgaagccctatatgctggagatggacaactcaatgaaatttaaagggaaaaccctcaggcctgaggtgtgtgccatcagagacttcacctaactaaaaacaggcaaactgcaaccatggtgagaaatttgacga

SEQ ID NO: 190565 - DNA, 1348 bp, Homo Sapiens; identical to SEQ ID NO: 183338
  misc_feature (1135)..(1162): n is a, c, g, or t

SEQ ID NO: 190566 - DNA, 921 bp, Homo Sapiens
gcgtgagccaccgtgcccagtctggtaatttctttagaaagcctggaatgttggatattagacagatgtcctttccactcaggtacacatttaatgaggatgagggggagcttccggagtggtttgtgcaagaggaaaagcagcaccggatacgacagttgcctgttggtaagaaggaggtggagcattaccggaaacgctggcgggaaatcaatgcacgtcccatcaagaaggtggctgaggctaaggctagaaagaaaaggaggatgctgaagaggctggagcagaccaggaagaaggcagaagccgtggtgaacacagtggacatctcagaacgagagaaagtggcacagctgcgaagtctctacaagaaggctgggcttggcaaggagaaacgccatgtcacctacgttgtacccaaaaaaggtgtgggccgcaaagtgcgccggccagctggagtcagaggtcatttcaaggtggtggactcaaggatgaagaaggaccaaagagcacagcaacgtaaggaacaaaagaaaaaacgcaaacggaagtaagcagagctgccaggctcccaggagagcatggggactaggaggaagggtgtggcatggctcagtctggcccccttgattaccggcctagcccctgctcacatcacagctgtctgaagaacagtgaggtggagtgcctagaactcccgtggtggtcctgagcatatattaggatgtcctcctgcctgcctgaaggtctcccatgaaaacactgctgaactgtgttgacactcatgaccctttttttaaaccgttaaagggaagttcggtgttggagcgatactcaatgtagtcagtctacacctggacgtgtgggccacttaagccctccccacccccatcctattcctaaataaaaccaggataatgg

SEQ ID NO: 190567 - DNA, 1210 bp, Homo Sapiens; identical to SEQ ID NO: 183339
  misc_feature (114)..(153): n is a, c, g, or t

SEQ ID NO: 190568 - DNA, 1397 bp, Homo Sapiens; identical to SEQ ID NO: 179956

SEQ ID NO: 190569 - DNA, 984 bp, Homo Sapiens; identical to SEQ ID NO: 183340

SEQ ID NO: 190570 - DNA, 992 bp, Homo Sapiens; identical to SEQ ID NO: 179957

SEQ ID NO: 190571 - DNA, 1561 bp, Homo Sapiens; identical to SEQ ID NO: 183342
  misc_feature (195)..(255): n is a, c, g, or t
  misc_feature (261)..(280): n is a, c, g, or t
  misc_feature (907)..(916): n is a, c, g, or t
  misc_feature (1350)..(1358): n is a, c, g, or t

SEQ ID NO: 190572 - DNA, 791 bp, Homo Sapiens
  misc_feature (381)..(390): n is a, c, g, or t
ttggtgaattgttaactgaagggcggagatcgaagactaacaaagcaaaaacccttgctacatgggcaacaaaagaactgaggaaactgaagaaccaagcttgatctgttaccattgggatgataacctgaggacccccactggaaatctcccatcttttgaaaaacctggaagtgaggagtgtgcacggatgctgaatgtttgggaatgagaggatgagtgagtgaggcttgaaaacacaccacattgaaaatcctgccacagcagcagccgcagccgccaacagcagcgctgttagtgagctaagtaagcactgacttcgtagaaaaccataacatcggccatcttggaaaagagaaaaacaatggagttacttatttnnnnnnnnnngaaagaaagttatctcttcccaggagaggctagaagtagcttttctgtcttttggccagtgccgagtggaatgcctggtttgggggaggaggagggactgggttcagctgtggtgctttgttgtaaaaggcagcctggcctttgctactgaggagaaagatggagcctgggtctcaagcccaccttcgctgtacctttgccacatggtactgtatgcttgccagctagaaggagggtcagggattttttacagtctgagaatgagtgtgtgtgagtgaggcggtatccacattctcaacttcaagtcattgcagtttctttttcccagaaaacaaggggttagatgttgcatttcataaaactaaccgaagttctgtctactgatgcagcacaagagatgt

SEQ ID NO: 190573 - DNA, 360 bp, Homo Sapiens; identical to SEQ ID NO: 179958

SEQ ID NO: 190574 - DNA, 865 bp, Homo Sapiens; identical to SEQ ID NO: 183344
  misc_feature (99)..(152): n is a, c, g, or t

SEQ ID NO: 190575 - DNA, 1453 bp, Homo Sapiens
ttggaccaagcagaatcccactgtgatccctcctcagctggtctgaaaaatacgaattgataaagtatttcatttgaaaacctgatcttgcatgttaaggggctgatgacgaaaattgtaatcaatttcctctttgtttctgtgcttagtttgacaagtgatgggtgaattgagggtagttttttgtcctttttaataaaaaaggacaaaaataatgtgatatttctaacatttttctacccaagtgttgggtatatcatagattagttaaaactcaatcaggaagctcagagaaaatgatttttctctgtttggaaacaaaggaggcacagagcatggatagagataactcattgcacagtgttcagtgagcagaatatgaccatcctagcagcagggcttctgtgacttcctcagaagataaaacatgctccagtactttacagcctgttatcttgtcatcattgaccccgtttctctcctcactgctattctttaaccaaaggaaagagctcctgagagagacttgaaagtaatggttggaagggtggtttcagtgtaatggatacattctttttctcagaggccaatcccaggcattgtgaaagaaatggcttttcttatgaagacttcaaattttcccaactcttttcacaggtgttggggatgtcctttgcactgaccctgaactgccagattgacaaaaccagccagaccatagggctatgatctgcagtagttctgtggtgaagagacttgtttcatctccggaaatgcaaaaccatttatagcatgaagccctacatgatcactgcaggatgatcctcctcccatcctttccctttttaggtccctgtcttatacaaccagagaagtgggtgttggccaggcacatcccatctcaggcagcaagacaatctttcactcactgacggcagcagccatgtctctcaaagtggtgaaactaatatctgagcatcttttagacaagagaggcaaagacaaactggatttaatggcccaacatcaaagggtgaacccaggatatgaatttttgcatcttcccattgtcgaattagtctccagcctctaaataatgcccagtcttctccccaaagtcaagcaagagactagttgaagggagttctggggccaggctcactggaccattgtcacaaccctctgtttctctttgactaagtgccctggctacaggaattacacagttctctttctccaaagggcaagatctcatttcaatttctttattagagggccttattgatgtgttctaagtctttccagaaaaaaactatccagtgatttatatcctgatttcaaccagtcacttagctgataatcacagtaagaagacttctggtattatctctctatcagataagattttgttaatgtactattttactcttcaataaataaaacagtttattat

SEQ ID NO: 190576 - DNA, 947 bp, Homo Sapiens; identical to SEQ ID NO: 183347

SEQ ID NO: 190577 - DNA, 1066 bp, Homo Sapiens; identical to SEQ ID NO: 183348

SEQ ID NO: 190578 - DNA, 1621 bp, Homo Sapiens; identical to SEQ ID NO: 183349

SEQ ID NO: 190579 - DNA, 956 bp, Homo Sapiens
actttgtacaaaaaagttgggtggtattcagccacggggagcgcgccaagcagctccggcgcttctccatcgccaccctgcgggacttcggggtgggcaagcgaggcatcgaggagcgcatccaggaggaggcgggcttcctcatcgacgccctccggggcactggcggcgccaatatcgatcccaccttcttcctgagccgcacagtctccaatgtcatcagctccattgtctttggggaccgctttgactataaggacaaagagttcctgtcactgttgcgcatgatgctaggaatcttccagttcacgtcaacctccacggggcagctctatgagatgttctcttcggtgatgaaacacctgccaggaccacagcaacaggcctttcagttgctgcaagggctggaggacttcatagccaagaaggtggagcacaaccagcgcacgctggatcccaattccccacgggacttcattgactcctttctcatccgcatgcaggaggaggagaagaaccccaacacggagttctacttgaaaaacctggtgatgaccacgttgaacctcttcattgggggcaccgagaccgtcagcaccaccctgcgctatggcttcttgctgctcatgaagcacccagaggtggaggccaaggtccatgaggagattgacagagtgatcggcaagaaccggcagcccaagtttgaggaccgggccaagatgccctacatggaggcagtgatccacgagatccaaagatttggagacgtgatccccatgagtttggcccgcagagtcaaaaaaggacaccaagtttcgggatttcttcctcccctaagggcaccgagtgtaccctatgctggggctctgtgctggagagaccccagtttcttctccacccccagggacttcaatccccagcactttcctgaatggaaaaggggcagtttaaaaaaa

SEQ ID NO: 190580 - DNA, 1015 bp, Homo Sapiens
ttggcgctccggcgggggagcgtagtctcggaggcggcgccgcaggggattgaggggttgactgagcgttgcgagccttagctttctcccgaacgccagcgctgaggacacgatgtcgcggctctcccgctcactgctttgggccgccacctgcctgggcgtgctctgcgtgctgtccgcggacaagaacacgacccagcacccgaacgtgacgactttagcgcccatctccaacgtaacctcggcgccggtgacgtccctcccgctggtcaccactccggcaccagaaacctgtgaaggtcgaaacagctgcgtttcctgttttaatgttagcgttgttaatactacctgcttttggatagaatgtaaagatgagagctattgttcacataactcaacagttagtgattgtcaagtggggaacacgacagacttctgttccgtttccacggccactccagtgccaacagccaattctacagctaaacccacagttcagccctccccttctacaacttccaagacagttactacatcaggtacaacaaataacactgtgactccaacctcacaacctgtgcgaaagtctacctttgatgcagccagtttcattggaggaattgtcctggtcttgggtgtgcaggctgtaattttctttctttataaattctgcaaatctaaagaacgaaattaccacactctgtaaacagacccattgaattaataaggactggtgattcatttgtgtaactcactgaagccaaaatactatcttttaagatgtcccacatggaagacgctattccaggatctttaaatttccatggatgcatataggatgtttgggagcatcatccgtgaagaaaaaatcaattaaatcattgtgttcaacaggaatatttaaaatattctgcatgaatcctgtggctgtcttattttaaatagctgctgctgtgggattatattttttttccttaacatgccaaatataactttctgaaagtgatggaaaatg

SEQ ID NO: 190581 - DNA, 1571 bp, Homo Sapiens; identical to SEQ ID NO: 183352

SEQ ID NO: 190582 - DNA, 701 bp, Homo Sapiens
ctttgtacaaaaaagttgggccttaattgtttaaaatctctggcttcaaagtttcttggggaaaggtcggtttacctcacattttttgtttccattagtaatattctaggtacctcacaaaatgtattatggtgccatggctgttagtttttagtgagtgctgtaggattaattcgaaaataggcagaattccattcctcccaaggtggcaaaaattagctatactgatgtaattgtcatttacctgggtatgaattccctgacacacattcatgtcaacatatgtagcaaattttgtgaaaacataacaatttgaagcttctgtaattttgagcactgctctaacaacaagcataatataaaattagttagattttgcaagtctacaaatgagctcttgcaacagaactcacagcctttttacttttttcccctaactttagcaatgtagtatcttgagccattaatttttgggtttttttaaaatccagaaggtatatagaaaccttttcagatttttcatctgatttgttcttgcagatgttcttctatcaaataccttattttaccttacagatatttgttgcacaggcagatactgctgtatttagacatttctatttcagttcattaaaaactgcaaaaccaatctgtatcatgtaccaaactgacttaaaataaatctacatgtttattgaatt

SEQ ID NO: 190583 - DNA, 1302 bp, Homo Sapiens; identical to SEQ ID NO: 183353

SEQ ID NO: 190584 - DNA, 2184 bp, Homo Sapiens; identical to SEQ ID NO: 183354

SEQ ID NO: 190585 - DNA, 1273 bp, Homo Sapiens
ctttgtacaaaaaagttggagaagctcccgcctacagttcctggcctggaacttcgaggccttgacgcaggccgaggcctggcccagtgtccccacagacctgctccaactgctgctgcccaggagcgacctggcggtgcccagcgagctggccctactgaaggccgtggacacctggagctggggggagcgtgcctcccatgaggaggtggagggcttggtggagaagatccgcttccccatgatgctccctgaggagctctttgagctgcagttcaacctgtccctgtactggagccacgaggccctgttccagaagaagactctgcaggccctggaattccacactgtgcccttccagttgctggcccggtacaaaggcctgaacctcaccgaggatacctacaagccccggatttacacctcgcccacctggagtgcctttgtgacagacagttcctggagtgcacggaagtcacaactggtctatcagtccagacgggggcctttggtcaaatattcttctgattacttccaagccccctctgactacagatactacccctaccagcccttccagactccacaacaccccagcttcctcttccaggacaagagggtgtcctggtccctggtctacctccccaccatccagagctgctggaactacggcttctcctgctcctcggacgagctccctgtcctgggcctcaccaagtctggcggctcagatcgcaccattgcctacgaaaacaaagccctgatgctctgcgaagggctcttcgtggcagacgtcaccgatttcgagggctggaaggctgcgattcccagtgccctggacaccaacagctcgaagagcacctcctccttcccctgcccggcagggcacttcaacggcttccgcacggtcatccgccccttctacctgaccaactcctcaggtgtggactagacggcgtggcccaagggtggtgagaaccggagaaccccaggacgccctcactgcaggctcccctcctcggcttccttcctctctgcaatgaccttcaacaaccggccaccagatgtcgccctactcacctgagcgctcagcttcaagaaattactggaaggcttccactagggtccaccaggagttctcccaccacctcaccagtttccaggtggtaagcaccaggacgccctcgaggttgctctgggatccccccacagcccctggtcagtctgcccttgtcactggtctgaggtcattaaaattacattgaggttccta

SEQ ID NO: 190586 - DNA, 750 bp, Homo Sapiens
  misc_feature (634)..(649): n is a, c, g, or t
tttgtacaaaaaagttggagttgcttccgttcgctcgaagacagaggttcaggtcgttccaggggtagaggaggcatgaaggatgaccgtcgggacagatactctgcgggcaaaaggggtggatttaatacctttagagacagggaaaattatgacagaggttactctagcctgcttaaaagagattttggggcaaaaactcagaatggtgtttacagtgctgcaaattacaccaatgggagctttggaagtaattttgtgtctgctggtatacagaccagttttaggactggtaatccaacagggacttaccagaatggttatgatagcactcagcaatacggaagtaatgttccaaatatgcacaatggtatgaaccaacaggcatatgcatatcctgctactgcagctgcacctatgattggttatccaatgccaacaggatattcccaataagactttagaagtatatgtaaatgtctgtttttcataattgctctttatattgtgtgttatctgacaagatagttatttaagaaacatgggaattgcagaaatgactgcagtgcagcagtaattatggtgcactttttcgctatttaagttggatatttctctacattcctgaaacaannnnnnnnnnnnnnnngtactagaaaatgcaggcagtgttttcacaaaagtaaatgtacagtgatttgaaatacaataaatgaaggcaatgcatggccttccataaaaaatatttga

SEQ ID NO: 190587 - DNA, 601 bp, Homo Sapiens
  misc_feature (478)..(493): n is a, c, g, or t
aaattgatgagcaatgcttttctataaaaaggcgactttgtacaaaaaagttgggtttacagtgctgcaaattacaccaatgggagctttggaagtaattttgtgtctgctggtatacagaccagttttaggactggtaatccaacagggacttaccagaatggttatgatagcactcagcaatacggaagtaatgttccaaatatgcacaatggtatgaaccaacaggcatatgcatatcctgctactgcagctgcacctatgattggttatccaatgccaacaggatattcccaataagactttagaagtatatgtaaatgtctgtttttcataattgctctttatattgtgtgttatctgacaatatagttatttaagaaacatgggaattgcagaaatgactgcagtgcagcagtaattatggtgcactttttcgctatttaagttggatatttctctacattcctgaaacaannnnnnnnnnnnnnnngtactagaaaatgcaggcagtgttttcacaaaagtaaatgtacagtgatttgaaatacaataaatgaaggcaatgcatggccttccaataaaaaatatttgaagactg

SEQ ID NO: 190588 - DNA, 2453 bp, Homo Sapiens; identical to SEQ ID NO: 183355
  misc_feature (2331)..(2346): n is a, c, g, or t

SEQ ID NO: 190589 - DNA, 1399 bp, Homo Sapiens
  misc_feature (66)..(80): n is a, c, g, or t
  misc_feature (1276)..(1291): n is a, c, g, or t
ttggcacattccttttgacagggtctgtcactgggtgggtgatgaattatacagatgacatgtgcnnnnnnnnnnnnnnncaacctcaatggtattcctacaggaaatggataaccattttaactgtattttttgcagcccgtaccttcttgggaatacaattgtctaactttttatttttggtctggctgttgtggtgtgcaaaactccgtacattgctattttgccacactgcaacaccttacagatgtggaagatgtgaaatttgtcatcaattatgactaccctaactcctcagaggattatattcatcgaattggaagaactgctcgcagtaccaaaacaggcacagcatacactttctttacacctaataacataaagcaagtgagcgaccttatctctgtgcttcgtgaagctaatcaagcaattaatcccaagttgcttcagttggtcgaagacagaggttcaggtaaggatgactgataggaaatgttggtagttacgagtcacatcgttgtctacaaatccatttaaatggtattggagggtgagtaaaaccttgaatgtgaaaacttaagctgaaaaattgtaaaaacatttcacgcctaccatgaatagatctgtttctttctgtccacaatgatttgtgtcatagacataattgatcaatttgcaattgttttcttgacaggtcgttccaggggtagaggaggcatgaaggatgaccgtcgggacagatactctgcgggcaaaaggggtggatttaatacctttagagacagggaaaattatgacagaggttactctagcctgcttaaaagagattttggggcaaaaactcagaatggtgtttacagtgctgcaaattacaccaatgggagctttggaagtaattttgtgtctgctggtatacagaccagttttaggactggtaatccaacagggacttacccgaatggttatgatagcacttagcaatacggaagtaatgttccaaatatgcacaatggtatgaaccaacaggcatatgcatatcctggtactgcaggtgcacctatgattggttttccaatgccaaccggattttcccaataagactttagaagtatatgtaaaagtttgtttttcataattgctttttatattgtgtgttatttgacaagatagttatttaagaaacatgggaattgcagaaatgactgcagtgcagcagtaattatggtgcacttttttgctatttaagttggatatttctttacattcctgaaacaannnnnnnnnnnnnnnngtactagaaaatgcaggcagtgttttcacaaaagtaaatgtacagtgatttgaaatacaataaatgaaggcaatgcatggccttccaataaaaaatatttgaagactg

SEQ ID NO: 190590 - DNA, 1245 bp, Homo Sapiens; identical to SEQ ID NO: 179961
  misc_feature (92)..(147): n is a, c, g, or t
  misc_feature (1093)..(1107): n is a, c, g, or t

SEQ ID NO: 190591 - DNA, 1979 bp, Homo Sapiens; identical to SEQ ID NO: 183356
  misc_feature (1483)..(1501): n is a, c, g, or t

SEQ ID NO: 190592 - DNA, 1235 bp, Homo Sapiens; identical to SEQ ID NO: 179962
  misc_feature (128)..(143): n is a, c, g, or t
  misc_feature (1089)..(1145): n is a, c, g, or t

SEQ ID NO: 190593 - DNA, 2020 bp, Homo Sapiens; identical to SEQ ID NO: 179963
  misc_feature (289)..(303): n is a, c, g, or t
  misc_feature (1249)..(1267): n is a, c, g, or t

SEQ ID NO: 190594 - DNA, 1403 bp, Homo Sapiens; identical to SEQ ID NO: 179964
  misc_feature (1147)..(1208): n is a, c, g, or t

SEQ ID NO: 190595 - DNA, 1106 bp, Homo Sapiens
  misc_feature (1005)..(1020): n is a, c, g, or t
ctttgtacaaaaaagttggctcctcagaggattatattcatcgaattggaagaactgctcgcagtaccaaaacaggcacagcatacactttctttacacctaataacataaagcaagtgagcgaccttatctctgtgcttcgtgaagctaatcaagcaattaatcccaagttgcttcagttggtcgaagacagaggttcaggtaaggatgactgataggaaatgttggtagttacgagtcacatcgttgtctacaaatccatttaaatggtattggagggtgagtaaaaccttgaatgtgaaaacttaagctgaaaaattgtaaaaacatttcacgcctaccatgaatagatctgtttctttctgtccacaatgatttgtgtcatagacataattgatcaatttgcaattgttttcttgacaggtcgttccaggggtagaggaggcatgaaggatgaccgtcgggacagatactctgcgggcaaaaggggtggatttaatacctttagagacagggaaaattatgacagaggttactctagcctgcttaaaagagattttggggcaaaaactcagaatggtgtttacagtgctgcaaattacaccaatgggagctttggaagtaattttgtgtctgctggtatacagaccagttttaggactggtaatccaacagggacttaccagaatggttatgatagcactcagcaatacggaagtaatgttccaaatatgcacaatggtatgaaccaacaggcatatgcatatcctgctactgcagctgcacctatgattggttatccaatgccaacaggatattcccaataagactttagaagtatatgtaaatgtctgtttttcataattgctctttatattgtgtgttatctgacaagatagttatttaagaaacatgggaattgcagaaatgactgcagtgcagcagtaattatggtgcactttttcgctatttaagttggatatttctctacattcctgaaacaannnnnnnnnnnnnnnngtactagaaaatgcaggcagtgttttcacaaaagtaaatgtacagtgatttgaaatacaataaatgaaggcaatgcatggccttcc

SEQ ID NO: 190596 - DNA, 930 bp, Homo Sapiens
  misc_feature (807)..(822): n is a, c, g, or t
gcttttcttataatggccaactttgtacaaaaaagttggctaactcctcagaggattatattcatcgaattggaagaactgctcgcagtaccaaaacaggcacagcatacactttctttacacctaataacataaagcaagtgagcgaccttatctctgtgcttcgtgaagctaatcaagcaattaatcccaagttgcttcagttggtcgaagacagaggttcaggtcgttccaggggtagaggaggcatgaaggatgaccgtcgggacagatactctgcgggcaaaaggggtggatttaatacctttagagacagggaaaattatgacagaggttactctagcctgcttaaaagagattttggggcaaaaactcagaatggtgtttacagtgctgcaaattacaccaatgggagctttggaagtaattttgtgtctgctggtatacagaccagttttaggactggtaatccaacagggacttaccagaatggttatgatagcactcagcaatacggaagtaatgttccaaatatgcacaatggtatgaaccaacaggcatatgcatatcctgctactgcagctgcacctatgattggttatccaatgccaacaggatattcccaataagactttagaagtatatgtaaatgtctgtttttcataattgctctttatattgtgtgttatctgacaagatagttatttaagaaacatgggaattgcagaaatgactgcagtgcagcagtaattatggtgcactttttcgctatttaagttggatatttctctacattcctgaaacaannnnnnnnnnnnnnnngtactagaaaatgcaggcagtgttttcacaaaagtaaatgtacagtgatttgaaatacaatacatgaaggcaatgcatggccttccaataaaaaatatttgaagactg

SEQ ID NO: 190597 - DNA, 2345 bp, Homo Sapiens; identical to SEQ ID NO: 179965
  misc_feature (303)..(321): n is a, c, g, or t
  misc_feature (1266)..(1280): n is a, c, g, or t
  misc_feature (2255)..(2270): n is a, c, g, or t

SEQ ID NO: 190598 - DNA, 1250 bp, Homo Sapiens; identical to SEQ ID NO: 183357

SEQ ID NO: 190599 - DNA, 843 bp, Homo Sapiens
  misc_feature (745)..(760): n is a, c, g, or t
tttgtacaaaaaagttgggctcgcagtaccaaaacaggcacagcatacactttctttacacctaataacataaagcaagtgagcgaccttatctctgtgcttcgtgaagctaatcaagcaattaatcccaagttgcttcagttggtcgaagacagaggttcaggtcgttccaggggtagaggaggcatgaaggatgaccgtcgggacagatactctgcgggcaaaaggggtggatttaatacctttagagacagggaaaattatgacagaggttactctagcctgcttaaaagagattttggggcaaaaactcagaatggtgtttacagtgctgcaaattacaccaatgggagctttggaagtaattttgtgtctgctggtatacagaccagttttaggactggtaatccaacagggacttaccagaatggttatgatagcactcagcaatacggaagtaatgttccaaatatgcacaatggtatgaaccaacaggcatatgcatatcctgctactgcagctgcacctatgattggttatccaatgccaacaggatattcccaataagactttagaagtatatgtaaatgtctgtttttcataattgctctttatattgtgtgttatctgacaagatagttatttaagaaacatgggaattgcagaaatgactgcagtgcagcagtaattatggtgcactttttcgctatttaagttggatatttctctacattcctgaaacaannnnnnnnnnnnnnnngtactagaaaatgcacgcagtgttttcacaaaagtaaatgtacagtgatttgaaatacaataaatgaaggcaatgcatgggcc

SEQ ID NO: 190600 - DNA, 842 bp, Homo Sapiens; identical to SEQ ID NO: 183359

SEQ ID NO: 190601 - DNA, 917 bp, Homo Sapiens; identical to SEQ ID NO: 179967

SEQ ID NO: 190602 - DNA, 795 bp, Homo Sapiens
ttggggcggaggtcgataagctggaactgatgttccagaaagctgagtctgatctggattacattcaatacaggctggaatatgaaatcaagactaatcatcctgattcagcaagtgagaaaaatccagttacactcttaaaggaattgtcagtgataaagtctcgatatcaaactttgtatgcccgctttaaaccagttgctgttgagcagaaagagagtaagagccgcatttgtgctactgtgaaaaagactatgaatatgatacaaaaactacagaagcaaacagacctggagctgtcaccactgactaaagaagagaaaactgcggcagagcaattcaaatttcacatgccagatttatgaagaaatggacttggaaaggaaattctaacagagaagagcttaattccggagaaatttaggaagatgtcttgttaacccttgatgtctagagattgggggctggtgaagggggtttggcttcaatgactggataatgatatctttcatgagagagattataagaagaagggcagataatatatgaataaagttcagccaaaaggatcaaatgagaataaaacgatttaaatatatgtacacacgcatgcacacacacacttagtcttgtaatttcaggccagaaattctcaacactattttgcatctgttttctttttctaagtcatgataatatagatgttctggtctatcataaaagaatgtttatgtacatttcagtcattcgggtatgtggctttgtaaattaaagtataggcaaaacaaaatagaa

SEQ ID NO: 190603 - DNA, 652 bp, Homo Sapiens
ctttgtacaaaaaagttggcttataaagtcttaggtaactagtaggatagaaacactgtgtcccgagagtaaggagagaagctactattgattagagcctaacccaggttaactgcaagaagaggcgggatactttcagctttccatgtaactgtatgcataaagccaatgtagtccagtttctaagatcatgttccaagctaactgaatcccacttcaatacacactcatgaactcctgatggaacaataacaggcccaagcctgtggtatgatgtgcacacttgctagactcagaaaaaatactactctcataaatgggtgggagtattttggtgacaacctactttgcttggctgagtgaaggaatgatattcatatattcatttattccatggacatttagttagtgctttttatataccaggcatgatgctgagtgacactcttgtgtatatttccaaatttttgtacagtcgctgcacatatttgaaatcatatattaagactttccaaagatgaggtccctggtttttcatggcaacttgatcagtaaggatttcacctctgtttgtaactaaaaaccatctactatatgttagacatgacattctttttctctccttcctgaaaaataaagtgtgggaagagac

SEQ ID NO: 190604 - DNA, 1310 bp, Homo Sapiens; identical to SEQ ID NO: 183363

SEQ ID NO: 190605 - DNA, 1113 bp, Homo Sapiens
tgcttttatcagtttcacaacatggctgaagctgctgcagtataatccctctccccatctctaaaatgacatttaacctataaaaaattcaacttccccaaaccacaatatctatttaacaataatctttaggaaaaaaaggttaatagccactccagcacatctcacatcaatggcactgaaaagtgagcttcagaaacaaggtcgaaatttaagaaactcctttaaattcttggtttttgagtagcggatccttttcctggtttcccgggaagaacacggcttttgcacggttgagaaagacactcaggcctttgcttctgaccacattcccaggactattttctattgggttgtattccttgtgttttttgtacaccaagagggagatcacagtgacaaatatggccaagcagccaacggagatcagggcactgtttgccatccttaaaggcgaggctgggtctctgtcaggaacagaaatcagggtgctcgtgagagccaggcttgtgtcatcccccagggtgaggttcacacagtacgtcccagacccattgaaggttcgtctcacagtcagcagacacatctcatccacatccacagggctgcagactgtgttctgggtgatctcgcaggtggggtcagaaatgatggtacagacctccgtgggaatgctcccttggcaggtcacgacaaagtctattagggagctttcaggccatggcaccggcatcaggacgtctgtcatctggatgatgttaacctctaagattccctctacaattgtgatggtggcttgaaagtggccatatctgttaatctggcagttttcatcaggaatcctactcagctccagggggttgtcaccagcaggtcctggggtgtttgaatcataagattttagagtagttgctaaagaaggggtgggttttgaaggtctgggtggtggtggcggtggcggacaaggtcctggtgctgcagctttcacagtgaggttaaggctgaaggttccattgagcacatacgtgtgattcacagtatgattggtggaaacaaacaggcggccagctctcgttcttgaacacgccgaagctccccaacttttttgtacaa

SEQ ID NO: 190606 - DNA, 1211 bp, Homo Sapiens
taatagccaactttgtacaaaaaagttgggtgtgaacctcaccctgggggatgacacaagcctggctctcacgagcaccctgatttctgttcctgacagagacccagcctcgcctttaaggatggcaaacagtgccctgatctccgttggctgcttggccatatttgtcactgtgatctccctcttggtgtacaaaaaacacaaggaatacaacccaatagaaaatagtcctgggaatgtggtcagaagcaaaggcctgagtgtctttctcaaccgtgcaaaagccgtgttcttcccgggaaaccaggaaaaggatccgctactcaaaaaccaagaatttaaaggagtttcttaaatttcgaccttgtttctgaagctcacttttcagtgccattgatgtgagatgtgctggagtggctattaacctttttttcctaaagattattgttaaatagatattgtggtttggggaagttgaattttttataggttaaatgtcattttagagatggggagagggattatactgcaggcagcttcagccatgttgtgaaactgataaaagcaacttagcaaggcttcttttcattattttttatgtttcacttataaagtcttaggtaactagtaggatagaaacactgtgtcccgagagtaaggagagaagctactattgattagagcctaacccaggttaactgcaagaagaggcgggatactttcagctttccatgtaactgtatgcataaagccaatgtagtccagtttctaagatcatgttccaagctaactgaatcccacttcaatacacactcatgaactcctgatggaacaataacaggcccaagcctgtggtatgatgtgcacacttgctagactcagaaaaaatactactctcataaatgggtgggagtattttggtgacaacctactttgcttggctgagtgaaggaatgatattcatatattcatttattccatggacatttagttagtgctttttatataccaggcatgatgctgagtgacactcttgtgtatatttccaaatttttgtatagtcgctgcacatatttgaaatcatatattaagactttccaaagatgaggtccctggtttttcatggcaacttgatcagtaggatttcacctctgtttgtaactaaaaccatctactatatgttagacatgacattctttttctctccttcc

SEQ ID NO: 190607 - DNA, 955 bp, Homo Sapiens
tatcccgcctcttcttgcagttaacctgggttagctctaatcaatagtagcttctctccttactctcgggacacagtgtttctatctactagttacctaagactttataagtgaaacataaaaaataatgaaagaagccttgataagttgcttttatcagtttcacaacatggctgaagctgctgcagtataatccctctccccatctctaaaatgacatttaacctataaaaaattcaacttccccaaaccacaatatctatttaacaataatctttaggaaaaaaaggttaatagccactccagcacatctcacatcaatggcactgaaaagtgagcttcagaaacaaggtcgaaatttaagaaactcctttaaattcttggtttttgagtagcggatccttttcctggtttcccgggaagaacacggcttttgcacggttgagaaagacactcaggcctttgcttctgaccacattcccaggactattttctattgggttgtattccttgtgttttttgtacaccaagagggagatcacagtgacaaatatggccaagcagccaacggagatcagggcactgtttgccatccttaaaggcgaggctgggtctctgtcaggaacagaaatcagggtgctcgtgagagccaggcttgtgtcatcccccagggtgaggttcacacagtacgtcccagacccattgaaggttcgtctcacagtcagcagacacatctcatccacatccacagggctgcagactgtgttctgggtgatctcgcaggtggggtcagaaatgatggtacagacctccgtgggaatgctcccttggcaggtcacgacaaagtctattagggagctttcaggccatggcaccggcatcaggacgtctgtcatctggatgatgttaacctctaagattcggctctacaattgccaacttttttgtacaaagt

SEQ ID NO: 190608 - DNA, 1676 bp, Homo Sapiens; identical to SEQ ID NO: 183366
  misc_feature (1436)..(1474): n is a, c, g, or t

SEQ ID NO: 190609 - DNA, 518 bp, Homo Sapiens
  misc_feature (273)..(311): n is a, c, g, or t
ctttgtacaaaaaagttggcttgctcattcttaaaaaataagcatttttcttttaaaagacaagtgtaatagacatctaaaattccactcctcatagagcttttaaaatggtttcattggatataggccttaagaaatcactataaaatgcaaataaagttactcaaatctgtgaagactgtatttgctataactttattggtattgtttttgtagtaatttaagaggtggatgtttgggattgtattattattttactaatatctgtagctnnnnnnnnnnnnnnnnnnnnnnnnnnnnnnnnnnnnnnncttagctatgagctgatcacggctccttctcacctcctgccatgatactgtcagttaccttagttaacaagctgaatatttagtagaaatgatgcttctgctcaggaatggcccacaaatctgtaatttgaaatttagcaggaaatgacctttaatgacactacattttcacgaactgaaatcattaaaattttatttgaataatta

SEQ ID NO: 190610 - DNA, 1015 bp, Homo Sapiens
  misc_feature (328)..(366): n is a, c, g, or t
taatgattttatttgtctgatatgacctgttggtgccaccaaatgataagccatgcttttttataatgccaactttgtacaagaaagttggggttttttggtttgaattcttgtgttgttgtggtagtcaaataaaattttaatgatttcagttcctgaaaatgtagtgtcattaaaggtcatttcctgctaaatttcaaattacagatttgtgggccattcctgagcagaagcatcatttctattaaatattcagcttgttaactaaggtaactgacagtatcatggcaggaggtgagaaggagcaatgatcagctcatagctaagnnnnnnnnnnnnnnnnnnnnnnnnnnnnnnnnnnnnnnnagctacagatattagtaaaataataatacaatcccaaacatccacctcttaaattactacaaaaacaataccaataaagttatagcaaatacagtcttcacagatttgagtaactttatttgcattttatagtgatttcttaaggcctatatccaatgaaaccattttaaaagctctatgaggagtggaattttagatgtctattacacttgtcttttaaaagaaaaatgcttaaatttcagaatgagcaagattcacttttgtaggtagaggccctgcttcttcatgatcttcagttttagatctaacaaccacaagagaagaagctggatatctgtttagcttttgttcattcataaacccaagtcaccatagatactcagcttctgccaaagaaaaccaatgtacattagtagtctggataattaggaacctctccaagttagtctttaaataacaatttaatttataaatagttggtaaaaaaaattctataaacaactttaagaaagaagaatactttttctcaaagtgttgtagatatgtgattcagctcccaatggatggccaaagaaagctgttccacgtctcaagttaaaatcctcaggagtataacaattgggtatcaagaaaaacccaacttttttgt

SEQ ID NO: 190611 - DNA, 991 bp, Homo Sapiens
  misc_feature (802)..(839): n is a, c, g, or t
ttgtacaaaaaagttggctctttcctctaactctggtgaggtcattctggagtgacatgatggactccgcacagagcttcataacctcttcatggactttttatcttcaagccgatgacggaaaaatagttatattccagtctaagccagaaatccagtacgcaccacatttggagcaggagcctacaaatttgagagaatcatctctaagcaaaatgtcctatctgcaaatgagaaattcacaagcgcacaggaattttcttgaagatggagaaagtgatggctttttaagatgcctctctcttaactctgggtggattttaactacaactcttgtcctctcggtgatggtattgctttggatttgttgtgcaactgttgctacagctgtggagcagtatgttccctctgagaagctgagtatctatggtgacttggagtttatgaatgaacaaaagctaaacagatatccagcttcttctcttgtggttgttagatctaaaactgaagatcatgaagaagcagggcctctacctacaaaagtgaatcttgctcattctgaaatttaagcatttttcttttaaaagacaagtgtaatagacatctaaaattccactcctcatagagcttttaaaatggtttcattggatataggccttaagaaatcactataaaatgcaaataaagttactcaaatctgtgaagactgtatttgctataactttattggtattgtttttgtagtaatttaagaggtggatgtttgggattgtattattattttactaatatctgtagctannnnnnnnnnnnnnnnnnnnnnnnnnnnnnnnnnnnnncttagctatgagctgatcattgctccttctcacctcctgccatgatactgtcagttaccttagttaacaagctgaatatttagtagaaatgatgcttctgctcaagaatggcccacaaatctgtaatttgatatttaccaggaaatgacctt

SEQ ID NO: 190612 - DNA, 884 bp, Homo Sapiens
  misc_feature (674)..(712): n is a, c, g, or t
tttgtacaaaaaagttgggccagaaatcccgtacgcaccacatttggagcaggagcctacaaatttgagagaatcatctctaagcaaaatgtcctatctgcaaatgagaaattcacaagcgcacaggaattttcttgaagatggagaaagtgatggctttttaagatgcctctctcttaactctgggtggattttaactacaactcttgtcctctcggtgatggtattgctttggatttgttgtgcaactgttgctacagctgtggagcagtatgttccctctgagaagctgagtatctatggtgacttggagtttatgaatgaacaaaagctaaacagatatccagcttcttctcttgtggttgttagatctaaaactgaagatcatgaagaagcagggcctctacctacaaaagtgaatcttgctcattctgaaatttaagcatttttcttttaaaagacaagtgtaatagacatctaaaattccactcctcatagagcttttaaaatggtttcattggatataggccttaagaaatcactataaaatgcaaataaagttactcaaatctgtgaagactgtatttgctataactttattggtattgtttttgtagtaatttaagaggtggatgtttgggattgtattattattttactaatatctgtagctnnnnnnnnnnnnnnnnnnnnnnnnnnnnnnnnnnnnnnncttagctatgagctgatcattgctccttctcacctcctgccatgatactgtcagttaccttagtttacaagctgaaatatttagtagaaatgatgcttctgctcacgaatggcccacaaatctgtaattttgaaaattaccaggaaatgacctttaatgacactacattttc

SEQ ID NO: 190613 - DNA, 638 bp, Homo Sapiens
  misc_feature (398)..(436): n is a, c, g, or t
ctttgtacaaaaaagttggatctatggtgacttggagtttatgaatgaacaaaagctaaacagatatccagcttcttctcttgtggttgttagatctaaaactgaagatcatgaagaagcagggcctctacctacaaaagtgaatcttgctcattctgaaatttaagcatttttcttttaaaagacaagtgtaatagacatctaaaattccactcctcatagagcttttaaaatggtttcattggatataggccttaagaaatcactataaaatgcaaataaagttactcaaatctgtgaagactgtatttgctataactttattggtattgtttttgtagtaatttaagaggtggatgtttgggattgtattattattttactaatatctgtagctnnnnnnnnnnnnnnnnnnnnnnnnnnnnnnnnnnnnnnncttagctatgagctgatcattgctccttctcacctcctgccatgatactgtcagttaccttagttaacaagctgaatatttagtagaaatgatgcttctgctcaggaatggcccacaaatctgtaatttgaaatttagcaggaaatgacctttaatgacactacattttcaggaactgaaatcattaaaattttatttgaat

SEQ ID NO: 190614 - DNA, 1051 bp, Homo Sapiens
  misc_feature (648)..(662): n is a, c, g, or t
  misc_feature (822)..(833): n is a, c, g, or t
ttggcgggcagaaagcggacgcccgcggacccaccagccccgaacggggattcttggcccagccggccggcgcgcgtgaggaggggcgttagggcgcgcggggtctccaccttctgtcgaccccgcgtcgggtgttgcagtctccgaggcggcgaggagtcctctgggctcgggcttcacctctcgggaaggagtcaagactgagaacaacgatcatattaatttgaaggtggcggggcaggatggttctgtggtgcagtttaagattaagaggcatacaccacttagtaaactaatgaaagcctattgtgaacgacagggattgtcaatgaggcagatcagattccgatttgacgggcaaccaatcaatgaaacagacacacctgcacagttggaaatggaggatgaagatacaattgatgtgttccaacagcagacgggaggtgtctactgaaaagggaacctgcttctttactccagaactctgttctttaaagaccaagattacattctcaattagaaaactgcaatttggttccaccacatcctgactactaccgtatagttttctctattctttcatttcccccttccccattcctttattgtacataaagtaactggtatatgtgcacaagcatattgcannnnnnnnnnnnnnnaactaaacagccaatggtatgttttgattgacatcaagtggagacgggatggggaaaaatactgattctgtgaaaataccccctttctccattagtggcatgctcattcagctcttatctttatattccagtaagttattttgctctcactgttttaacnnnnnnnnnnnncaacaacataaaaatccttgcataccttgttcaattggagaattttaatgtttttcatttatcattgtaaaaccaaggacaattttataacttttttgtacgtagctgttacatgtagggcaatctgtctttaagtagggataaattactctaaaacaaaaaagaatcctagatagttttcccttcaagtcaagcgtcttgttgtttaaataaacttc

SEQ ID NO: 190615 - DNA, 2991 bp, Homo Sapiens; identical to SEQ ID NO: 183368

SEQ ID NO: 190616 - DNA, 944 bp, Homo Sapiens
ttggcgaagactgagcggttgtggccgcgttgccgacctccagcagcagtcggcttctctacgcagaacccgggagtaggagactcagaatcgaatctcttctccctccccttcttgttttcggctttgtgagaaaccttaccatcaaacacgatggccagcaacgttaccaacaagacagatcctcgctccatgaactcccgtgtattcattgggaatctcaacactcttgtggtcaagaaatctgatgtggaggcaatcttttcgaagtatggcaaaattgtgggctgctctgttcataagggctttgccttcgttcagtatgttaatgagagaaatgcccgggctgctgtagcaggagaggatggcagaatgattgctggccaggttttagatattaacctggctgcagagccaaaagtgaaccgaggaaaagcaggtgtgaaacgatctgcagcggagatgtacggctcctcttttgacttggactatgactttcaacgggactattatgataggatgtacagttacccagcacgtgtacctcctcctcctcctattgctcgggctgtagtgccctcgaaacgtcagcgtgtatcaggaaacacttcacgaaggggcaaaagtggcttcaattctaagagtggacagcggggatcttccaagtctggaaagttgaaaggagatgaccttcaggccattaagaaggagctgacccagataaaacaaaaagtggattctctcctggaaaacctggaaaaaattgaaaaggaacagagcaaacaagcagtagagatgaagaatgataagtcagaagaggagcagagcagcagctccgtgaagaaagatgagactaatgtgaagatggagtctgagggggtgcagatgactctgctgaggaggggacctactggatgatgatgatatgaaaatcggggggatga

SEQ ID NO: 190617 - DNA, 1296 bp, Homo Sapiens
  misc_feature (284)..(293): n is a, c, g, or t
  misc_feature (588)..(623): n is a, c, g, or t
ttggcgaagactgagcggttgtggccgcgttgccgacctccagcagcagtcggcttctctacgcagaacccgggagtaggagactcagaatcgaatctcttctccctccccttcttgggcagcaaggcgaaccccatccctactcactggagctcagctttgatttttaacctcccttccccacccttccagaacacacacattccattccaaaactgattttataaagacattttaaacataatgatgcaacttggtgtgcactacagcaaatgtacaggtgnnnnnnnnnnaattgtttccaaaaccgggacctggatttaagatgtaatttttaaaatttctatttctattttttctgcagcagttgggttagaggaggaggagccttttagcctctcataaactgacctctctacttcctcgtgtatttttaagattgattgatgatgtggaaagggctttgcttgtctgctactgaaaactttatccttgcggtttttgtggaaactgcttttggaaagagaaaagaaatgaactttactgacttgacatttttgcacctcccgtttttctaatctgggctannnnnnnnnnnnnnnnnnnnnnnnnnnnnnnnnnnngatcttcagctacattttcggctttgtgagaaaccttaccatcaaacacgatggccagcaacgttaccaacaagacagatcctcgctccatgaactcccgtgtattcattgggaatctcaacactcttgtggtcaagaaatctgatgtggaggcaatcttttcgaagtatggcaaaattgtgggctgctctgttcataagggctttgccttcgttcagtatgttaatgagagaaatgcccgggctgctgtagcaggagaggatggcagaatgattgctggccaggttttagatattaacctggctgcagagccaaaagtgaaccgaggaaaagcaggtgtgaaacgatctgcagcggagatgtacgggtcagtaacagaacacccttctccgtcccctctactcagctcctcttttgacttggactatgactttcaacgggactattatgataggatgtacagttacccagcacgtgtacctcctcctcctcctattgctcgggctgtagtgccctcgaaacgtcagcgtgtatcaggaaacacttcacgaagggcaaaagtggcttcaattctaagagtggacagcggggatcttccaagtctggaaagttgaaaggagatgaccttcaggccattaagaaggagctgacccagataaaacaaaaagtggat

SEQ ID NO: 190618 - DNA, 1137 bp, Homo Sapiens
gaaatacgtcctttttattgttaagtcataaagaggtttcaaaattaaaagcaaaaactacagggtaagacttaacaaaactactaggagtgtcaaaggaggtgaaatgggacctaggtgcagggcaatatgaattaacatgggaaagacaaggacaatgagcatgtgctgaagatactagagaagaagatctggtaaaaaatttgatcttagagaagcacctaggtaaacaaatattgggataagatttctaacccccactatgtgcttaagagtcatttttgccattggcgctgtctctgtcatcctctccttcctcagcctcttttttcatccttggtcaactccagctggtcatccccccgaccttcattatcatcatcatccagtagatccccctcctcagcagagtcatctgcacccccctcagatccatcttcacattaatctcattttttcttcacggagctgtgctctgctcctcttctgacttatcattcttcatctctactgcttgtttgctctgttccttttcaattttttccaggttttccaggagagaatccactttttgttttatctgggtcagctccttcttaatggcctgaaggtcatctcctttcaactttccagacttggaagatccccgctgtccactcttagaattgaagccacttttgccccttcgtgaagtgtttcctgatacacgctgacgtttcgagggcactacagcccgagcaataggaggaggaggaggtacacgtgctgggtaactgtacatcctatcataatagtcccgttgaaagtcatagtccaagtcaaaagaggagctgagtagaggggacggagaagggtgttctgttactgacccgtacatctccgctgcagatcgtttcacacctgcttttcctcggttcacttttggctctgcagccaggttaatatctaaaacctggccagcaatcattctgccatcctctcctgctacagcagcccgggcatttctctcattaacatactgaacgaaggcaaagcccttatgaacagagcagcccacaattttgccatacttcgaaaagattgcctccacatcagatttcttgaccacaagagtgttgccaacttttttgtacaaag

SEQ ID NO: 190619 - DNA, 1273 bp, Homo Sapiens; identical to SEQ ID NO: 179968
  misc_feature (379)..(437): n is a, c, g, or t

SEQ ID NO: 190620 - DNA, 1009 bp, Homo Sapiens; identical to SEQ ID NO: 179969
  misc_feature (757)..(766): n is a, c, g, or t

SEQ ID NO: 190621 - DNA, 1930 bp, Homo Sapiens; identical to SEQ ID NO: 179970
  misc_feature (904)..(913): n is a, c, g, or t

SEQ ID NO: 190622 - DNA, 978 bp, Homo Sapiens
ttggcgaagactgagcggttgtggccgcgttgccgacctccagcagcagtcggcttctctacgcagaacccgggagtaggagactcagaatcgaatctcttctccctccccttcttgtgagatttttttgatcttcagctacattttcggctttgtgagaaaccttaccatcaaacacgatggccagcaacgttaccaacaagacagatcctcgctccatgaactcccgtgtattcattgggaatctcaacactcttgtggtcaagaaatctgatgtggaggcaatcttttcgaagtatggcaaaattgtgggctgctctgttcataagggctttgccttcgttcagtatgttaatgagagaaatgcccgggctgctgtagcaggagaggatggcagaatgattgctggccaggttttagatattaacctggctgcagagccaaaagtgaaccgaggaaaagcaggtgtgaaacgatctgcagcggagatgtacgggtcagtaacagaacacccttctccgtcccctctactcagctcctcttttgacttggactatgactttcaacgggactattatgataggatgtacagttacccagcacgtgtacctcctcctcctcctattgctcgggctgtagtgccctcgaaacgtcagcgtgtatcaggaaacacttcacgaaggggcaaaagtggcttcaattctaagagtggacagcggggatcttccaagtctggaaagttgaaaggagatgaccttcagccattaagaaggagctgacccagataaaacaaaaagtggattctctcctggaaaacctggaaaaaattgaaaaggaacagagcaaacaagcagtagagatgaagaatgataagtcagaagaggagcagagcagcagctccgtgaagaaagatgagactaatgtgaagatggagtctgaggggggtgcagatgactctgctgaggaggggacctactg

SEQ ID NO: 190623 - DNA, 1370 bp, Homo Sapiens
tgtacaaagatgaggaagctgagcggttgtggccgcgttgccgacctccagcagcagtcggcttctctacgcagaacccgggagtaggagactcagaatcgaatctcttctccctccccttcttgttttcggctttgtgagaaaccttaccatcaaacacgatggccagcaacgttaccaacaagacagatcctcgctccatgaactcccgtgtattcattgggaatctcaacactcttgtggtcaagaaatctgatgtggaggcaatcttttcgaagtatggcaaaattgtgggctgctctgttcataagggctttgccttcgttcagtatgttaatgagagaaatgcccgggctgctgtagcaggagaggatggcagaatgattgctggccaggttttagatattaacctggctgcagagccaaaagtgaaccgaggaaaagcaggtgtgaaacgatctgcagcggagatgtacgggtcagtaacagaacacccttctccgtcccctctactcagctcctcttttgacttggactatgactttcaacgggactattatgataggatgtacagttacccagcacgtgtacctcctcctcctcctattgctcgggctgtagtgccctcgaaacgtcagcgtgtatcaggaaacacttcacgaaggggcaaaagtggcttcaattctaagagtggacagcggggatcttccaagtctggaaagttgaaaggagatgaccttcaggccattaagaaggagctgacccagataaaacaaaaagtggattctctcctggaaaacctggaaaaaattgaaaaggaacagagcaaacaagcagtagagatgaagaatgataagtcagaagaggagcagagcagcagctccgtgaagaaagatgagactaatgtgaagatggagtctgaggggggtgcagatgactctgctgaggagggggacctactggatgatgatgataatgaagatcggggggatgaccagctggagttgatcaaggatgatgaaaaagaggctgaggaaggagaggatgacagagacagcgccaatggcgaggatgactcttaagcacatagtggggtttagaaatcttatcccattatttctttacctaggcgcttgtctaagatcaaatttttcaccagatcctctcccctagtatcttcagcacatgctcactgttctccccatccttgtccttcccatgttcattaattcatattgccccgcgcctagtcccattttcacttcctttgacgctcctagtagttttgttaagtcttaccctgtaatttttgcttttaattttgatacctctttatgacttaacaataaaaagatgtatgggtttttatc

SEQ ID NO: 190624 - DNA, 1391 bp, Homo Sapiens
gagcaatgcttcccttataagagccaactttgtacaaaaaagttggcgaagactgagcggttgtggccgcgttgccgacctccagcagcagtcggcttctctacgcagaacccgggagtaggagactcagaatcgaatctcttctccctccccttcttgtgagatttttttgatcttcagctacattttcggctttgtgagaaaccttaccatcaaacacgatggccagcaacgttaccaacaagacagatcctcgctccatgaactcccgtgtattcattgggaatctcaacactcttgtggtcaagaaatctgatgtggaggcaatcttttcgaagtatggcaaaattgtgggctgctctgttcataagggctttgccttcgttcagtatgttaatgagagaaatgcccgggctgctgtagcaggagaggatggcagaatgattgctggccaggttttagatattaacctggctgcagagccaaaagtgaaccgaggaaaagcaggtgtgaaacgatctgcagcggagatgtacggctcctcttttgacttggactatgactttcaacgggactattatgataggatgtacagttacccagcacgtgtacctcctcctcctcctattgctcgggctgtagtgccctcgaaacgtcagcgtgtatcaggaaacacttcacgaaggggcaaaagtggcttcaattctaagagtggacagcggggatcttccaagtctggaaagttgaaaggagatgaccttcaggccattaagaaggagctgacccagataaaacaaaaagtggattctctcctggaaaacctggaaaaaattgaaaaggaacagagcaaacaagcagtagagatgaagaatgataagtcagaagaggagcagagcagcagctccgtgaagaaagatgagactaatgtgaagatggagtctgaggggggtgcagatgactctgctgaggagggggacctactggatgatgatgataatgaagatcggggggatgaccagctggagttgatcaaggatgatgaaaaagaggctgaggaaggagaggatgacagagacagcgccaatggcgaggatgactcttaagcacatagtggggtttagaaatcttatcccattatttctttacctaggcgcttgtctaagatcaaatttttcaccagatcctctcccctagtatcttcagcacatgctcactgttctccccatccttgtccttcccatgttcattaattcatattgccccgcgcctagtcccattttcacttcctttgacgctcctagtagttttgttaagtcttaccctgtaatttttgcttttaattttgatacctctttatgacttaacaataaaaaggatgtatgggtttttat

SEQ ID NO: 190625 - DNA, 1060 bp, Homo Sapiens
ctttgtacaaaaaagttggcttgtaagagccgacaaaggggatcttccaagtctggaaagttgaaaggagatgaccttcaggccattaagaaggagctgacccagataaaacaaaaagtggattctctcctggaaaacctggaaaaaattgaaaaggaacagagcaaacaagcagtagagatgaagaatgataagtcagaagaggagcagagcagcagctccgtgaagaaagatgagactaatgtgaagatggagtctgaggggggtgcagatgactctgctgaggagggggacctactggatgatgatgataatgaagatcggggggatgaccagctggagttgatcaaggatgatgaaaaagaggctgaggaaggagaggatgacagagacagcgccaatggcgaggatgactcttaagcacatagtggggtttagaaatcttatcccattatttctttacctaggcgcttgtctaagatcaaatttttcaccagatcctctcccctagtatcttcagcacatgctcactgttctccccatccttgtccttcccatgttcattaattcatattgccccgcgcctagtcccattttcacttcctttgacgctcctagtagttttgttaagtcttaccctgtaatttttgcttttaattttgatacctctttatgacttaacaataaaaaggatgtatggtttttatcaactgtctccaaaataatctcttgttatgcagggagtacagttcttttcattcatacataagttcagtagttgcttccctaactgcaaaggcaatctcatttagttgagtagctcttgaaagcagctttgagttagaagtatgtgtgttacaccctcacattagtgtgctgtgtggggcagttcaacacaaatgtaacaatgtatttttgtgaatgagagttggcatgtcaaatgcatcctctagaaaaataattagtgttatagtcttaagatttgttttctaaagttgatactgtgggttatttttgtgaacagcctgatgtttgggaccttttttcctcaaaataaaca

SEQ ID NO: 190626 - DNA, 1082 bp, Homo Sapiens
caactttgtacaaaaaagttggcttacaatggagcagttttgcttttctttgggctggaggaagagcatcctatggtgtgtcaaaaggcaaagtgtgttttgagatgaaggttacagagaagatcccagtaaggcatttatatacaaaagatattgacatacatgaagttcgtattggctggtcactaactacaagtggaatgttacttggtgaagaagaattttcttatgggtattctctaaaaggaataaaaacatgcaactgtgagactgaagattatggagaaaagtttgatgaaaatgatgtgattacatgttttgctaactttgaaagtgatgaagtagaactctcgtatgctaagaatggacaagatcttggcgttgccttcaaaatcagtaaggaagttcttgctggacggccactgttcccgcatgttctctgccacaactgtgcagttgaatttaattttggtcagaaggaaaagccatattttccaatacctgaagagtatactttcatccagaacgtccccttagaggatcgagttagaggaccaaaggggcctgaagagaagaaagattgtgaagttgtgatgatgattggcttgccaggagctggaaaaactacctgggttactaaacatgcagcagaaaatccagggaaatataacattcttggcacaaatactattatggataagatgatggtggcaggttttaagaagcaaatggcagatactggaaaactgaacacactgttgcagagagccccccagtgtcttgggaaatttattgagattgctgcccgaaagaagcgaaattttattctggatcagacaaatgtgtctgctgctgcccagaggagaaaaatgtgcctgtttgcaggcttccagcgaaaagctgttgtagtttgcccaaaagatgaagactataagccaagaacacagaagaaagcagaagtagaggggaaagacctaccagaacatgcggtcctcaaaatgaaaggaaactttaccctcccagagtagctgagtgctttgatgaaatatctatgttgaacttcagaaggaagaagcccaaaa

SEQ ID NO: 190627 - DNA, 987 bp, Homo Sapiens
  misc_feature (345)..(374): n is a, c, g, or t
  misc_feature (477)..(491): n is a, c, g, or t
gtacaaaaaagttggctcaaacagagcccttacaaaagaaccgaggtggaatgcccaacagagggaactacaaccagaacttcagaggacgaggaaacaatcgtggctacaaaaatcaatctcagggctacaaccagtggcagcagggtcaattctggggtcagaagccatggagtcagcattatcaccaaggatattattgaatacccaaataaaacgaactgatacatatttctccaaaaccttcacaagaagtcgactgttttctttagtaggctaactttttaaacattccacaagaggaagtgcctgcgggttccttttttagaagctttgtgggttgannnnnnnnnnnnnnnnnnnnnnnnnnnnnnaattgcagtttaaaagtgaatcgtaagagaacctcagcattgtgcacgataagagaatgtgtcagtatttcagggttctacattttatctgtaaaatgtgacnnnnnnnnnnnnnnnatcacaacagaagtaaaatgttgctttgtacctggtgtcttttattaagaatttactccccccatttctcacagagaataacagtcgggagtcattgtcacaatataatagaaatgttagcaaccagattcatgtaaggactaagtggtcctcatgaattgcattaagactctgtactgctcatattacactccatcctctctgtagtttgctgggtagtggagggggtaagctaaatcatagtttctgacaataactgggaaggttttttcttaaaataacaatggaattggtataattgggattgaaaactaaaacttggaactaagatagagaagatgggagtgtatgtagaagggctgtttaaaatgtaaaacttggttgcattatttgtggaggctcaaacttgtgaaggttaataccataatttttccatttgttctgcattttgattctgaaaagaaagctgggctttgcccaatttcttattaaaaaa

SEQ ID NO: 190628 - DNA, 1625 bp, Homo Sapiens; identical to SEQ ID NO: 183374
  misc_feature (953)..(1007): n is a, c, g, or t
  misc_feature (1110)..(1123): n is a, c, g, or t

SEQ ID NO: 190629 - DNA, 1959 bp, Homo Sapiens; identical to SEQ ID NO: 179971
  misc_feature (300)..(320): n is a, c, g, or t

SEQ ID NO: 190630 - DNA, 941 bp, Homo Sapiens
  misc_feature (668)..(697): n is a, c, g, or t
  misc_feature (801)..(814): n is a, c, g, or t
actttgtacaaaaaagttggcagaaggaagaagcccaaaaactcttggagcaatataaggaagaaagcaaaaaggctcttccaccagaaaagaaacagaacactggctcaaagaaaagcaataaaaataagagtggcaagaaccagtttaacagaggtggtggccatagaggacgtggaggattcaatatgcgtggtggaaatttcagaggaggagcccctgggaatcgtggcggatataataggaggggcaacatgccacagagaggtggtggcggtggaggaagtggtggaatcggctatccataccctcgtgcccctgtttttcctggccgtggtagttactcaaacagagggaactacaacagaggtggaatgcccaacagagggaactacaaccagaacttcagaggacgaggaaacaatcgtggctacaaaaatcaatctcagggctacaaccagtggcagcagggtcaattctggggtcagaagccatggagtcagcattatcaccaaggatattattgaatacccaaataaaacgaactgatacatatttctccaaaaccttcacaagaagtcgactgttttctttagtaggctaactttttaaacattccacaagaggaagtgcctgcgggttccttttttaaagctttgtgggttgannnnnnnnnnnnnnnnnnnnnnnnnnnnnnaattgcagtttaaaagtgaatcgtaagagaaccccagcattgtgcacgataaagagaatgtgtcagtatttcagggttctacattttatctgtaaaatgtgacnnnnnnnnnnnnnnatcacaacagaagtaaaatgttgctttgtacctggtgtctttttattaaaaatttactcccccccatttctcacagaaaataacagtcgggagtccttgtcacaatatattagaaatgtttacaacc

SEQ ID NO: 190631 - DNA, 1108 bp, Homo Sapiens
ttggcacgagaagatcatggccgtggatattttgagtacattgaagagaacaagtatagcaggtataggatgctcacctagttttactcatcccttattcgttcgttgatcggaaagctgtatcaggagacaattctgtctttcagagccaaatctcctcagccacctgttgaagaagaagatgaacacttcgatgacacagtggtttgtcttgatacttataattgtgatctacattttaaaatatcaagagatcgtctcagtgcttcttcccttacaatggagagttttgcttttctttgggctggaggaagagcatcctatggtgtgtcaaaaggcaaagtgtgttttgagatgaaggttacagagaagatcccagtaaggcatttatatacaaaagatattgacatacatgaagttcgtattggctggtcactaactacaagtggaatgttacttggtgaagaagaattttcttatgggtattctctaaaaggaataaaaacatgcaactgtgagactgaagattatggagaaaagtttgatgaaaatgatgtgattacatgttttgctaactttgaaagtgatgaagtagaactctcgtatgctaagaatggacaagatcttggcgttgccttcaaaatcagtaaggaagttcttgctggacggccactgttcccgcatgttctctgccacaactgtgcagttgaatttaattttggtcagaaggaaaagccatattttccaatacctgaagagtatactttcatccagaacgtccccttagaggatcgagttagaggaccaaaggggcctgaagagaagaaagattgtgaagttgtgatgatgattggcttgccaggagctggaaaaactacctgggttactaaacatgcagcagaaaatccagggaaatataacattcttggcacaaatactattatggataagatgatggtggcaggttttaagaagcaaatggcagatactggaaaactgaacacactgttgcagagagccccccagtgtcttgcgaaatttattgagattgctgcccgaaagaagcgaaattttattctggatcagacaaatgtgtctgctgctgccc

SEQ ID NO: 190632 - DNA, 1085 bp, Homo Sapiens; identical to SEQ ID NO: 183376
  misc_feature (218)..(242): n is a, c, g, or t

SEQ ID NO: 190633 - DNA, 1792 bp, Homo Sapiens; identical to SEQ ID NO: 183377
  misc_feature (686)..(710): n is a, c, g, or t

SEQ ID NO: 190634 - DNA, 1944 bp, Homo Sapiens; identical to SEQ ID NO: 183378
  misc_feature (108)..(132): n is a, c, g, or t

SEQ ID NO: 190635 - DNA, 1079 bp, Homo Sapiens
gagcccatgggaaatgtgctgaccacggagttcacgctgacgtcccaaatcttggaagttttgtccccagaagcagaaagcaaatgggtgctgtcgggactccaactaattgcgtaaatcccaccgtcgtgggccttgcttccgcccagcgcgcacaccttctccccagtcttcccgtcatagatgtatatctggccgtcagcactggctgtggcaaatctgttcccatcaggagagaatcgcacacagttgacaaagcggctgtggtcgccaactgtgaacttgaacttgaatgggggtccctcaaagaatgccgcgcagttatcatcgcttcccgtggccagccggtatggccggctctgcttgatgtccacgctgttgatgactttgttgtgtcctgtaatctcgcccacagaagagccactatcccagaggaagactgctccaaacttctcccttccttccccgaccacggcgatcctcttactgtcttcagtccaagcaatgtctttgatcttcccagcgaaaggctggtactcatacttcaacaggtgctccttctgcgtggtatcccagatcctcagcttcccagacacatctccggaggcaatgtagaatccgctgggcgcatacttggccaccaccacctgatgggcgtgctctgtgtagatgtcagcaagggctgggttgtcgatgttccttaggatgacgcactttccattggtgtacagaaaattgttgcccttagggtcgccgccgatgatcttggagacgcccctctccacctgcgggaggctggcgaacaccttcttgatctcgtacggcatcctcgcccacttgttaccgcgccgcgctcgccgagagcctccggggccggcccgcgctgcgaattacacctcgccgaggccgagcccggggactggagccggaaggcggcaccgggcgtgccgggagtggagtgggcggtccgaggccggggctcagaggccagctcgcgcctgccctgcgcgctgtggttgcggacgccccgaacccggaagcgcggtcccgcgcgcggctcgcccccagctttgacccaa

SEQ ID NO: 190636 - DNA, 1114 bp, Homo Sapiens; identical to SEQ ID NO: 179972
  misc_feature (202)..(212): n is a, c, g, or t

SEQ ID NO: 190637 - DNA, 1097 bp, Homo Sapiens
  misc_feature (603)..(662): n is a, c, g, or t
ttgggccgggtcgcccctggcccggcgcgcccgtccccggcagcgacaatgagtgaacagagtatctgccaagcccgggcttccgtgatggtctacgatgacaccagtaagaaatgggtaccaatcaaacctggccagcagggattcagccggatcaacatctaccacaacactgccagcaacaccttcagagtcgttggagtcaagttgcaggatcagcaggttgtgatcaattggattcaatcgtgaaagggctgaagtacaatcaggccacgccaaccttccaccagtggcgagatgcccgccaggtctacggcttaaactttgcaagtaaagaagaggcaaccacgttctccaatgcaatgctgtttgccctgaacatcatgaattcccaagaaggaggcccctccagccagcgtcaggtgcagaatggcccctctcctgatgagatggacatccagagaagacaagtgatggagcagcaccagcagcagcgtcaggaatctctagaaagaagaacctcggccacagggcccatcctcccaccaggacatccttcatctgcagccagcgcccccgtctcatgtagtgggcctccaccgnnnnnnnnnnnnnnnnnnnnnnnnnnnnnnnnnnnnnnnnnnnnnnnnnnnnnnnnnnnnctgccagccggaggagcccaggggtccagccacgacgagagctccatgtcaggactggccgctgccatagctggggccaagctgagaagagtccaacggccagaagacgcatctggaggctccagtcccagtgggacctcaaagtccgatgccaaccgggcaagcagcgggggtggcggaggaggcctcatggaggaaatgaacaaactgctggccaagaggagaaaagcagcctcctagtcagacaagctagccgagaagaaggaagatgaaagtcaaatggaagatcctagtacctctctctctccggggactcgagcagccagccagccacctaactcctcagaggctggccggaagctctgggagcggagcaactcggtggagaagccttgtgtccttcgatttctgtccagaactctcgtctgtggcaaa

SEQ ID NO: 190638 - DNA, 1118 bp, Homo Sapiens; identical to SEQ ID NO: 179973
  misc_feature (899)..(976): n is a, c, g, or t

SEQ ID NO: 190639 - DNA, 903 bp, Homo Sapiens
  misc_feature (618)..(631): n is a, c, g, or t
ttggcaaaaagactaccacacaatctaaggaaattgtctctgactaggtcatgtttgcatttgaagaattcagtgaacagagtatctgccaagcccgggcttccgtgatggtctacgatgacaccagtaagaaatgggtaccaatcaaacctggccagcagggattcagccggatcaacatctaccacaacactgccagcaacaccttcagagttggagtcaagttgcaggatcagcaggttgtgatcaattattcaatcgtgaaagggctgaagtacaatcaggccacgccaaccttccaccagtggcgagatgcccgccaggtctacggcttaaactttgcaagtaaagaagaggcaaccacgttctccaatgcaatgctgtttgccctgaacatcatgaattcccaagaaggaggcccctccagccagcgtcaggtgcagaatggcccctctcctgatgagatggacatccagagaagacaagtgatggagcagcaccagcagcagcgtcaggaatctctagaaagaagaacctcggccacagggcccatcctcccaccaggacatccttcatctgcagccagcgcccccgtctcatgtagtgggcctccaccgnnnnnnnnnnnnnnagtcccacctccacccactggggctaccccacctcccccacccccactgccagccggaggagcccaggggtccagccacgacgagagctccatgtcaggactggccgctgccatagctggggccaagctgagaagagtccaacggccagaagacgcatctggaggctccagtcccagtgggacctcaaagtccgatgccaaccgggcaagcagcgggggtggcggaggacgcctcatggaggaaatgaacaaactgctggccaagaggagaa

SEQ ID NO: 190640 - DNA, 1033 bp, Homo Sapiens
actttgtacaaaaaagttggcccagtgggacctcaaagtccgatgccaaccgggcaagcagcgggggtggcggaggaggcctcatggaggaaatgaacaaactgctggccaagaggagaaaagcagcctcccagtcagacaagccagccgagaagaaggaagatgaaagccaaatggaagatcctagtacctccccctctccggggacccgagcagccagccagccacctaactcctcagaggctggccggaagccctgggagcggagcaactcggtggagaagcctgtgtcctcgattctgtccagaaccccgtctgtggcaaagagccccgaagctaagagcccccttcagtcgcagcctcactctaggatgaagcctgctgggagcgtgaatgacatggccctggatgccttcgacttggaccggatgaagcaggagatcctagaggaggtggtgagagagctccacaaggtgaaggaggagatcatcgacgccatcaggcaggagctgagtgggatcagcaccacgtaaggggccggcctcgctgcgctgattcgtcgagcccatccggcgacagaggacagccagaagcccagccagccccagactccagtgcaccagagcacgcacaggagcctgggcgcgctgctgtgaaacgtcctgacctgtgatcacacatgacagtgaggaaaccaagtgcaactcctgggtttttttagattctgcctgacacggaacaccaggtctgctcgtcttttttgtgttttatatttgcttatttaaggtacatttctttgggtttctagagacgcccctaagtcacctgcttcattagacggtttccaggttttctcccaggtgacgctgttagcgcctcagctggcggtgacagccgggcccagcgtggcgccaccacacaccgcagagctgtccaggcacagctccgtccccagcgctcatggtgttgaaactgtctgtcatgcaccacggtgtctgtgtccacacagtaataaacgggtttactgtccgcc

SEQ ID NO: 190641 - DNA, 1069 bp, Homo Sapiens
  misc_feature (847)..(905): n is a, c, g, or t
ttggtggagcctaagcatacactgcattaatcagacttgctggaatgatcacatggttggctagctgcctcccctgttagctgccgcttgtcagcagctggcggagctggaggctgcaggcccctgtctgcagaaagccttttacttcagaatattggggggtgtggaaaccccgcctcatttttctgcactttgcaccatctgactaactaaatggttgtcctccataccaaaaagactaccacacaatctaaggaaattgtctctgactaggtcatgtttgcatttgaagaattcagtgaacagagtatctgccaagcccgggcttccgtgatggtctacgatgacaccagtaagaaatgggtaccaatcaaacctggccagcagggattcagccggatcaacatctaccacaacactgccagcaacaccttcagagtcgttggagtcaagttgcaggatcagcaggttgtgatcaattattcaatcgtgaaagggctgaagtacaatcaggccacgccaaccttccaccagtggcgagatgcccgccaggtctacggcttaaactttgcaagtaaagaagaggcaaccacgttctccaatgcaatgctgtttgccctgaacatcatgaattcccaagaaggaggcccctccagccagcgtcaggtgcagaatggcccctctcctgatgagatggacatccagagaagacaagtgatggagcagcaccagcagcagcgtcaggaatctctagaaagaagaacctcggccacagggcccatcctcccaccaggacatccttcatctgcagccagcgcccccgtctcatgtagtgggcctccaccgnnnnnnnnnnnnnnnnnnnnnnnnnnnnnnnnnnnnnnnnnnnnnnnnnnnnnnnnnnnactgccagccggaggagcccaggggtccagccacgacgagagctccatgtcaggactggccgctgccatagctggggccaagctgagaagagtccaacggccagaatacgcatctggaggctccagtcccagtgggacctcaaagtccgatgccaaccgggcaa

SEQ ID NO: 190642 - DNA, 1791 bp, Homo Sapiens; identical to SEQ ID NO: 183382
  misc_feature (373)..(385): n is a, c, g, or t
  misc_feature (1461)..(1487): n is a, c, g, or t

SEQ ID NO: 190643 - DNA, 1629 bp, Homo Sapiens; identical to SEQ ID NO: 183383
  misc_feature (338)..(350): n is a, c, g, or t
  misc_feature (1426)..(1452): n is a, c, g, or t

SEQ ID NO: 190644 - DNA, 1118 bp, Homo Sapiens
  misc_feature (1027)..(1053): n is a, c, g, or t
tttgtacaaaaaagttggccctttagggcatttcctctgtaatgtggcgctttcaactgtactgctgcagctttaagtaccttaaagcttctcctgtgaacttcttagggaaatgttaggttcagaactaaagtgttttgggtgggttttgttgcgggggggagggtaacaatgggtggtcttctgatttttatttttgaggttttgtcaactggagtacgtagaggaactttatttacagtactttgatttggcaggttttcttctacttgtgctctgcctggagctgtttccatatgatataaaaagcaagtgtagtattccattactatgtggcttagggatttatttgttttttaaaatcaaccatgttagctgggattagactccctacagtccttcaatggaaaagtaacatttaaaaatcctttgggtaattcaaattacagatttaaaagagcttaagatctggtgttttgttaatgcttctgtttattccagaagcattaaggtaacccattgccaagtatcattcttgcaaattattcttttatataactgaccagtgcttaataaaacaagcaggtacttacaaataattactggcagtaggttataattggtggtttaaaaataacattggaatacaggacttgttgccaattgggtaattttcattagttgttttgtttgttttgatttgaaacctggaaatacagtaaaatttgactgtttaaaatgttggccaaaaaaatcaagatttaatttttttatttgtactgaaaaactaatcataactgttaattctcagccatctttgaagcttgaaagaagagtctttggtattttgtaaacgttagcagactttcctgccagtgtcagaaaatcctatttatgaatcctgtcggtattccttggtatctgaaaaaaataccaaatagtaccatacatgagttatttctaagtttgaaaaataaaaagaaattgcatcacactaattacaaaatacaagttctggaaaaaatannnnnnnnnnnnnnnnnnnnnnnnnnnaactaataatggctttgaaagaagaggcttaatttgggggtggtaactaaaatcaaaagaaatga

SEQ ID NO: 190645 - DNA, 1606 bp, Homo Sapiens; identical to SEQ ID NO: 183384
  misc_feature (307)..(319): n is a, c, g, or t
  misc_feature (1395)..(1421): n is a, c, g, or t

SEQ ID NO: 190646 - DNA, 916 bp, Homo Sapiens
  misc_feature (338)..(349): n is a, c, g, or t
actttgaaaaaatctgattttattttctcaatcaaaatgaagtacttcatgttaatttagactgtttagctttccactgatatctcaagatactttccagatattaacagtactcagaactgtgtaaaagttaaccaccaaaaccatgttttaaagaaaaaagtttaaatgtaagactaatgtcttggggactttactaaatgtatttctaaaaaaacccttctcaaatgtagaagtattggcaattctaatttaaaaattttaaatttttaattattggaaatttaagtagcaatagtttcaagagctaagaatcagattgctttttaaaacagaannnnnnnnnnnncctgagggactcatacttgacaactccagttaaacataatactccacccaaatcccaaatttaaatgcattatgtcaccctggaatagtaaaattataaaatggtatttctaaattataatatatatacataatgcaccattttaactgtcacatttaccagcagaattatgaaatcaaaaacaaattctacattcaagggacaaacgataaatgctctttcattgttttaagagtccattccattctttgttgttttctactcccatattttaaaattatgaccaaaggagcctgaaggccaagtcaatcccatttccctgaacccaactgccagtaggtacgggccctacatacgcgtcctttaacaagccccgttctcaaaaggctgggggtatttatgtaagaacttattccaaagtgactctaagatccatgttcccaagatctagtacgggctattcatggttctgaggcatgtccagcatgcaggcaaacttatctgttcaaattgaggtaaaacagacaaaaaacagcttaatattaacccaacttttttgtacaaagt

SEQ ID NO: 190647 - DNA, 1179 bp, Homo Sapiens
  misc_feature (200)..(212): n is a, c, g, or t
ccaaaaccatgtttaaagaaaaaagtttaaatgtaagactaatgtcttggggactttactaaatgtatttctaaaaaaacccttctcaaatgtagaagtattggcaattctaatttaaaaattttaaatttttaattattggaaatttaagtagcaatagtttcaagagctaagaatcagattgctttttaaaacagaannnnnnnnnnnnncctgagggactcatacttgacaactccagttaaacataatactccacccaaatcccaaatttaaatgcattatgtcaccctggaatagtaaaattataaaatggtatttctaaattataatatatatacataatgcaccattttaactgtcacatttaccagcagaattatgaaatcaaaaacaaattctacattcaagggacaaacgataaatgctctttcattgttttaagagtccattccattctttgttgttttctactcccatattttaaaattatgaccaaaggagcctgaaggccaagtcaatcccatttccctgaacccaactgccagtaggtacgggccctacatacgcgtcctttaacaagccccgttctcaaaaggctgggggtatttatataagaacttattccaaagtgactctaagatccatgttcccaagatctagtacgggctattcatggttctgaggcatgtccagcatgcaggcaaacttatctgttcaaattgaggtaaaacagacaaaaaacacttaatattaacagaagctacataattaaaactaaccttctgctgcttatttaagctaatgatgtattcttaccaaacagagaccctcaagtcaatcatttcttttgattttagttaccacccccaaattaagcctcttctttcaacagccattattagttaaaaaagttttaaaatgaagaaaaatattttttccagaacttgtattttgtaattagtgtgatgcaatttctttttacttttcaaacttagaaataactcatgtatggtactatttggtatttttttcagataccaaggaataccgacaggattcataaataggattttctgacactggcaggaaagtctgctaacgtttacaaaataccaaagactcttctttcaagcttcaaagatggctgagaattaacccaacttttttgtacaaagt

SEQ ID NO: 190648 - DNA, 617 bp, Homo Sapiens
  misc_feature (268)..(279): n is a, c, g, or t
cccctttaatgcccaccttgtacaaaaaagttggcttaaaaccatgaaagagcatttatcgtttgtcccttgaatgtagaatttgtttttgatttcataattctgctggtaaatgtgacagttaaaatggtgcattatgtatatatattataatttagaaataccattttataattttactattccagggtgacataatgcatttaaatttgggatttgggtggagtattatgtttaactggagttgtcaagtatgagtccctcaggnnnnnnnnnnnnttctgttttaaaaagcaatctgattcttagctcttgaaactattgctacttaaatttccaataattaaaaatttaaaatttttaaattagaattgccaatacttctacatttgagaagggtttttttagaaatacatttagtaaagtccccaagacattagtcttacatttaaacttttttctttaaaacatggttttggtggttaacttttacacagttctgagtactgttaatatctggaaagtatcttgagatatcagtggaaagctaaacagtctaaattaacatgaagtacttcattttgattgagaaaataaaatcagattttttcaaagtc

SEQ ID NO: 190649 - DNA, 1288 bp, Homo Sapiens
  misc_feature (104)..(116): n is a, c, g, or t
  misc_feature (1192)..(1218): n is a, c, g, or t
ttggcatttagatcattcctgtaggcttcctattttcactttactgctctaatgctgctagtcgtagtctttagcacactaggtggtatgcctttattagcatnnnnnnnnnnnnnctttaacaggagcttttacatattactgggatggggggtggttcgggatgggtgggcagctgctgaaccctttagggcatttcctctgtaatgtggcgctttcaactgtactgctgcagctttaagtaccttaaagcttctcctgtgaacttcttagggaaatgttaggttcagaactaaagtgttttgggtgggttttgttgcgggggggagggtaacaatgggtggtcttctgatttttatttttgaggttttgtcaactggagtacgtagaggaactttatttacagtactttgatttggcaggttttcttctacttgtgctctgcctggagctgtttccatatgatataaaaagcaagtgtagtattccattactatgtggcttagggatttatttgttttttaaaatcaaccatgttagctgggattagactccctacagtccttcaatggaaaagtaacatttaaaaatcctttgggtaattcaaattacagatttaaaagagcttaagatctggtgttttgttaatgcttctgtttattccagaagcattaaggtaacccattgccaagtatcattcttgcaaattattcttttatataactgaccagtgcttaataaaacaagcaggtacttacaaataattactggcagtaggttataattggtggtttaaaaataacattggaatacaggacttgttgccaattgggtaattttcattagttgttttgtttgttttgatttgaaacctggaaatacagtaaaatttgactgtttaaaatgttggccaaaaaaatcaagatttaatttttttatttgtactgaaaaactaatcataactgttaattctcagccatctttgaagcttgaaagaagagtctttggtattttgtaaacgttagcagactttcctgccagtgtcagaaaatcctatttatgaatcctgtcggtattccttggtatctgaaaaaaataccaaatagtaccatacatgagttatttctaagtttgaaaaataaaaagaaattgcatcacactaattacaaaatacaagttctggaaaaaatannnnnnnnnnnnnnnnnnnnnnnnnnnaactaataatggctttgaaagaagaggcttaatttgggggtggtactaaaatcaaaagaaatgattgact

SEQ ID NO: 190650 - DNA, 914 bp, Homo Sapiens
  misc_feature (180)..(191): n is a, c, g, or t
aaaaagtttaaatgtaagactaatgtcttggggactttactaaatgtatttctacaaaacccttctcaaatgtagaagtattggcaattctaatttaaaaattttaaatttttaattattggaaatttaagtagcaatagtttcaagagctaagaatcagattgctttttaaaacagaannnnnnnnnnnncgtgagggactcatacttgacaactccagttaaacataatactccacccaaatcccaaatttaaatgcattatgtcaccctggaatagtaaaattataaaatggtatttctaaattataatatatatacataatgcaccattttaactgtcacatttaccagcagaattatgaaatcaaaaacaaattctacattcaagggacaaacgataaatgctctttcattgttttaagagtccattccattctttgttgttttctactcccatattttaaaattatgaccaaaggagcctgaaggccaagtcaatcccatttccctgaacccaactgccagtaggtacgggccctacatacgcgtcctttaacaagccccgttctcaaaaggctgggggtatttatgtaagaacttattccaaagtgactctaagatccatgttcccaagatctagtacgggctattcatggttctgaggcatgtccagcatgcaggcaaacttatctgttcaaattgaggtaaaacagacaaaaaacacttaatattaacagaagctacataattaaaactaaccttctgctgcttatttaagctaatgatgtattcttaccaaacagagaccctcaagtcaatcatttcttttgattttagttaccacccccaaattaagcctcttctttcaaagccattattagttaaaaaaaagccaacttttttgtacaaagt

SEQ ID NO: 190651 - DNA, 1375 bp, Homo Sapiens
  misc_feature (184)..(196): n is a, c, g, or t
  misc_feature (1275)..(1304): n is a, c, g, or t
ttggtctgagtttaattcaactgcttccctacatagactagagggctaaggattctgtctgctgctttgtttcttctaagtaggcatttagatcattcctgtaggcttcctattttcactttactgctctaatgctgctagtcatagtctttagcacactaggtggtatgcctttattagcatnnnnnnnnnnnnnctttaacaggatcttttacatattactgggatggggggtggttcgggatgggtgggcagctgctgaaccctttagggcatttcctctgtaatgtggcgctttcaactgtactgctgcagctttaagtaccttaaagcttctcctgtgaacttcttagggaaatgttaggttcagaactaaagtgttttgggtgggttttgttgcgggggggagggtaacaatgggtggtcttctgatttttatttttgaggttttgtcaactggagtacgtagaggaactttatttacagtactttgatttggcaggttttcttctacttgtgctctgcctggagctgtttccatatgatataaaaagcaagtgtagtattccattactatgtggcttagggatttatttgttttttaaaatcaaccatgttagctgggattagactccctacagtccttcaatggaaaagtaacatttaaaaatcctttgggtaattcaaattacagatttaaaagagcttaagatctggtgttttgttaatgcttctgtttattccagaagcattaaggtaacccattgccaagtatcattcttgcaaattattcttttatataactgaccagtgcttaataaaacaagcaggtacttacaaataattactggcagtaggttataattggtggtttaaaaataacattggaatacaggacttgttgccaattgggtaattttcattagttgttttgtttgttttgatttgaaacctggaaatacagtaaaatttgactgttttaaatgttggccaaaaaaatcaagatttaatttttttatttgtactgaaaaactaatcataactgttaattctcagccatctttgaagcttgaaagaagagtctttggtattttgtaaacgttagcagactttcctgccagtgtcagaaaatcctatttatgaatcctgtcggtattccttggtatctgaaaaaaataccaaatagtaccatacatgagttatttcttaagttttgaaaattaaaaagaaattgcatcacactaattacaaaatacaagttctgggaaaaaatannnnnnnnnnnnnnnnnnnnnnnnnnnnnnacctaataatggctttgaaagaagaggcttaatttggggggtggtactaaaatcaaaagaaaatgattgac

SEQ ID NO: 190652 - DNA, 1853 bp, Homo Sapiens; identical to SEQ ID NO: 183385
  misc_feature (1345)..(1357): n is a, c, g, or t

SEQ ID NO: 190653 - DNA, 1439 bp, Homo Sapiens
  misc_feature (220)..(232): n is a, c, g, or t
  misc_feature (1308)..(1334): n is a, c, g, or t
ttgggggaaggtttgttaaatttttgttaatgtgggtaaatctgagtttaattcaactgcttccctacatagactagagggctaaggattctgtctgctgctttgtttcttctaagtaggcatttagatcattcctgtaggcttcctattttcactttactgctctaatgctgctagtcatagtctttagcacactaggtggtatgcctttattagcatnnnnnnnnnnnnnctttaacaggatcttttacatattactgggatggggggtggttcgggatgggtgggcagctgctgaaccctttagggcatttcctctgtaatgtggcgctttcaactgtactgctgcagctttaagtaccttaaagcttctcctgtgaacttcttagggaaatgttaggttcagaactaaagtgttttgggtgggttttgttgcgggggggagggtaacaatgggtggtcttctgatttttatttttgaggttttgtcaactggagtacgtagaggaactttatttacagtactttgatttggcaggttttcttctacttgtgctctgcctggagctgtttccatatgatataaaaagcaagtgtagtattccattactatgtggcttagggatttatttgttttttaaaatcaaccatgttagctgggattagactccctacagtccttcaatggaaaagtaacatttaaaaatcctttgggtaattcaaattacagatttaaaagagcttaagatctggtgttttgttaatgcttctgtttattccagaagcattaaggtaacccattgccaagtatcattcttgcaaattattcttttatataactgaccagtgcttaataaaacaagcaggtacttacaaataattactggcagtaggttataattggtggtttaaaaataacattggaatacaggacttgttgccaattgggtaattttcattagttgttttgtttgttttgatttgaaacctggaaatacagtaaaatttgactgtttaaaatgttggccaaaaaaatcaagatttaatttttttatttgtactgaaaaactaatcataactgttaattctcagccatctttgaagcttgaaagaagagtctttggtattttgtaaacgttagcagactttcctgccagtgtcagaaaatcctatttatgaatcctgtcggtattccttggtatctgaaaaaaataccaaatagtaccatacatgagttatttctaagtttgaaaaataaaaagaaattgcatcacactaattacaaaatacaagttctggaaaaaatannnnnnnnnnnnnnnnnnnnnnnnnnnaactaataatggctttgaaagagaggcttaatttgggggtggtaactaaaatcaaagaaatgattgacttgagggtctctgtttggtaagaatacatcattagct

SEQ ID NO: 190654 - DNA, 1848 bp, Homo Sapiens; identical to SEQ ID NO: 183386
  misc_feature (1583)..(1594): n is a, c, g, or t

SEQ ID NO: 190655 - DNA, 1510 bp, Homo Sapiens
  misc_feature (178)..(204): n is a, c, g, or t
  misc_feature (1280)..(1292): n is a, c, g, or t
taaaacagacaaaaaacacttaatattaacagaagctacataattaaaactaatttctgctgcttatttaagctaatgatgtattcttaccaaacagagaccctcaagtcaatcatttcttttgattttagttaccacccccaaattaagcctcttctttcaaagccattattagttnnnnnnnnnnnnnnnnnnnnnnnnnnntattttttccagaacttgtattttgtaattagtgtgatgcaatttctttttatttttcaaacttagaaataactcatgtatggtactatttggtatttttttcagataccaaggaataccgacaggattcataaataggattttctgacactggcaggaaagtctgctaacgtttacaaaataccaaagactcttctttcaagcttcaaagatggctgagaattaacagttatgattagtttttcagtacaaataaaaaaattaaatcttgatttttttggccaacattttaaacagtcaaattttactgtatttccaggtttcaaatcaaaacaaacaaaacaactaatgaaaattacccaattggcaacaagtcctgtattccaatgttatttttaaaccaccaattataacctactgccagtaattatttgtaagtacctgcttgttttattaagcactggtcagttatataaaagaataatttgcaagaatgatacttggcaatgggttaccttaatgcttctggaataaacagaagcattaacaaaacaccagatcttaagctcttttaaatctgtaatttgaattacccaaaggatttttaaatgttacttttccattgaaggactgtagggagtctaatcccagctaacatggttgattttaaaaaacaaataaatccctaagccacatagtaatggaatactacacttgctttttatatcatatggaaacagctccaggcagagcacaagtagaagaaaacctgccaaatcaaagtactgtaaataaagttcctctacgtactccagttgacaaaacctcaaaaataaaaatcagaagaccacccattgttaccctcccccccgcaacaaaacccacccaaaacactttagttctgaacctaacatttccctaagaagttcacaggagaagctttaaggtacttaaagctgcagcagtacagttgaaagcgccacattacagaggaaatgccctaaagggttcagcagctgcccacccatcccgaaccaccccccatcccagtaatatgtaaaagatcctgttaaagnnnnnnnnnnnnnatgctaataaaggcataccacctagtgtgctaaagactatgactagcagcattagagcagtaaagtgaaaataggaagcctacaggaatgatctaaatgcctacttagaagaaacaaagcagcagacagaatccttagccctctagtctatgtagggaagcagttgaattaaactcagatttacccacattaacaaaaatttaacaaaccttccccaa

SEQ ID NO: 190656 - DNA, 2602 bp, Homo Sapiens; identical to SEQ ID NO: 183387

SEQ ID NO: 190657 - DNA, 1902 bp, Homo Sapiens; identical to SEQ ID NO: 179975
  misc_feature (1492)..(1565): n is a, c, g, or t

SEQ ID NO: 190658 - DNA, 753 bp, Homo Sapiens
  misc_feature (70)..(82): n is a, c, g, or t
cagccaacacaagaaccagaaaatggtagatgaaatgaaggaataaaggtggggtttattccttattatnnnnnnnnnnnnntaattcttcagcagtcttaacaaagacatcaagatacaaaattacaagtgttttgactccagccctgtccccatctcctccaagagcagaggtaggagacagttgaagcaaacaagcaattctgtaaaaattacctagaaaccctacaaatttgattaaaatctaaacttctataattttgctttttaaaaaatttaatatcaaaaggcctgctttagtgacatgctattcctaccagaaaataaccccaataccccctctgtcagtaacatgctcaagttgaccagccaactcttatctctaaacctatgtggacaagtgtgtcttttaaaccaaagccacggagatcaagtgactgctagtaacgtgttgtctgttaactaatccagtgcccaccttctccagagggtgggcagggcagaaacccaaaagggtcttgagggcctaatcccagatcaccatctaagaaccacttcccttgctctctactcaaaatgagatgctttatttctaatccgactatttgtctcaaatttggtgccccgtgacctggatggttttttcctttagcaaaacacacataatccacaaaaccatacatatagttttttgtctttacatttaaatataaaaatagtattctgctttgtgccaacttttttgtacaaagt

SEQ ID NO: 190659 - DNA, 819 bp, Homo Sapiens
  misc_feature (599)..(611): n is a, c, g, or t
tttgtacaaaaaagttgggtgtgttttgctaaaggaaaaaaccatccaggtcacggggcaccaaatttgagacaaatagtcggattagaaataaagcatctcattttgagtagagagcaagggaagtggttcttagatggtgatctgggattaggccctcaagacccttttgggtttctgccctgcccaccctctggagaaggtgggcactggattagttaacagacgacacgttactagcagtcacttgatctccgtggctttggtttaaaagacacacttgtccacataggtttagagataagagttggctggtcaacttgagcatgttactgacagagggggtattggggttattttctggtaggaatagcatgtcactaaagcaggccttttgatattaaattttttaaaaagcaaaattatagaagtttagattttaatcaaatttgtagggtttctaggtaatttttacagaattgcttgtttgcttcaactgtctcctacctctgctcttggaggagatggggacagggctggagtcaaaacacttgtaattttgtatcttgatgtctttgttaagactgctgaagaattannnnnnnnnnnnnataataaggaataaaccccacctttattccttcatttcatctaccattttctggttcttgtgttggctgtggcaggccagctgtggttttcttttgccatgacaacttctaattgccatgtacagtatgttcaaagtcaaataactcctcattgtaaacaaactgtgtaactgcccaaagcagcacttataaatcagcctaacataag

SEQ ID NO: 190660 - DNA, 852 bp, Homo Sapiens
  misc_feature (209)..(221): n is a, c, g, or t
ttaagataggctgatttataagtgctgctttgggcagttacacagttttgtttacaatgaggagttatttgactttgaacatactgtacatggcaattagaagttgtcatggcaaaagaaaaccacagctggcctgccacagccaacacaagaaccagaaaatggtagatgaaatgaaggaataaaggtggggtttattccttattatnnnnnnnnnnnnntaattcttcagcagtcttaacaaagacatcaagatacaaaattacaagtgttttgactccagccctgtccccatctcctccaagagcagaggtaggagacagttgaagcaaacaagcaattctgtaaaaattacctagaaaccctacaaatttgattaaaatctaaacttctataattttgctttttaaaaaatttaatatcaaaaggcctgctttagtgacatgctattcctaccagaaaataaccccaataccccctctgtcagtaacatgctcaagttgaccagccaactcttatctctaaacctatgtggacaagtgtgtcttttaaaccaaagccacggagatcaagtgactgctagtaacgtgtcgtctgttaactaatccagtgcccaccttctccagagggtgggcagggcagaaacccaaaagggtcttgagggcctaatcccagatcaccatctaagaaccacttcccttgctctctactcaaaatgagatgctttatttctaatccgactatttgtctcaaatttggtgccccgtgacctggatggttttttcctttagcaaaacacacataatccacaaaaccatggcgatatagtttttccaacttttttgtacaaag

SEQ ID NO: 190661 - DNA, 656 bp, Homo Sapiens; identical to SEQ ID NO: 183388
  misc_feature (439)..(451): n is a, c, g, or t

SEQ ID NO: 190662 - DNA, 1272 bp, Homo Sapiens
  misc_feature (1092)..(1104): n is a, c, g, or t
gtacaaaaaagttcggcttcatcccactccaactcttccccctctcccagttgtcccgattgtaactcaaagggtggaatatcaaggtcgtttttttcattccatgtgcccagttaatcttgctttctttgtttggctgggatagaggggtcaagttattaatttcttcacacctaccctcctttttttccctatcactgaagctttttagtgcattagtggggaggagggtggggagacataaccactgcttccatttaatggggtgcacctgtccaataggcgtagctatccggacagagcacgtttgcagaagggggactcttcttccaggtagctgaaaggggaagacctgacgtactctggttaggttaggacttgccctcgtggtggaaacttttcttaaaaagttataaccaacttttctattaaaagtgtggattaggagagaaggtaggggttgggaatcagagagaatggctttggtctcttgcttgtgggactagcctggcttgggactaaatgccctgctctgaacacgaagcttagtataaactgatggatatccctaccttgaaagaagaaaaggttcttactgcttggtccttgatttatcacacaaagcagaatagtatttttatatttaaatgtaaagacaaaaaactatatgtatggttttgtggattatgtgtgttttgctaaaggaaaaaaccatccaggtcacggggcaccaaatttgagacaaatagtcggattagaaataaaagacacacttgtccacataggtttagagataagagttggctggtcaacttgagcatgttactgacagagggggtattggggttattttctggtaggaatagcatgtcactaaagcaggccttttgatattaaattttttaaaaagcaaaattatagaagtttagattttaatcaaatttgtagggtttctaggtaatttttacagaattgcttgtttgcttcaactgtctcctacctctgctcttggaggagatggggacagggctggagtcaaaacacttgtaattttgtatcttgatgtctttgttaagactgctgaagaattannnnnnnnnnnnnataataaggaataaaccccacctttattccttcatttcatctaccattttctggttcttgtgttggctgtggcaggccagctgtggttttcttttgccatgacaacttctaattgccatgtacagtatgttcaaagtcaaataactccctcattgtaaacaaactgtg

SEQ ID NO: 190663 - DNA, 759 bp, Homo Sapiens
  misc_feature (539)..(551): n is a, c, g, or t
ccaactttgtacaaaatagtcggattagaaatcaagcatctcattttgagtagagagcaagggaagtggttcttagatggtgatctgggattaggccctcaagacccttttgggtttctgccctgcccaccctctggagaaggtgggcactggattagttaacagacaacacgttactagcagtcacttgatctccgtggctttggtttaaaagacacacttgtccacataggtttagagataagagttggctggtcaacttgagcatgttactgacagagggggtattggggttattttctggtaggaatagcatgtcactaaagcaggccttttgatattaaattttttaaaaagcaaaattatagaagtttagattttaatcaaatttgtagggtttctaggtaatttttacagaattgcttgtttgcttcaactgtctcctacctctgctcttggaggagatagggacagggctggagtcaaaacacttgtaattttgtatcttgatgtctttgttaagactgctgaagaattannnnnnnnnnnnnataataaggaataaaccccacctttattccttcatttcatctaccattttctggttcttgtgttggctgtggcaggccagctgtggttttcttttgccatgacaacttctaattgccatgtacagtatgttcaaagtcaaataactcctcattgtaaacaaactgtgtaactgcccaaagcagcacttataaatcagcctaacataag

SEQ ID NO: 190664 - DNA, 1321 bp, Homo Sapiens
  misc_feature (1170)..(1182): n is a, c, g, or t
ctttgtacaaaaaagttggcttgctttctttgtttggctgggatagaggggtcaagttattaatttcttcacacctaccctcctttttttccctatcactgaagctttttagtgcattagtggggaggagggtggggagacataaccactgcttccatttaatggggtgcacctgtccaataggcgtagctatccggacagagcacgtttgcagaagggggtctcttcttccaggtagctgaaaggggaagacctgacgtactctggttaggttaggacttgccctcgtggtggaaacttttcttaaaaagttataaccaacttttctattaaaagtgggaattaggagagaaggtaggggttgggaatcagagagaatggctttggtctcttgcttgtgggactagcctggcttgggactaaatgccctgctctgaacacgaagcttagtataaactgatggatatccctaccttgaaagaagaaaaggttcttactgcttggtccttgatttatcacacaaagcagaatagtatttttatatttaaatgtaaagacaaaaaactatatgtatggttttgtggattatgtgtgttttgctaaaggaaaaaaccatccaggtcacggggcaccaaatttgagacaaatagtcggattagaaataaagcatctcattttgagtagagagcaagggaagtggttcttagatggtgatctgggattaggccctcaagacccttttgggtttctgccctgcccaccctctggagaaggtgggcactggattagttaacagacgacacgttactagcagtcacttgatctccgtggctttggtttaaaagacacacttgtccacataggtttagagataagagttggctggtcaacttgagcatgttactgacagagggggtattggggttattttctggtaggaatagcatgtcactaaagcaggccttttgatattaaattttttaaaaagcaaaattatagaagtttagattttaatcaaatttgtagggtttctaggtaatttttacagaattgcttgtttgcttcaactgtctcctacctctgctcttggaggagatggggacagggctggagtcaaaacacttgtaattttgtatcttgatgtctttgttaagactgctgaagaattannnnnnnnnnnnnataataaagaataaaccccacctttattccttcatttcatctaccattttctggttcttgtgttggctgtggcagccagctgtggttttcttttgccatgacaacttctaattgccatgtacagtatgttcaaagtcaa

SEQ ID NO: 190665 - DNA, 663 bp, Homo Sapiens
  misc_feature (473)..(513): n is a, c, g, or t
gccaactttgtacaaaaaagttggagaggctttttcagcattactgtgtcgtctccgtgccagatgtggcaagatcaccattagcaaatggaaattacatttgaaagccattagacttataggtgatgcaagcatctaagagagaggttaatcacactatagaggcataagtggtatcagttttcatttttctaattgtttaaactgtgttttataccagtgtttgcaagtaattgggtgttagcttgagatggttaaaggtggtttggggagggacttcgttgtaatggttttgctgtaaaaaatgtttccaactccgctgaaatgttgctgaaaagcatggtgctggtaacagttcaacaatccgtggctgctcattcttgcctactttactctcccactgaagcaggttagcgttgaaggtggtatggaaaagcctgcatgcctgttcaattcttttgtttcttctcctnnnnnnnnnnnnnnnnnnnnnnnnnnnnnnnnnnnnnnnnntcgctcgctcaacctcttttgttcagtatgtgtaacttgaagctaatttgtactactggatatctgactggagccacagatacagaatctgtattgttcttactgaaacacaacatggaattaacattaaacttaaataaaacaaaccta

SEQ ID NO: 190666 - DNA, 619 bp, Homo Sapiens
  misc_feature (412)..(456): n is a, c, g, or t
actttgtacaaaaaagttggccattagcaaatgcaaattacatttgaaagccattagacttataggtgatgcaagcatctaagagagaggttaatcacactatagaggcataagtggtatcagttttcatttttctaattgtttaaactgtgttttataccagtgtttgcaagtaattgggtgttagcttgagatggttaaaggtggtttggggagggacttcgttgtaatggttttgctgtaaaaaatgtttccaactccgctgaaatgttgctgaaaagcatggtgctggtaacagttcaacaatccgtggctgctcattcttgcctactttactctcccactgaagcaggttagcgttgaaggtggtatggaaaagcctgcatgcctgttcaattcttttgtttcttcnnnnnnnnnnnnnnnnnnnnnnnnnnnnnnnnnnnnnnnnnnnnntcgctcgctcaacctcttttgttcagtatgtgtaacttgaagctaatttgtactactggatatctgactggagccacagatacagaatctgtattgttcttactgaaacacagcatggaattaacattaaacttaaataaaacaaacctaaattaaaaatgcc

SEQ ID NO: 190667 - DNA, 697 bp, Homo Sapiens
  misc_feature (135)..(153): n is a, c, g, or t
ttggcaacaagagaaaccatctctgaccaccccctcctccccatcccaccctttggaaactccccattgtcactgagaaccaccaaatctgacttttacatttggtctcagaatttaggttcctgccctgttggnnnnnnnnnnnnnnnnnnnaaacagttttcaaaagttcttaaaggcaagagtgaatttctgtggattttactggtcccagcttttaggttctttaaaacactaacaggactacatagaggctttttcagcattactgtgtcgtctccgtgccaaatgtggcaagatcaccattagcaaatggaaattacatttgaaagccattaaacttataggtgatgcaagcatctaaaagagaggttaatcacactatagaggcataagtggtatcagttttcatttttctaattgtttaaactgtgttttataccagtgtttgcaagtaattgggtgttagcttgagatggttaaaggtggtttggggagggacttcgttgtaatggttttgctgtaaaaaatgtttccaactccgctgaaatgttgctgaaaagcatggtgctggtaacagttcaacaatccgtggctgctcattcttgcctactttactctcccactgaagcaggttagcgttgaaggtggtatggaaaagcctgcatgcctgttcaattcttttgtttcttctcct

SEQ ID NO: 190668 - DNA, 237 bp, Homo Sapiens
ttgtacaaaaaagttggggttaaaggtggttctaagaaaagagggacttcgttgtaatggttttgctgtaaaaaatgtttccaactccgctgaaatgttgctgaaaagcatggtgctggtaacagttcaacaatccgtggctgctcattcttgcctactttactctcccactgaagcaggttagcgttgaaggtggtatggaaaagcctgcatgcctgttcaattcttttgtttctt

SEQ ID NO: 190669 - DNA, 1041 bp, Homo Sapiens
tttgtacaaaaaagttgggtatctgtgggtggcccggagcacggagatctcgccggctttacgttcacctcggtgtctgcagcaccctccgcttcctctcctaggcgacgagacccagtggctagaagttcaccatgtctattctcaagatccatgccagggagatctttgactctcgcgggaatcccactgttgaggttgatctcttcacctcaaaaggtctcttcagagctgctgtgcccagtggtgcttcaactggtatctatgaggccctagagctccgggacaatgataagactcgctatatggggaagggtgtctcaaaggctgttgagcacatcaataaaactattgcgcctgccctggttagcaagaaactgaacgtcacagaacaagagaagattgacaaactgatgatcgagatggatggaacagaaaataaatctaagtttggtgcgaacgccattctgggggtgtcccttgccgtctgcaaagctggtgccgttgagaagggggtccccctgtaccgccacatcgctgacttggctggcaactctgaagtcatcctgccagtcccggcgttcaatgtcatcaatggcggttctcatgctggcaacaagctggccatgcaggagttcatgatcctcccagtcggtgcagcaaacttcagggaagccatgcgcattggagcagaggtttaccacaacctgaagaatgtcatcaaggagaaatatgggaaagatgccaccaatgtgggggatgaaggcgggtttgctcccaacatcctggagaataaagaagcctggagctgctgaagactgctattgggaaagctggctacactgataagtggtcatcggcatggacgtagcggcctccgagttcttcaggtctgggaagtatgacctggacttcaagtctcccgatgaccccagcaggtacatctcgcctgaccagctggctgacctgtacaagtccttcatcaaggactacccagtggtgtctatcgaagatccctttgaccaggatgactggggagct

SEQ ID NO: 190670 - DNA, 1023 bp, Homo Sapiens
caactttgtacaaaaaagttggcacggagatctcgccggctttacgttcacctcggtgtctgcagcaccctccgcttcctctcctaggcgacgagacccagtggctagaagttcaccatgtctattctcaagatccatgccagggagatctttgactctcgcgggaatcccactgttgaggttgatctcttcacctcaaaaggtctcttcagagctgctgtgcccagtggtgcttcaactggtatctatgaggccctagagctccgggacaatgataagactcgctatatggggaagggtgtctcaaaggctgttgagcacatcaataaaactattgcgcctgccctggttagcaagaaactgaacgtcacagaacaagagaagattgacaaactgatgatcgagatggatggaacagaaaataaatctaagtttggtgcgaacgccattctgggggtgtcccttgccgtctgcaaagctggtgccgttgagaagggggtccccctgtaccgccacatcgctgacttggctggcaactctgaagtcatcctgccagtcccggcgttcaatgtcatcaatggcggttctcatgctggcaacaagctggccatgcaggagttcatgatcctcccagtcggtgcagcaaacttcagggaagccatgcgcattggagcagaggtttaccacaacctgaagaatgtcatcaaggagaaatatgggaaagatgccaccaatgtgggggatgaaggcgggtttgctcccaacatcctggagaataaagaaggcctggagctgctgaagactgctattgggaaagctggctacactgataaggtggtcatcggcatggacgtagcggcctccgagttcttcaagtctgggaagtatgacctggacttcaagtctcccgatgaacccagcaggtacatctcgcctgaccagctggctgacctgtacaagtccttcatcaaggactacccagtggtgtctatcgaaaatctctttgaccaggatgactgggga

SEQ ID NO: 190671 - DNA, 965 bp, Homo Sapiens
caatgcttttcctataaagccaactttgtacaaaaaagttggcacggagatctcgccggctttacgttcacctcggtgtctgcagcaccctccgcttcctctcctaggcgacgagacccagtggctagaagttcaccatgtctattctcaagatccatgccagggagatctttgactctcgcgggaatcccactgttgaggttgatctcttcacctcaaaaggtctcttcagagctgctgtgcccagtggtgcttcaactggtatctatgaggccctagagctccgggacaatgataagactcgctatatggggaagggtgtctcaaaggctgttgagcacatcaataaaactattgcgcctgccctggttagcaagaaactgaacgtcacagaacaagagaagattgacaaactgatgatcgagatggatggaacagaaaataaatctaagtttggtgcgaacgccattctgggggtgtcccttgccgtctgcaaagctggtgccgttgagaagggggtccccctgtaccgccacatcgctgacttggctggcaactctgaagtcatcctgccagtcccggcgttcaatgtcatcaatggcggttctcatgctggcaacaagctggccatgcaggagttcatgatcctcccagtcggtgcagcaaacttcagggaagccatgcgcattggagcagaggtttaccacaacctgaagaatgtcatcaaggagaaatatgggaaagatgccaccaatgtgggggatgaaggcgggtttgctcccaacatcctggagaataaagaagcctggagctgctgaagactgctattgggaaagctggctacactgataaggtggtcatcggcatggacgtagcggcctccgagttcttcaggtctgggaagtatgacctggacttcaagtctcccgatgaccccagcaggtacatctcgcctgaccagctgg

SEQ ID NO: 190672 - DNA, 1094 bp, Homo Sapiens
ctttgtacaaaaaagttggctcaaaggctgttgagcacatcaataaaactattgcgcctgccctggttagcaagaaactgaacgtcacagaacaagagaagattgacaaactgatgatcgagatggatggaacagaaaataaatctaagtttggtgcgaacgccattctgggggtgtcccttgccgtctgcaaagctggtgccgttgagaagggggtccccctgtaccgccacatcgctgacttggctggcaactctgaagtcatcctgccagtcccggcgttcaatgtcatcaatggcggttctcatgctggcaacaagctggccatgcaggagttcatgatcctcccagtcggtgcagcaaacttcagggaagccatgcgcattggagcagaggtttaccacaacctgaagaatgtcatcaaggagaaatatgggaaagatgccaccaatgtgggggatgaaggcgggtttgctcccaacatcctggagaataaagaaggcctggagctgctgaagactgctattgggaaagctggctacactgataaggtggtcatcggcatggacgtagcggcctccgagttcttcaggtctgggaagtatgacctggacttcaagtctcccgatgaccccagcaggtacatctcgcctgaccagctggctgacctgtacaagtccttcatcaaggactacccagtggtgtctatcgaagatccctttgaccaggatgactggggagcttggcagaagttcacagccagtgcaggaatccaggtagtgggggatgatctcacagtgaccaacccaaagaggatcgccaaggccgtgaacgagaagtcctgcaactgcctcctgctcaaagtcaaccagattggctccgtgaccgagtctcttcaggcgtgcaagctggcccaggccaatggttggggcgtcatggtgtctcatcgttcgggggagactgaagataccttcatcgctgacctggtttgtggggctgtgcactgggcaaatcaagactggtgccccttgccgatctgagcgcttggacaagtacaaccagctcctcagaattgaagaggagctgggcagcaa

SEQ ID NO: 190673 - DNA, 868 bp, Homo Sapiens
tttgtacaaaaaagttggcatctcgcctgaccagctggctgacctgtacaagtccttcatcaaggactacccagtggtgtctatcgaagatccctttgaccaggatgactggggagcttggcagaagttcacagccagtgcaggaatccaggtagtgggggatgatctcacagtgaccaacccaaagaggatcgccaaggccgtgaacgagaagtcctgcaactgcctcctgctcaaagtcaaccagattggctccgtgaccgagtctcttcaggcgtgcaagctggcccaggccaatggttggggcgtcatggtgtctcatcgttcgggggagactgaagataccttcatcgctgacctggttgtggggctgtgcactgggcagatcaagactggtgccccttgccgatctgagcgcttggccaagtacaaccagctcctcagaattgaagaggagctgggcagcaaggctaagtttgccggcaggaacttcagaaaccccttggccaagtaagctgtgggcaggcaagcccttcggtcacctgttggctacacagacccctcccctcgtgtcagctcaggcagctcgaggcccccgaccaacacttgcaggggtccctgctagttagcgccccaccgccgtggagttcgtaccgcttccttagaacttctacagaagccaagctccctggagccctgttggcagctctagctttgcagtcgtgtaattggcccaagtcattgtttttctcgcctcactttccaccaagtgtctagagtcatgtgagcctcgtgtcatctccggggtggccacaggctagatccccggtggttttgtgctcaaaataaaaagcctcagtgacccatg

SEQ ID NO: 190674 - DNA, 852 bp, Homo Sapiens
atggccaactttgtacaaaaaagttggcacaacctgaagaatgtcatcaaggagaaatatgggaaagatgccaccaatgtgggggatgaaggcgggtttgctcccaacatcctggagaataaagaaggcctggagctgctgaagactgctattgggaaagctggctacactgataaggtggtcatcggcatggacgtagcggcctccgagttcttcaggtctgggaagtatgacctggacttcaagtctcccgatgaccccagcaggtacatctcgcctgaccagctggctgacctgtacaagtccttcatcaaggactacccagtggtgtctatcgaagatccctttgaccaggatgactggggagcttggcagaagttcacagccagtgcaggaatccaggtagtgggggatgatctcacagtgaccaacccaaagaggatcgccaaggccgtgaacgagaagtcctgcaactgcctcctgctcaaagtcaaccagattggctccgtgaccgagtctcttcaggcgtgcaagctggcccaggccaatggttggggcgtcatggtgtctcatcgttcgggggagactgaagataccttcatcgctgacctggttgtggggctgtgcactgggcagatcaagactggtgccccttgccgatctgagcgcttggccaagtacaaccagctcctcagaattgaagaggagctgggcagcaaggctaagtttgccggcaggaacttcagaaaccccttggccaagtaagctgtggggcaggcaagcccttcggtcactgttggctacacggaccctacccctcctgtcacctcaggcagctccgaggcctcccga

SEQ ID NO: 190675 - DNA, 954 bp, Homo Sapiens; identical to SEQ ID NO: 179976

SEQ ID NO: 190676 - DNA, 1905 bp, Homo Sapiens; identical to SEQ ID NO: 183391
  misc_feature (1843)..(1851): n is a, c, g, or t

SEQ ID NO: 190677 - DNA, 268 bp, Homo Sapiens
  misc_feature (206)..(215): n is a, c, g, or t
ctttgtacaaaaaagttgggctttcaagtgcctttctgcagtttttcaggagcgcaagatagatttggaataggaataagctctagttcttaacaaccgacactcctacaagatttagaaaaaagtttacaacataatctagtttacagaaaaatcttgtgctagaatactttttaaaaggtattttgaataccattaaaactgcnnnnnnnnnnccagcaagtatccaaccaacttggttctgcttcaataaatctttggaaaaact

SEQ ID NO: 190678 - DNA, 503 bp, Homo Sapiens
  misc_feature (449)..(458): n is a, c, g, or t
ttggatctggattcactccctctggttgataccagattagtttccctcaggttcagggaggaaaactaatctggattcactccctctggttgatacccactcaaaaaggacacttctgattaagacggttgaaactagagatggacaggttatcaacgaaacttctcagcatcacgatgaccttgaataaaaattgcacacactcagtgcagcaatatattaccagcaagaataaaaaagaaatccatatcttaaagaaacagctttcaagtgcctttctgcagtttttcaggagcgcaagatagatttggaataggaataagctctagttcttaacaaccgacactcctacaagatttagaaaaaagtttacaacataatctagtttacagaaaaatcttgtgctagaatactttttaaaaggtattttgaataccattaaaactgcnnnnnnnnnnccagcacctatccaaccaacttggttctgcttcaataaatctttg

SEQ ID NO: 190679 - DNA, 1098 bp, Homo Sapiens
  misc_feature (1035)..(1044): n is a, c, g, or t
ttgtacaaaaaagttggctggcacgtcttgaccttgaacgcaaagtggaatctttgcaagaagagattgcctttttgaagaaactccacgaagaggaaatccaggagctgcaggctcagattcaggaacagcatgtccaaatcgatgtggatgtttccaagcctgacctcacggctgccctgcgtgacgtacgtcagcaatatgaaagtgtggctgccaagaacctgcaggaggcagaagaatggtacaaatccaagtttgctgacctctctgaggctgccaaccggaacaatgacgccctgcgccaggcaaagcaggagtccactgagtaccggagacaggtgcagtccctcacctgtgaagtggatgcccttaaaggaaccaatgagtccctggaacgccagatgcgtgaaatggaagagaactttgccgttgaagctgctaactaccaagacactattggccgcctgcaggatgagattcagaatatgaaggaggaaatggctcgtcaccttcgtgaataccaagacctgctcaatgttaagatggcccttgacattgagattgccacctacaggaagctgctggaaggcgaggagagcaggatttctctgcctcttccaaacttttcctccctgaacctgagggaaactaatctggattcactccctctggttgatacccactcaaaaaggacacttctgattaagacggttgaaactagagatggacaggttatcaacgaaacttctcagcatcacgatgaccttgaataaaaattgcacacactcagtgcagcaatatattaccagcaagaataaaaaagaaatccatatcttaaagaaacagctttcaagtgcctttctgcagtttttcaggagcgcaagatagatttggaataggaataagctctagttcttaacaaccgacactcctacaagatttagaaaaaagtttacaacataatctagtttacagaaaaatcttgtgctagaatactttttaaaaggtattttgaataccattaaaactgcnnnnnnnnnnccagcaagtatccaaccaacttggttctgcttcaataaatctttggaaaaactc

SEQ ID NO: 190680 - DNA, 1738 bp, Homo Sapiens; identical to SEQ ID NO: 183394
  misc_feature (295)..(307): n is a, c, g, or t
  misc_feature (997)..(1023): n is a, c, g, or t

SEQ ID NO: 190681 - DNA, 2732 bp, Homo Sapiens; identical to SEQ ID NO: 183395
  misc_feature (146)..(154): n is a, c, g, or t

SEQ ID NO: 190682 - DNA, 1408 bp, Homo Sapiens; identical to SEQ ID NO: 183396
  misc_feature (1057)..(1117): n is a, c, g, or t

SEQ ID NO: 190683 - DNA, 1515 bp, Homo Sapiens; identical to SEQ ID NO: 183397
  misc_feature (222)..(247): n is a, c, g, or t

SEQ ID NO: 190684 - DNA, 2708 bp, Homo Sapiens; identical to SEQ ID NO: 183398

SEQ ID NO: 190685 - DNA, 1384 bp, Homo Sapiens; identical to SEQ ID NO: 183399
  misc_feature (260)..(272): n is a, c, g, or t
  misc_feature (1062)..(1117): n is a, c, g, or t

SEQ ID NO: 190686 - DNA, 1698 bp, Homo Sapiens; identical to SEQ ID NO: 183400
  misc_feature (151)..(163): n is a, c, g, or t

SEQ ID NO: 190687 - DNA, 1242 bp, Homo Sapiens; identical to SEQ ID NO: 183401
  misc_feature (90)..(150): n is a, c, g, or t

SEQ ID NO: 190688 - DNA, 1499 bp, Homo Sapiens; identical to SEQ ID NO: 183402
  misc_feature (531)..(557): n is a, c, g, or t
  misc_feature (1248)..(1260): n is a, c, g, or t

SEQ ID NO: 190689 - DNA, 1240 bp, Homo Sapiens; identical to SEQ ID NO: 183403

SEQ ID NO: 190690 - DNA, 2030 bp, Homo Sapiens; identical to SEQ ID NO: 183404
  misc_feature (224)..(249): n is a, c, g, or t

SEQ ID NO: 190691 - DNA, 942 bp, Homo Sapiens; identical to SEQ ID NO: 183405
  misc_feature (89)..(97): n is a, c, g, or t
  misc_feature (543)..(555): n is a, c, g, or t

SEQ ID NO: 190692 - DNA, 2259 bp, Homo Sapiens; identical to SEQ ID NO: 183407

SEQ ID NO: 190693 - DNA, 2919 bp, Homo Sapiens; identical to SEQ ID NO: 179977
  misc_feature (409)..(418): n is a, c, g, or t
  misc_feature (794)..(833): n is a, c, g, or t
  misc_feature (845)..(871): n is a, c, g, or t

SEQ ID NO: 190694 - DNA, 3555 bp, Homo Sapiens; identical to SEQ ID NO: 179978
  misc_feature (997)..(1006): n is a, c, g, or t
  misc_feature (1382)..(1421): n is a, c, g, or t
  misc_feature (1446)..(1535): n is a, c, g, or t
  misc_feature (2006)..(2014): n is a, c, g, or t

SEQ ID NO: 190695 - DNA, 895 bp, Homo Sapiens; identical to SEQ ID NO: 183409

SEQ ID NO: 190696 - DNA, 1404 bp, Homo Sapiens; identical to SEQ ID NO: 179979

SEQ ID NO: 190697 - DNA, 536 bp, Homo Sapiens; identical to SEQ ID NO: 183410

SEQ ID NO: 190698 - DNA, 1058 bp, Homo Sapiens
acaaaaaagttggctgcttggtcgcgtctgagggggcttgtaggtggctctggctgaaacaggcgcctgcgagagtctgtaggagggaaaccgccatggacgatcagggttgccctcggtgtaagaccaccaaatatcggaacccctccttgaagctgatggtgaatgtgtgcggacacactctctgtgaaagttgtgtagatttactgtttgtgagaggagctggaaactgccctgagtgtggtactccactcagaaagagcaacttcagggtacaactctttgaagatcccactgttgacaaggaggttgagatcaggaaaaaagtgctaaagatatacaataaaagggaagaagattttcctagtctaagagaatacaatgatttcttggaagaagtggaagaaattgttttcaacttgaccaacaatgtggatttggacaacaccaaaaagaaaatggagatataccaaaaggaaaacaaagatgttattcagaaaaataaattaaagctgactcgagaacaggaagaactggaagaagctttagaagtggaacgacaggaaaatgaacaaagaagattatttatacaaaaagaagaacaactgcagcagattctaaaaaggaagaataagcaggcttttttagatgagctggagagttctgatctccctgttgctctgcttttggctcagcataaagatagatctacccaattagaaatgcaacttgagaaacccaaacctgtaaaaccagtgacgttttccacaggcatcaaaatgggtcaacatatttcactggcacctattcacaagcttgaagaagctctgtatgaataccagccactgcagatagagacatatggaccacatgttcctgagcttgacatgctaggaagacttgggtatttaaaccacgtcagagctgcctcacccccggaccttgccggaggctatacttcttctcttgcttgtcacagagccctacaggatgcattcagtgggcttttctggcagccccgctaaccatttataagatttggaccctggacctgaacc

SEQ ID NO: 190699 - DNA, 1505 bp, Homo Sapiens
gtacaaaaaagttgggtctaagcggcgtgccgtggaaagtggggttccgcagccgccggatcccccagtccagcgcgacgaggaagaggaaaaagaagtcgaaaatgaggatgaagacgatgatgacagtgacaaggaaaaggatgaagaggacgaggtcattgacgaggaagtgaatattgaatttgaagcttattccctatcagataatgattatgacggaattaagaaattactgcagcagctttttctaaaggctcctgtgaacactgcagaactaacagatctcttaattcaacagaaccatattgggagtgtgattaagcaaacggatgtttcagaagacagcaatgatgatatggatgaagatgaggtttttggtttcataagccttttaaatttaactgaaagaaagggtacccagtgtgttgaacaaattcaagagttggttctacgcttctgtgagaagaactgtgaaaagagcatggttgaacagctggacaagtttttaaatgacaccaccaagcctgtgggccttctcctaagtgaaagattcattaatgtccctccacagatcgctctgcccatgtaccagcagcttcagaaagaactggcgggggcacacagaaccaataagccatgtgggaagtgctacttttaccttctgattagtaagacatttgtggaagcaggaaaaaacaattccaaaaagaaacctagcaacaaaaagaaagctgcgttaatgtttgcaaatgcagaggaagaatttttctatgagaaggcaattctcaagttcaactactcagtgcaggaggagagcgacacttgtctgggaggcaaatggtcttttgatgacgtaccaatgacgcccttgcgaactgtgatgttaattccaggcgacaagatgaacgaaatcatggataaactgaaagaatatctatctgtctaacccatttccaatggacagtgatggggcttgtttttgtaaaattaccagaaaactcagtggagatttactgaaaaactcagactttattcagattaagttcctctacaaaaagtagggttctgtcccatgtgtctctgacacatttacaaaataccagttttttaaaattttggtcaaattatgagtggttgatttaaaaacttttccaagaagaagaaaagcatggagtcgtaatttaaagaactcaataaaaacttctattttttattttaaaataatatacacagtgttattttcttcaagaccgtcctgtggatgtgaaatccgtcttcgcgtcatgtatctcccatatccagcagttcagccatccagctacctttgggaccctgctgcaccttgtgtttgctggggagtcactggagagtgcatctctgttcagtttcagggcacgtctcacacatttgctgttccttattcattgttgacacaggggataggtgatccactacttgctgtagaatgtccttactttcactaggaggcagattactgccaa

SEQ ID NO: 190700 - DNA, 2146 bp, Homo Sapiens; identical to SEQ ID NO: 183412

SEQ ID NO: 190701 - DNA, 1013 bp, Homo Sapiens
ttggggcggctgtggggctccggcaaccgctccggcaacgccaaccgctccgctgcgcgcaggctgggctgcaggctctcggctgcagcgctgggtggatctaggatccggcttccaacatgtggcagctctgggcctccctctgctgcctgctggtgttggccaatgcccggagcaggccctctttccatcccctgtcggatgagctggtcaactatgtcaacaaacggaataccacgtggcaggccgggcacaacttctacaacgtggacatgagctacttgaagaggctatgtggtaccttcctgggtgggcccaagccaccccagagagttatgtttaccgaggacctgaagctgcctgcaagcttcgatgcacgggaacaatggccacagtgtcccaccatcaaagagatcagagaccagggctcctgtggctcctgctgggccttcggggctgtggaagccatctctgaccggatctgcatccacaccaatgcgcacgtcagcgtggaggtgtcggcggaggacctgctcacctgctgtggcagcatgtgtggggacggctgtaatggtggctatcctgctgaagcttggaacttctggacaagaaaaggcctggtttctggtggcctctatgaatcccatgtagggtgcagaccgtactccatccctccctgtgagcaccacgtcaacggctcccggcccccatgcacgggggagggagatacccccaagtgtagcaagatctgtgagcctggctacagcccgacctacaaacaggacaagcactacggatacaattcctacagcgtctccaatagcgagaaggacatcatggccgagatctacaaaaacggccccgtggagggagctttctctgtgtattcggacttcctgctctacaagtcaggagtgtaccaacacgtcaccggagagatgatgggtggccatgccatccgcatcctgggctggggagtggagaatggccacaccctactggctgggttgcca

SEQ ID NO: 190702 - DNA, 1554 bp, Homo Sapiens
caaagggctcccaacaccatttctcctctgatttctgtgacaaatgtggaaagctacttgcttggaggtactgggggaactgatgggggaactttcatcctgttaggaactccgctttccattcctgggtctctgtcttgctccctggagatggatggatcacggagggggccacagtcagctggggcaacaggtactccctacggcactagtctacagggggaaggacgctctgtgctggcagcggtggctcacatggcctgtctgcactgtaaccacaggctgggatgtagccaggacttggtctccttggaagacaggtctgatgtttggccaatccagtccttcagaccctgtctgaaacttgtatcttacgtgaacttaaagaataaaatgcatttctacccccatctcgcccccaggactggcacgacaggcccacggcagattagatcttttcccagtactgatcggtgcgtggaattccagccaccacttctgattcgattccacagtgatcctgtcctctgagtattttaaagaagccattgtcaccccagtcagtgttccaggagttggcaaccagccagtagggtgtgccattctccggtgacgtgttggtacactcctgacttgtagagcaggaagtccgaatacacagagaaagctccctccacggggccgtttttgtagatctcggccatgatgtccttctcgctattggagacgctgtaggaattgtatccgtagtgcttgtcctgtttgtaggtcgggctgtagccaggctcacagatcttgctacacttgggggtatctccctcccccgtgcatgggggccgggagccgttgacgtggtgctcacagggagggatggagtacggtctgcaccctacatgggattcatagaggccaccagaaaccaggccttttcttgtccagaagttccaagcttcagcaggatagccaccattacagccgtccccacacatgctgccacagcaggtgagcaggtcctccgccgacacctccacgctgacgtgcgcattggtgtggatgcagatccggtcagagatggcttccacagccccgaaggcccagcaggagccacaggagccctggtctctgatctctttgatggtgggacactgtggccattgttcccgtgcatcgaagcttgcaggcagcttcaggtcctcggtaaacataactctctggggtggcttgggcccacccaggaaggtaccacatagcctcttcaagtagctcatgtccacgttgtagaagttgtgcccggcctgccacgtggtattccgtttgttgacatagttgaccagctcatccgacaggggatggaaagagggcctgctccgggcattggccaacaccagcaggcagcagagggaggcccagagctgccacatgttggaagccagatcctagatccacccagcgctgcagccgagagcctgcagcccagcctgcgcgcagcggagcggttggcgttgccggagcccaacttttttgtacaaagttggccattataaaaaagcattg

SEQ ID NO: 190703 - DNA, 826 bp, Homo Sapiens
tttgtacaaaaaagttgggtaagatacaacttttcagacagggtctgaaggactggattggccaaacatcagacctgtcttccaaggagaccaagtcctggctacatcccagcctgtggttacagtgcagacaggccatgtgagccaccgctgccagcacagagcgtccttccccctgtagactagtgccgtagggagtacctgttgccccagctgactgtggccccctccgtgatccatccatctccagggagcaagacagagacccaggaatggaaagcggagttcctaacaggatgaaagttcccccatcagttcccccagtacctccaagcaagtagctttccacatttgtcacagaaatcagaggagagatggtgttgggagccctttggagaacgccagtctcccaggccccctgcatctatcgagtttgcaatgtcacaacctctctgatcttgtgctcagcatgattctttaatagaagttttattttttcgtgcactctgctaatcatgtgggtgagccagtggaacagcgggagacctgtgctagttttacagattgcctccttatgacgcggctcaaaaggaaaccaagtggtcaggagttgtttctgacccactgatctctactaccacaaggagaatagtttaggagaaaccagcttttactgtttttgaaaaattacagcttcaccctgtcaagttaacaaggaatgcctgtgccaataaaaggtttctccaacttgaagtctactctgatgggatctcagatcctttgtcactgcctatagacttgtagctgctgtctctctttgtccctg

SEQ ID NO: 190704 - DNA, 1824 bp, Homo Sapiens; identical to SEQ ID NO: 183413

SEQ ID NO: 190705 - DNA, 1038 bp, Homo Sapiens
ctttgtacaaaaaagttggcttcggacaagaaaaggcctggtttctggtggcctctatgaatcccatgtagggtgcagaccgtactccatccctccctgtgagcaccacgtcaacggctcccggcccccatgcacgggggagggagatacccccaagtgtagcaagatctgtgagcctggctacagcccgacctacaaacaggacaagcactacggatacaattcctacagcgtctccaatagcgagaaggacatcatggccgagatctacaaaaacggccccgtggagggagctttctctgtgtattcggacttcctgctctacaagtcaggagtgtaccaacacgtcaccggagagatgatgggtggccatgccatccgcatcctgggctggggagtggagaatggcacaccctactggctggttgccaactcctggaacactgactggggtgacaatggcttctttaaaatactcagaggacaggatcactgtggaatcgaatcagaagtggtggctggaattccacgcaccgatcagtactgggaaaagatctaatctgccgtgggcctgtcgtgccagtcctgggggcgagatgggggtagaaatgcattttattctttaagttcacgtaagatacaagtttcagacagggtctgaaggactggattggccaaacatcagacctgtcttccaaggagaccaagtcctggctacatcccagcctgtggttacagtgcagacaggccatgtgagccaccgctgccagcacagagcgtccttccccctgtagactagtgccgtagggagtacctgttgccccagctgactgtggccccctccgtgatccatccatctccagggagcaagacagagacccaggaatggaaagcggagttcctaacagggatgaaagttcccccatcagttcccccagtacctccaagcaagtagctttccacatttgtcacagaaatcagaggagaagatggtgtttgggagcccctttggagaagccagtctcccaggcccccctg

SEQ ID NO: 190706 - DNA, 473 bp, Homo Sapiens
ttgggtatagtccgatttctcctttctggactatgtgatgggaggctgtcccatcaacttccctgtgggcgtggacttccctggctccaatggagacccctcctcccctgactccctacaatacctgagtccaacaggggtcaatgagtacctgatggcactgtggagtgtgggcagcctggttcaggactatgactcagacaagctgttccctgcatttggatttggggcccaggttccccctgactggcaggtctcgcatgaatttgccttgaatttcaaccccagtaacccctactgtgcaggcatccaggggattgtggatgcctaccgccaagccctgcccccaagttcgcctctatggccctaccaactttgcacccatcatcgaccatgtggcccaggtttgcagcccaggctgcacatcaagggactgcctcgcaatacttcatgctgttgctgccgactgatgg

SEQ ID NO: 190707 - DNA, 834 bp, Homo Sapiens
  misc_feature (45)..(53): n is a, c, g, or t
catattgagttcaaaatttatatctaacattgtttatgttatgannnnnnnnnaattgcaaagactaggtgtatatttttttctgtttttctaaatgacccgtggtacttaataggtgtactaaaattgtgttgggagcagggatttggaaatttctgagagatgtgtagttaatttagtaattctgtttcatgagatatgatctgttatgctagtggtttaataggcttgctatgtaagtagaacgtggctcaactagatatctttatatgtatgggcattactcttagtgatatttgtttcctgtcctttgttgctcatgctgtttaagtgcaggctgagacccagcctctttgtaagtacagtaaaataatccaccgttttttacagaccctagtcaaagggttaaaaaaattaagattgctttccatgtttgaaatttaccattgagagtcaatgaagttgctattttgagtttagcattgatattgtgaaaataagtgcaatttggatttcatgtttcttaatattcattcttgtttcacaaatgaatgattaaggaattatgcatcataaaggaacctaagtgaggtatatgatgagtgtattgtctttgcacacacatataggtatattctgaatacaagcttattcacattttgcttcctaatctttttgttgtacagggattcaggtttcttattcttacaacatgattgtttatatgtgaagcacatcttgctgttgccttatttttgatgcttttattcatgacaagaattgtcaatataagaatgtatatcttttttgcaaccaatttaataaaggagttga

SEQ ID NO: 190708 - DNA, 1139 bp, Homo Sapiens
  misc_feature (970)..(1003): n is a, c, g, or t
actttgtacaaaaaagttggaataaaagttttatgaatggacttttcaactactttctctacagcttttcatgtaaattagtcttggttctgaaacttctctaaaggaaattgtacattttttgaaatttattccttattccctcttggcagctaatgggctcttaccaagtttaaacacaaaatttatcataacaaaaatactactaatataactactgtttccatgtcccatgatcccctctcttcctccccaccctgaaaaaaatgagttcctattttttctgggagagggggggattgattagaaaaaaatgtagtgtgttccatttaaaattttggcatatggcattttctaacttaggaagccacaatgttcttggcccatcatgacattgggtagcattaactgtaagttttgtgcttccaaatcactttttggtttttaagaatttcttgatactcttatagcctgccttcaattttgatcctttattctttctatttgtcaggtgcacaagattaccttcctgttttagccttctgtcttgtcaccaaccattcttacttggtggccatgtacttggaaaaaggccgcatgatctttctggctccctcagtgtctaaggcaccctgcttcctttgcttgcatcccacagactatttccctcatcctatttactgcagcaaatctctccttattgatgagactgtgttttatctcccttttaaaccctacctatcctgaatggtctgtcattgtctgcctttaaaatccttcctctttcttcctcctctattctctaaataatgatggggctaagttatacccaaagctcactttacaaaatatttcctcagtactttgcagaaaacaccaaacaaaaatgccattttaaaaaaggtgtattttttcttttataatgtaagctcctcaagagcagggacaatgttttctgtatgttctattnnnnnnnnnnnnnnnnnnnnnnnnnnnnnnnnnngatgatgggaggcagtgagtcttgatgataatggttataaactgaaatcccaaacactgttttgttgcttgttttattatcacctcaaattaaattgggaaatattggcccttttgaataattgtcccaaatatta

SEQ ID NO: 190709 - DNA, 1015 bp, Homo Sapiens
aattgatgagcaatgctttctttaaaaagccaactttgtacaaaaaagttggcaagatggtgcttctcagttccaagaagtcattcggcaagagctagaattatctgtgaagaaggaactagaaaaaatactcaccacagcatcatcacatgaatttgagcacaccaaaaaagacctggatggatttcggaagctatttcatagatttttgcaagaaaaggggccttctgtggattggggaaaaatccagagaccccctgaagattcgattcaaccctatgaaaagataaaggccaggggcttgcctgataatatatcttccgtgttgaacaaactagtggtggtgaaactcaatggtggtttgggaaccagcatgggctgcaaaggccctaaaagtctgattggtgtgaggaatgagaatacctttctggatctgactgttcagcaaattgaacatttgaataaaacctacaatacagatgttcctcttgttttaatgaactcttttaacacggatgaagataccaaaaaaatactacagaagtacaatcattgtcgtgtgaaaatctacactttcaatcaaagcaggtacccgaggattaataaagaatctttacttcctgtagcaaaggacgtgtcttactcaggggaaaatacagaagcttggtaccctccaggtcatggtgatatttacgccagtttctacaactctggattgcttgatacctttataggagaaggcaaagagtatatttttgtgtctaacatagataatctgggtgccacagtggatctgtatattcttaatcatctaatgaacccacccaatggaaaacgctgtgaatttgtcatggaagtcacaaataaaacacgtgcagatgtaaagggcgggacactcactcaatatgaaggcaaactgagactggtggaaattgctcaagtgccaaaagcacatgtagacgagttcaagtctgtatcaaagttcaaaatatttaatacaaacaacctatggatt

SEQ ID NO: 190710 - DNA, 1278 bp, Homo Sapiens; identical to SEQ ID NO: 183416

SEQ ID NO: 190711 - DNA, 1524 bp, Homo Sapiens
ttggcgggagccccttccagagggagtgactggggcaagcgcagacgggctgagcgaaagctaaggtgggggtagggagagaacgccttcccgccggctgagaggaagagtgggccggcagaggctgcaggggagagggagagagagggcgttggggacccaaagggaaggcgaggagtgggggatttgcgttggggaggaaaaggaaaaaagcagcctcctgccctaggtgcactcgggacaagcgtagaggagctggaagccgagcggggtgggaggagtggcggctgcgggcgaggacgcgcgcgcctccgctcgccctccagcgcgggcgggcaggacgagcgccggggagcggcggttacgcggggccccgatcgctgtgggcaccaatcaacggttgccatagcagcgtttgacgtcatcgtgcgtgtggtgcccctgctgccggggctggtgattggaggaaaccccgtgtctgcggagcggctgtagcctgtgagcagcgagatccagggacagagtctcagcctcgccgctgctgccgccgccgccgcccagagactgctgagcccgtccgtccgccgccaccacccactccggacacagaacatccagtcatggataaaaatgagctggttcagaaggccaaactggccgagcaggctgagcgatatgatgacatggcagcctgcatgaagtctgtaactgagcaaggagctgaattatccaatgaggagaggaatcttctctcagttgcttataaaaatgttgtaggagcccgtaggtcatcttggagggtcgtctcaagtattgaacaaaagacggaaggtgctgagaaaaaacagcagatggctcgagaatacagagagaaaattgagacggagctaagagatatctgcaatgatgtactgtctcttttggaaaagttcttgatccccaatgcttcacaagcagagagcaaagtcttctatttgaaaatgaaaggagattactaccgttacttggctgaggttgccgctggtgatgacaagaaagggattgtcgatcagtcacaacaagcataccaagaagcttttgaaatcagcaaaaaggaaatgcaaccaacacatcctatcagactgggtctggcccttaacttctctgtgttctattatgagattctgaactccccagagaaagcctgctctcttgcaaagacagcttttgatgaagccattgctgaacttgatacattaagtgaagagtcatacaaagacagcacgctaataatgcaattactgagagacaacttgacattgtggacatcggatacccaaggagacgaagctgaagcagagaaggaggggaaaattaaccggccttccaacttttgtctgcctcattctaaaatttacacagtagaccatttgtcatccatgctgtcccacaaatagttttttgtttacgatttatgacaggtttatgttacttctatttgaatttctatatttcccatggggtttttatgtttattattagggg

SEQ ID NO: 190712 - DNA, 1106 bp, Homo Sapiens
  misc_feature (857)..(902): n is a, c, g, or t
ttgtacaaaaaagttggggatacccaacctgtataaacaaaaagctgaagcaggagaaggaggggaaaattaaccggccttccaacttttgtctgcctcattctaaaatttacacagtagaccatttgtcatccatgctgtcccacaaatagttttttgtttacgatttatgacaggtttatgttacttctatttgaatttctatatttcccatgtggtttttatgtttaatattaggggagtagagccagttaacatttagggagttatctgttttcatcttgaggtggccaatatggggatgtggaatttttatacaagttataagtgtttggcatagtacttttggtacattgtggcttcaaaagggccagtgtaaaactgcttccatgtctaagcaaagaaaactgcctacatactggtttgtcctggcggggaataaaagggatcattggttccagtcacaggtgtagtaattgtgggtactttaaggtttggagcacttacaaggctgtggtagaatcataccccatggataccacatattaaaccatgtatatctgtggaatactcaatgtgtacacctttgactacagctgcagaagtgttcctttagacaaagttgtgacccattttactctggataagggcagaaacggttcacattccattatttgtaaagttacctgctgttagctttcattatttttgctacactcattttatttgtatttaaatgttttaggcaacctaagaacaaatgtaaaagtaaagatgcaggaaaaatgaattgcttggtattcattacttcatgtatatcaagcacagcagtaaaacaaaaacccatgtatttaacnnnnnnnnnnnnnnnnnnnnnnnnnnnnnnnnnnnnnnnnnnnnnngatacttgcctaacatgcatgtgctgtaaaaatagttaacagggaaataacttgagatgatggctagctttgtttaatgtcttatgaaattttcatgaacaatccaagcataattgttaagaacacgtgtattaaattcatgtaagtgggaataaaaagttttatgaatgggacttttcaactacttttctctacagcttttca

SEQ ID NO: 190713 - DNA, 812 bp, Homo Sapiens
tttgtacaaaaaagttggaaagactctggatggaggcctgaatgtcattcaattagaaactgcagtaggggctgccatcaaaagttttgagaattctctaggtattaatgtgccaaggagccgttttctgcctgtcaaaaccacatcagatctcttgctggtgatgtcaaacctctatagtcttaatgcaggatctctgacaatgagtgaaaagcgggaatttcctacagtgcccttggttaaattaggcagttcttttacgaaggttcaagattatctaagaagatttgaaagtataccagatatgcttgaattggatcacctcacagtttcaggagatgtgacatttggaaaaaatgtttcattaaagggaacggttatcatcattgcaaatcatggtgacagaattgatatcccacctggagcagtattagagaacaagattgtgtctggaaaccttcgcatcttggaccactgaaatgaaaaatactgtggacacttaaataatgggctagtttcttacaatgaaatgttctctaggattctaaaataggcaggtactttactatgttactgtaccctgcagtgttgatttttaaaatagagttttctgcagtatgcttttagtctaagaaaagcacagatggagcaatactttccttctttgaagagaatcccaaaagttagttcatcttaaagtgcaatattgtttaatcttaaaactgggcaactttggaagaacttttaacagaagcctcaatgatgatcactttgaattgcttgtgatttcaaaaataaagcagtgaagcaat

SEQ ID NO: 190714 - DNA, 3131 bp, Homo Sapiens; identical to SEQ ID NO: 183417
  misc_feature (137)..(167): n is a, c, g, or t

SEQ ID NO: 190715 - DNA, 1062 bp, Homo Sapiens
ttggggagaaagtacgggctgtgggtgtcgggagccggctgacgggtggacgagggggggttagcggctgggctgcgaccggtagggaggggctcagggtgtgcgtgtgtgaagaaagagagagagaaagaagggcgcctcagaggtgactttcagcctgcgagccttcttcccggggcgccataaacgcccccaatttcccagctgctaaaggaagaggaagatcttagcaaagcaatgtctcaagatggtgcttctcagttccaagaagtcattcggcaagagctagaattatctgtgaagaaggaactagaaaaaatactcaccacagcatcatcacatgaatttgagcacaccaaaaaagacctggatggatttcggaagctatttcatagatttttgcaagaaaaggggccttctgtggattggggaaaaatccagagaccccctgaagattcgattcaaccctatgaaaagataaaggccaggggcttgcctgataatatatcttccgtgttgaacaaactagtggtggtgaaactcaatggtggtttgggaaccagcatgggctgcaaaggccctaaaagtctgattggtgtgaggaatgagaatacctttctggatctgactgttcagcaaattgaacatttgaataaaacctacaatacagatgttcctcttgttttaatgaactcttttaacacggatgaagataccaaaaaaatactacagaagtacaatcattgtcgtgtgaaaatctacactttcaatcaaagcaggtacccgaggattaataaagaatctttacttcctgtagcaaaggacgtgtcttactcaggggaaaatacagaagcttggtaccctccaggtcatggtgatatttacgccagtttctacaactctggattgcttgatacctttataggagaagcaaagagtatatttttgtgtctaacatagataatctgggtgccacagtggatctgtatattcctaatcatctaatgaacccacccaatggaaaacgctgtgaatttgtcatggaagtcacaaataaaacac

SEQ ID NO: 190716 - DNA, 965 bp, Homo Sapiens
ctttgtacaaaaaagttggcgtcccggctcatcacccggcctgtggcccactcccaccgccagctggaaccctggggactacgacgtccctcaaaccttgcttctaggagataaaaagaacatccagtcatggataaaaatgagctggttcagaaggccaaactggccgagcaggctgagcgatatgatgacatggcagcctgcatgaagtctgtaactgagcaaggagctgaattatccaatgaggagaggaatcttctctcagttgcttataaaaatgttgtaggagcccgtaggtcatcttggagggtcgtctcaagtattgaacaaaagacggaaggtgctgagaaaaaacagcagatggctcgagaatacagagagaaaattgagacggagctaagagatatctgcaatgatgtactgtctcttttggaaaagttcttgatccccaatgcttcacaagcagagagcaaagtcttctatttgaaaatgaaaggagattactaccgttacttggctgaggttgccgctggtgatgacaagaaagggattgtcgatcagtcacaacaagcataccaagaagcttttgaaatcagcaaaaaggaaatgcaaccaacacatcctatcagactgggtctggcccttaacttctctgtgttctattatgagattctgaactccccagagaaagcctgctctcttgcaaagacagcttttgatgaagccattgctgaacttgatacattaagtgaagagtcatacaaagacagcacgctaataatgcaattactgagagacaacttgacattgtggacatcggatacccaaggagacgaagctgaagcaggaaaaggaggggaaaattaaccggccttccaacttttgtctgcctcattctaaaatttacacagtagaccatttgtcatccatgctgtcccacaaatagtttttttgtttacgattta

SEQ ID NO: 190717 - DNA, 1087 bp, Homo Sapiens; identical to SEQ ID NO: 183418
  misc_feature (883)..(892): n is a, c, g, or t

SEQ ID NO: 190718 - DNA, 953 bp, Homo Sapiens
  misc_feature (758)..(791): n is a, c, g, or t
tgtacaaaaaagttggcatgatcccctcctcttaaatccccaccctgaaaaaaatgagttcctattttttctgggagagggggggattgattagaaaaaaatgtagtgtgttccatttaaaattttggcatatggcattttctaacttaggaagccacaatgttcttggcccatcatgacattgggtagcattaactgtaagttttgtgcttccaaatcactttttggtttttaagaatttcttgatactcttatagcctgccttcaattttgatcctttattctttctatttgtcaggtgcacaagattaccttcctgttttagccttctgtcttgtcaccaaccattcttacttggtggccatgtacttggaaaaaggccgcatgatctttctggctccactcagtgtctaaggcaccctgcttcctttgcttgcatcccacagactatttccctcatcctatttactgcagcaaatctctccttagttgatgagactgtgtttatctccctttaaaaccctacctatcctgaatggtctgtcattgtctgcctttaaaatccttcctctttcttcctcctctattctctaaataatgatggggctaagttatacccaaagctcactttacaaaatatttcctcagtactttgcagaaaacaccaaacaaaaatgccattttaaaaaaggtgtattttttcttttagaatgtaagctcctcaagagcagggacaatgttttctgtatgttctattnnnnnnnnnnnnnnnnnnnnnnnnnnnnnnnnnngatgatgggaggcagtgagtcttgatgataagggtgagaaactgaaatcccaaacactgttttgttgcttgttttattatgacctcagattaaattgggaaatattggcccttttgaataattgtcccaaatattacatttcaaataaaagtgcaatggaga

SEQ ID NO: 190719 - DNA, 1044 bp, Homo Sapiens
  misc_feature (806)..(845): n is a, c, g, or t
attgatgagcaatgctttctttaaaaagccaactttgtacaaaaaagttggctaaaatttcccacaataaaccatttgtcatccatgctgtcccacaaatagttttttgtttacgatttatgacaggtttatgttacttctatttgaatttctatatttcccatgtggtttttatgtttaatattaggggagtagagccagttaacatttagggagttatctgttttcatcttgaggtggccaatatggggatgtggaatttttatacaagttataagtgtttggcatagtacttttggtacattgtggcttcaaaagggccagtgtaaaactgcttccatgtctaagcaaagaaaactgcctacatactggtttgtcctggcggggaataaaagggatcattggttccagtcacaggtgtagtaattgtgggtactttaaggtttggagcacttacaaggctgtggtagaatcataccccatggataccacatattaaaccatgtatatctgtggaatactcaatgtgtacacctttgactacagctgcagaagtgttcctttagacaaagttgtgacccattttactctggataagggcagaaacggttcacattccattatttgtaaagttacctgctgttagctttcattatttttgctacactcattttatttgtatttaaatgttttaggcaacctaagaacaaatgtaaaagtaaagatgcaggaaaaatgaattgcttggtattcattacttcatgtatatcaagcacagcagtaaaacaaaaacccatgtatttaannnnnnnnnnnnnnnnnnnnnnnnnnnnnnnnnnnnnnnngatacttgcctaacatgcatgtgctgtaaaaatagttaacagggaaataacttgagatgatggctagctttgtttaatgtcttatgaaattttcatgaaccaatccaagcataattgttaagaacacgtgtattaaattcatgtaagtggaataaaagttttatgaatggacttttcactactttctctacagcttttc

SEQ ID NO: 190720 - DNA, 1665 bp, Homo Sapiens; identical to SEQ ID NO: 183419
  misc_feature (307)..(314): n is a, c, g, or t
  misc_feature (335)..(371): n is a, c, g, or t
  misc_feature (1284)..(1307): n is a, c, g, or t
  misc_feature (1409)..(1421): n is a, c, g, or t

SEQ ID NO: 190721 - DNA, 1305 bp, Homo Sapiens
  misc_feature (207)..(220): n is a, c, g, or t
  misc_feature (1107)..(1149): n is a, c, g, or t
ttggtggataaccaaaactttcctgtatctgaaggttatttgaaggcaactctgtggtgtacttaacctgcttatatagtggttacaaaaaaagtaaatttgtatattgagatgtttttgtatcttgaagctaagtgatgctgctatctttttaagaatgctttccaactaaaacattcaggtatcttggcacttatatgaaaacgnnnnnnnnnnnnnnatcccactgaaacttgctgaaaaatctttccttcttttaccagttgtggacatcggatacccaaggagacgaagctgaagcaggagaaggaggggaaaattaaccggccttccaacttttgtctgcctcattctaaaatttacacagtagaccatttgtcatccatgctgtcccacaaatagttttttgtttacgatttatgacaggtttatgttacttctatttgaatttctatatttcccatgtggtttttatgtttaatattaggggagtagagccagttaacatttagggagttatctgttttcatcttgaggtggccaatatggggatgtggaatttttatacaagttataagtgtttggcatagtacttttggtacattgtggcttcaaaagggccagtgtaaaactgcttccatgtctaagcaaagaaaactgcctacatactggtttgtcctggcggggaataaaagggatcattggttccagtcacaggtgtagtaattgtgggtactttaaggtttggagcacttacaaggctgtggtagaatcataccccatggataccacatattaaaccatgtatatctgtggaatactcaatgtgtacacctttgactacagctgcagaagtgttcctttagacaaagttgtgacccattttactctggataagggcagaaacggttcacattccattatttgtaaagttacctgctgttagctttcattatttttgctacactcattttatttgtatttaaatgttttaggcaacctaagaacaaatgtaaaagtaaagatgcaggaaaaatgaattgcttggtattcattacttcatgtatatcaagcacagcagtaaaacaaaaacccatgtatttaacnnnnnnnnnnnnnnnnnnnnnnnnnnnnnnnnnnnnnnnnnnngatacttgcctaacatgcatgtgctgtaaaaatagttaacagggaaataacttgagatgatggctagctttgtttaatgtcttatgaaattttcatgaacaatccaagcataattgttaagaacacgtgtattaaattcatgtaagtggaataaaa

SEQ ID NO: 190722 - DNA, 1436 bp, Homo Sapiens
  misc_feature (1221)..(1264): n is a, c, g, or t
gagcaatgcttttttccaataaaacaactttgtacaaaaaagttggcttctatttgaaaatgaaaggagattactaccgttacttggctgaggttgccgctggtgatgacaagaaagggattgtcgatcagtcacaacaagcataccaagaagcttttgaaatcagcaaaaaggaaatgcaaccaacacatcctatcagactgggtctggcccttaacttctctgtgttctattatgagattctgaactccccagagaaagcctgctctcttgcaaagacagcttttgatgaagccattgctgaacttgatacattaagtgaagagtcatacaaagacagcacgctaataatgcaattactgagagacaacttgacattgtggacatcggatacccaaggagacgaagctgaagcaggagaaggaggggaaaattaaccggccttccaacttttgtctgcctcattctaaaatttacacagtagaccatttgtcatccatgctgtcccacaaatagttttttgtttacgatttatgacaggtttatgttacttctatttgaatttctatatttcccatgtggtttttatgtttaatattaggggagtagagccagttaacatttagggagttatctgttttcatcttgaggtggccaatatggggatgtggaatttttatacaagttataagtgtttggcatagtacttttggtacattgtggcttcaaaagggccagtgtaaaactgcttccatgtctaagcaaagaaaactgcctacatactggtttgtcctggcggggaataaaagggatcattggttccagtcacaggtgtagtaattgtgggtactttaaggtttggagcacttacaaggctgtggtagaatcataccccatggataccacatattaaaccatgtatatctgtggaatactcaatgtgtacacctttgactacagctgcagaagtgttcctttagacaaagttgtgacccattttactctggataagggcagaaacggttcacattccattatttgtaaagttacctgctgttagctttcattatttttgctacactcattttatttgtatttaaatgttttaggcaacctaagaacaaatgtaaaagtaaagatgcaggaaaaatgaattgcttggtattcattacttcatgtatatcaagcacagcagtaaaacaaaaacccatgtatttaacnnnnnnnnnnnnnnnnnnnnnnnnnnnnnnnnnnnnnnnnnnnngatacttgcctaacatgcatgtgctgtaaaaatagttaacagggaaataacttgagatgatggctagctttgtttaatgtcttatgaaattttcatgaccatccagcataattgttaagaacacgtgtattaattcatgtaagtggaataaaagttttatgaatggactttt

SEQ ID NO: 190723 - DNA, 809 bp, Homo Sapiens; identical to SEQ ID NO: 179981
  misc_feature (404)..(415): n is a, c, g, or t

SEQ ID NO: 190724 - DNA, 1645 bp, Homo Sapiens; identical to SEQ ID NO: 183420

SEQ ID NO: 190725 - DNA, 1859 bp, Homo Sapiens; identical to SEQ ID NO: 183421
  misc_feature (1562)..(1607): n is a, c, g, or t

SEQ ID NO: 190726 - DNA, 1197 bp, Homo Sapiens
ctttgtacaaaaaagttgggtcttatgaaattttcatgaacaatccaagcataattgttaagaacacgtgtattaaattcatgtaagtggaataaaagttttatgaatggacttttcaactactttctctacagcttttcatgtaaattagtcttggttctgaaacttctctaaaggaaattgtacattttttgaaatttattccttattccctcttggcagctaatgggctcttaccaagtttaaacacaaaatttatcataacaaaaatactactaatataactactgtttccatgtcccatgatcccctctcttcctccccaccctgaaaaaaatgagttcctattttttctgggagagggggggattgattagaaaaaaatgtagtgtgttccatttaaaattttggcatatggcattttctaacttaggaagccacaatgttcttggcccatcatgacattgggtagcattaactgtaagttttgtgcttccaaatcactttttggtttttaagaatttcttgatactcttatagcctgccttcaattttgatcctttattctttctatttgtcaggtgcacaagattaccttcctgttttagccttctgtcttgtcaccaaccattcttacttggtggccatgtacttggaaaaaggccgcatgatctttctggctccactcagtgtctaaggcaccctgcttcctttgcttgcatcccacagactatttccctcatcctatttactgcagcaaatctctccttagttgatgagactgtgtttatctccctttaaaaccctacctatcctgaatggtctgtcattgtctgcctttaaaatccttcctctttcttcctcctctattctctaaataatgatggggctaagttatacccaaagctcactttacaaaatatttcctcagtactttgcagaaaacaccaaacaaaaatgccattttaaaaaaggtgtattttttcttttagaatgtaagctcctcaagagcagggacaatgttttctgtatgttctattgtgcctagtacactgtaaatgctcaaataaatattgatgatgggaggcagtgagtcttgatgataagggtgagaaactgaaatcccaaacactgttttgttgcttgttttattatgacctcacaataaatttggaaatattggcccttttgaataat

SEQ ID NO: 190727 - DNA, 1621 bp, Homo Sapiens; identical to SEQ ID NO: 183422

SEQ ID NO: 190728 - DNA, 1356 bp, Homo Sapiens
ttggtgaaggtacacccaatagagagaatgcatctactcatgcctcgaaatctcctgacagtgttaatggaagtgaaccaagcattcctcagtcaggtgacacacagtcttttgcacagaagctccagctccgggtgccctccgtggagtctttgtttcgaagtccgataaaggaatctctattccggtcttcttctaaagagtctttggtacgaacatcttccagagaatccctgaatcgacttgacctggacagttctactgccagttttgatccaccctctgatatggatagcgaggctgaagacttggtagggaattcagacagtctcaacaaagaacagttgattcagcggttgcgaagaatggaacgaagcttaagtagctacaggggaaaatattctgagcttgttacagcttatcagatgcttcagagagagaagaaaaagctacaaggtatattaagtcagagtcaggataaatcacttcggagaatagcagaattaagagaggagctccaaatggaccagcaggcaaagaaacatctgcaagaggagtttgatgcatctttagaggagaaagatcagtatatcagtgttctccaaactcaggtttctctactgaaacaacgattacgaaatggcccgatgaatgttgatgtactgaaaccacttcctcagctggaaccacaggctgaagtcttcactaaagaagagaatccagaaagtgatggagagccagtagtggaagatggaacttctgtaaaaacactggaaacactccagcaaagagtgaagcgtcaagagaacctacttaagcgttgtaaggaaacaattcagtcacataaggaacaatgtacactattaactagtgaaaaagaagctctgcaagaacaactggatgaaagacttcaagaactagaaaagataaaggaccttcatatggccgagaagactaaacttatcactcagttgcgtgatgcaaagaacttaattgaacagcttgaacaagataagggaatggtaatcgcagagacaaaacgtcagatgcatgaaaccctggaaatgaaagaagaagaaattgctcaactccgtagtcgcatcaaacagatgactacccagggagaggaattacgggaacagaaagaaaagtccgaaagagctgcttttgaggaacttgaaaaagctttgagtacagcccaaaaaacagaggaagcacggagaaaactgaagggcagaaatggatgaacaaataaaaactatcgaaaaaacaagtgaggaaggaacgcatcagtcctcaacagggaatttaagtcgggtgaaacaggaagtttgttgaatgtatgaaaaaatcctc

SEQ ID NO: 190729 - DNA, 1595 bp, Homo Sapiens
gtacaaaaaagttggccatcccagacgccggagcccgagccccgacgagtccccgcgcctcatccgcccgcgtccggtccgcgttcctccgccccaccatggctcggggccccggcctcgcgccgccaccgctgcggctgccgctgctgctgctggtgctggcggcggtgaccggccacacggccgcgcaggacaactgcacgtgtcccaccaacaagatgaccgtgtgcagccccgacggccccggcggccgctgccagtgccgcgcgctgggctcgggcatggcggtcgactgctccacgctgacctccaagtgtctgctgctcaaggcgcgcatgagcgcccccaagaacgcccgcacgctggtgcggccgagtgagcacgcgctcgtggacaacgatggcctctacgaccccgactgcgaccccgagggccgcttcaaggcgcgccagtgcaaccagacgtcggtgtgctggtgcgtgaactcggtgggcgtgcgccgcacggacaagggcgacctgagcctacgctgcgatgagctggtgcgcacccaccacatcctcattgacctgcgccaccgccccaccgccggcgccttcaaccactcagacctggacgccgagctgaggcggctcttccgcgagcgctatcggctgcaccccaagttcgtggcggccgtgcactacgagcagcccaccatccagatcgagctgcggcagaacacgtctcagaaggccgccggtgacgtggatatcggcgatgccgcctactacttcgagagggacatcaagggcgagtctctattccagggccgcggcggcctggacttgcgcgtgcgcggagaacccctgcaggtggagcgcacgctcatctattacctggacgagattcccccgaagttctccatgaagcgcctcaccgccggcctcatcgccgtcatcgtggtggtcgtggtggccctcgtcgccggcatggccgtcctggtgatcaccaaccggagaaagtcggggaagtacaagaaggtggagatcaaggaactgggggagttgagaaaggaaccgagcttgtaggtacccggcggggcaggggatggggtggggtaccggatttcggtatcgtcccagacccaagtgagtcacgcttcctgattcctcggcgcaaaggagacgtttatcctttcaaattcctgccttccccctcccttttgcgcacacaccaggtttaatagatcctggcctcagggtctcctttctttctcacttctgtcttgaaggaagcatttctaaaatgtatcccctttcggtccaacaacaggaaacctgactggggcagtgaaggaagggatggcatagcgttatgtgtaaaaaacaagtatctgtatgacaacccgggatcgtttgcaagtaactgaatccattgcgacattgtgaaggcttaaatgagtttaaatgggaaatacgttgttatcgccttgggtttaaattatttgatgagttccacttgtatcatggcctacccgaggagaagaggagtttgttaactgggcctatgtagtagcctcatttaccatcgtttgtattactgaccacatatgc

SEQ ID NO: 190730 - DNA, 1255 bp, Homo Sapiens
cctccccttgccttcagcatctggtaaacactttagaaactaaacccactgttagcatgtcagaatgtagaaaggctgtaggtttttctttcttttcatcttgtaccccaaacaaacaactctactggcaattgtaatcatgtgactcctctgcttggaaacccagtaaggatcaccaagacaaggggtctcactgctaccagacagataccagctgtgcaaaaagttgcaggattctgtgtattatttggagagggagagctgtaagacacaggaatcccaatacgtaagtactaaagagaaaaagaaaactcctttcactcatctattcattatataggaaagagcaaaaagacagtcaaaaccatctgcttcgagcagcagcacagcccagcaatacaggcataccaacaaaccgaaagcaaacactcaggaaagagcctcttggcccttctcaaaggagacttctctcagactggatcttgcccctaatgtagagaccaaagcattataacttcagagactggtactcttgagggagttgagaggtaaggtctaagagacccaaataacaagactgttatcaggtaactaactactccactatgtacaatacatacagcaataagaaaacgccactccatccctgcagcactttaaacatagcactgaggacccaggtagggggatattttaaggtctgttagcagtttaaaacgttgcaacactggcacaatatgttacctattctttgtttttaattacagggtaacatggtaaactccaacacaaaggtgggaaccgagagtgcaaaaggaataaagaaaacagaaccagtatttcacaagagcgcggagcaatgcagaagcagcagctaatgctttgcagagtctcgagggtaaaattcgctgagggtgctctgagggattctcttcagcatttctttggggaagattcggagtagctgccagccaatgtccaaagtctcaaagacagtgcgattttcgtaaggaccctgagcaatgaagttcctctcaaacttctgcagaaattccaagtagagaagatcatctgaggtaagggcttcttctccaacgacagctttcatggcttgcacatcctttccaatagcatagcacgcatatagctggttagatacatcggcatgatccttcctggtcatcccttctccaatagcagacttcattaaccgtgccaacttttttgtacaaagttggcttaataggaaaaaagc

SEQ ID NO: 190731 - DNA, 905 bp, Homo Sapiens
aaggtcccatttaatttaacatttattttcattttatatccagatgtcacattttctacattaaaatataatcatgctgactcccccaacccccagccctcagagaaaaaagtgaagaactttacacaacatgaaagatggaatgcacggggtagggaagttgctattgcacccaagtaacaaagaacacagagagaccaacaggacgcatggcagaactgcatagaagatcgctcagggctcacgtcaggaaggcgcaggaattcagaaaactctaaagcttggaaatgctatcgtttgtgccacaaagattaccctgaaaaggtagagagaggtcaaaaagcagaaccaaattggggattttcaaaggctgctctctaacagagtttaaaatatccgtaaacataagtgcttctgctccctccccttgccttcagcatctggtaaacactttagaaacttaaaccactgttagcatgtcagaatgtagaaaggctgtaggtttttctttcttctcatcttgtaccccaaacaacaactctactggcaattgtaatcatgtgactcctctgcttggaaacccagtaaggatcaccaagacaaggggtctcactgctaccagacagataccagctgtgcaaaaagttgcaggattctgtgtattatttggagagggagagctgtaagacacaggaatcccaatacgtaagtactaaagagaaaaagaaaactcctttcactcatctattcattatataggaaagagcaaaaagacagtcaaaaccatttgctttcggtttgttggtatgcctgtattgctgggctgtgctgctgctcgaagcagacagtcaaaaccatcccaacttttttgtacaaagttggctataatagaaaaagcattgctc

SEQ ID NO: 190732 - DNA, 832 bp, Homo Sapiens
tttgtacaaaaaagttgggtttaaagtgctgccgggatggagtggcgttttcttattgctgtatgtattgtacatagtggagtagttagttacctgataacagtcttgttatttgggtctcttagaccttacctctcaactccctcaagagtaccagtctctgaagttataatgctttggtctctacattaggggcaagatccagtctgagagaagtctcctttgagaagggccaagaggctctttcctgagtgtttgctttcggtttgttggtatgcctgtattgctgggctgtgctgctgctcgaagcagatggttttgactgtctttttgctctttcctatataatgaatagatgagtgaaaggagttttctttttctctttagtacttacgtattgggattcctgtgtcttacagctctccctctccaaataatacacagaatcctgcaactttttgcacagctggtatctgtctggtagcagtgagaccccttgtcttggtgatccttactgggtttccaagcagaggagccacatgattacaattgccagtagagttgttgtttggggtacaagatgagaagaaagaaaaacctacagcctttctacattctgacatgctaacagtggtttaagtttctaaagtgtttaccagatgctgaaggcaaggggagggagcagaagcacttatgtttacggatattttaaactctgttagagagcagcctttgaaaatccccaatttggttctgctttttgacctctctctaccttttcagggtaatctttgtggcacaaacgatagcatttccaagctttagagttttc

SEQ ID NO: 190733 - DNA, 2008 bp, Homo Sapiens; identical to SEQ ID NO: 183430

SEQ ID NO: 190734 - DNA, 1167 bp, Homo Sapiens
ttggcgccgagccagcgcctgggcctggaaccgggccgtagcccccccagtttcgcccaccacctccctaccatggacccccgcaaagtgaacgagcttcgggcctttgtgaaaatgtgtaagcaggatccgagcgttctgcacaccgaggaaatgcgcttcctgagggagtgggtggagagcatgggtggtaaagtaccacctgctactcagaaagctaaatcagaagaaaataccaaggaagaaaaacctgatagtaagaaggtggaggaagacttaaaggcagacgaaccatcaagtgaggaaagtgatctagaaattgataaagaaggtgtgattgaaccagacactgatgctcctcaagaaatgggagatgaaaatgcggagataacggaggagatgatggatcaggcaaatgataaaaaagtggctgctattgaagccctaaatgatggtgaactccagaaagccattgacttattcacagatgccatcaagctgaatcctcgcttggccattttgtatgccaagagggccagtgtcttcgtcaaattacagaagccaaatgctgccatccgagactgtgacagagccattgaaataaatcctgattcagctcagccttacaagtggcgggggaaagcacacagacttctaggccactgggaagaagcagcccatgatcttgcccttgcctgtaaattggattatgatgaagatgctagtgcaatgctgaaagaagttcaacctagggcacagaaaattgcagaacatcggagaaagtatgagcgaaaacgtgaagagcgagagatcaaagaaagaatagaacgagttaagaaggctcgagaagagcatgagagagcccagagggaggaagaagccagacgacagtcaggagctcagtatggctcttttccaggtggctttcctgggggaatgcctggtaattttcccggaggaatgcctggaatgggagggggcatgcctggaatggctggaatgcctggactcaatgaaattcttagtgatccagaggttcttgcagccatgcacgatccagaagttatggtggctttccaggatgtggctcagaacccagcaaatatgtcaaaataccagagcaacccaaaggttatgaatctcatcagtaaattgtcagccaaattt

SEQ ID NO: 190735 - DNA, 1073 bp, Homo Sapiens; identical to SEQ ID NO: 183431

SEQ ID NO: 190736 - DNA, 1240 bp, Homo Sapiens
ctttgtacaaaaaagttggcaagctactggtgccagaacacagagacagcagcccagtgcaatgctgtcgagcattgcaaacgccatgtgtggaactaggaggaggaatattccatcttggcagaaaccacagcattggtttttttctacttgtgtgtctgggggaatgaacgcacagatctgtttgactttgttataaaaatagggctcccccacctcccccatttctgtgtcctttattgtagcattgctgtctgcaagggagcccctagcccctggcagacatagctgcttcagtgccccttttctctctgctagatggatgttgatgcactggaggtcttttagcctgcccttgcatggcgcctgctggaggaggagagagctctgctggcatgagccacagtttcttgactggaggccatcaaccctcttggttgaggccttgttctgagccctgacatgtgcttgggcactggtgggcctgggcttctgaggtggcctcctgccctgatcagggaccctccccgctttcctgggcctctcagttgaacaaagcagcaaaacaaaggcagttttatatgaaagattagaagcctggaataatcaggctttttaaatgatgtaattcccactgtaatagcatagggattttggaagcagctgctggtggcttgggacatcagtggggccaagggttctctgtccctggttcaactgtgatttggctttcccgtgtctttcctggtgatgccttgtttggggttctgtgggtttgggtgggaagagggccatctgcctgaatgtaacctgctagctctccgaaggccctgcgggcctggcttgtgtgagcgtgtggacagtggtggccgcgctgtgcctgctcgtgttgcctacatgtccctggctgttgaggcgctgcttcagcctgcacccctcccttgtctcatagatgctccttttgaccttttcaaataaatatggatggcgagctcctaggcctctggcttcctggtagagggcggcatgccgaagggtctgctgggtgtggattggatgctggggtgtgggggttggaagctgtctgtggcccacttgggcacccacgcttctgtccacttctggttgccaggagacagcaagcaaagccagcaggacatgaagttgctattaaatggacttcgtgatttttgttttgcactaaagtttctgtgatttaacaataaaattctgttatcca

SEQ ID NO: 190737 - DNA, 1448 bp, Homo Sapiens; identical to SEQ ID NO: 183433

SEQ ID NO: 190738 - DNA, 1919 bp, Homo Sapiens; identical to SEQ ID NO: 183434

SEQ ID NO: 190739 - DNA, 205 bp, Homo Sapiens
tgtacaaaaaagttggatgtccctggctgtttaaagcgctgcttcagcctgcacccctcccttgtctcatagatgctccttttgaccttttcaaataaatatgcatggcaagctcctaagcctctggcttcctggtagagggcggcatgccgaagggtctgctgggtgtggattggatgctggggtgtgggggttggaagctgtc

SEQ ID NO: 190740 - DNA, 1479 bp, Homo Sapiens; identical to SEQ ID NO: 183435

SEQ ID NO: 190741 - DNA, 1287 bp, Homo Sapiens
ctttgtacaaaaaagttggtactcgacgctcttgaaaaaatgtgctcgaagctgccgaagtccctgtcggaagagtgccaggaggtggtggacacgtacggcagctccatcctgtccatcctgctggaggaggtcagccctgagctggtgtgcagcatgctgcacctctgctctggcacgcggctgcctgcactgaccgttcacgtgactcagccaaaggacggtggcttctgcgaagtgtgcaagaagctggtgggttatttggatcgcaacctggagaaaaacagcaccaagcaggagatcctggctgctcttgagaaaggctgcagcttcctgccagacccttaccagaagcagtgtgatcagtttgtggcagagtacgagcccgtgctgatcgagatcctggtggaggtgatggatccttccttcgtgtgcttgaaaattggagcctgcccctcggcccataagcccttgttgggaactgagaagtgtatatggggcccaagctactggtgccagaacacagagacagcagcccagtgcaatgctgtcgagcattgcaaacgccatgtgtggaactaggaggaggaatattccatcttggcagaaaccacagcattggtttttttctacttgtgtgtctgggggaatgaacgcacagatctgtttgactttgttataaaaatagggctcccccacctcccccatttctgtgtcctttattgtagcattgctgtctgcaagggagcccctagcccctggcagacatagctgcttcagtgccccttttctctctgctagatggatgttgatgcactggaggtcttttagcctgcccttgcatggcgcctgctggaggaggagagagctctgctggcatgagccacagtttcttgactggaggccatcaaccctcttggttgaggccttgttctgagccctgacatgtgcttgggcactggtgggcctgggcttctgaggtggcctcctgccctgatcagggaccctccccgctttcctgggcctctcagttgaacaaagcagcaaaacaaaggcagttttatatgaaagattagaagcctggaataatcaggctttttaaatgatgtaattcccactgtaatagcatagggattttggaagcagctgctggtggcttgggacatcagtggggccaagggttctctgtccctggttcaactgtgatttggctttcccgtgtctttcctggtgatgccttgtttggggttctgtgggtttgggtgggaagagggccatctgcctgaa

SEQ ID NO: 190742 - DNA, 1356 bp, Homo Sapiens
ttggaaccaagaaggaggagggggtcgggcctccgaggaaggcctagctgctgctgctgccaggaattccaggttggaggggcggcaacctcctgccagccttcaggccactctcctgtgcctgccagaagagacagagcttgaggagagcttgaggagagcaggaaaggacaatgccgtcttctgtctcgtggggcatcctcctgctggcaggcctgtgctgcctggtccctgtctccctggctgaggatccccagggagatgctgcccagaagacagatacatcccaccatgatcaggatcacccaaccttcaacaagatcacccccaacctggctgagttcgccttcagcctataccgccagctggcacaccagtccaacagcaccaatatcttcttctccccagtgagcatcgctacagcctttgcaatgctctccctggggaccaaggctgacactcacgatgaaatcctggagggcctgaatttcaacctcacggagattccggaggctcagatccatgaaggcttccaggaactcctccgtaccctcaaccagccagacagccagctccagctgaccaccggcaatggcctgttcctcagcgagggcctgaagctagtggataagtttttggaggatgttaaaaagttgtaccactcagaagccttcactgtcaacttcggggacaccgaagaggccaagaaacagatcaacgattacgtggagaagggtactcaagggaaaattgtggatttggtcaaggagcttgacagagacacagtttttgctctggtgaattacatcttctttaaaggcaaatgggagagaccctttgaagtcaaggacaccgaggaagaggacttccacgtggaccaggtgaccaccgtgaaggtgcctatgatgaagcgtttaggcatgtttaacatccagcactgtaagaagctgtccagctgggtgctgctgatgaaatacctgggcaatgccaccgccatcttcttcctgcctgatgaggggaaactacagcacctggaaaatgaactcacccacgatatcatcaccaagttcctggaaaatgaagacagaaggtctgccagcttacatttacccaaactgtccattactggaacctatgatctgaagagcgtcctgggtcaactgggcatcactaaggtcttcagcaatggggctgacctctccggggtcacagaggaggcacccctgaagctctccaaggccgtgcataatgctgtgctgaccatcgacaaaaagggactgaaactgctggggccatgtttttataggccatacccatgtctatccctcccgaggtcagtttaataaaccctttgtt

SEQ ID NO: 190743 - DNA, 926 bp, Homo Sapiens
ctttgtacaaaaaagttggcactgacctgggacagtgaatcgacaatgccgtcttctgtctcgtggggcatcctcctgctggcaggcctgtgctgcctggtccctgtctccctggctgaggatccccagggagatgctgcccagaagacagatacatcccaccatgatcaggatcacccaaccttcaacaagatcacccccaacctggctgagttcgccttcagcctataccgccagctggcacaccagtccaacagcaccaatatcttcttctccccagtgagcatcgctacagcctttgcaatgctctccctggggaccaaggctgacactcacgatgaaatcctggagggcctgaatttcaacctcacggagattccggaggctcagatccatgaaggcttccaggaactcctccgtaccctcaaccagccagacagccagctccagctgaccaccggcaatggcctgttcctcagcgagggcctgaagctagtggataagtttttggaggatgttaaaaagttgtaccactcagaagccttcactgtcaacttcggggacaccgaagaggccaagaaacagatcaacgattacgtggagaagggtactcaagggaaaattgtggatttggtcaaggagcttgacagagacacagtttttgctctggtgaattacatcttctttaaaggcaaatgggagagaccctttgaagtcaaggacaccgaggaagaggacttccacgtggaccaggtgaccaccgtgaagtgcctatgatgaagcgtttaggcatgtttaacatccagcactgtaagaagctgtccagctgggtgctgctgatgaaatacctgggcaatgccaccgccatcttcttcctgcctgatgaggggaaactacagcacctggaaaatgaactcaccccacga

SEQ ID NO: 190744 - DNA, 739 bp, Homo Sapiens
ctttgtacaaaaaagttggagcaagtaaactttgtgaagcttaatgaagataaacccaaagaaaccaagtctgaagagaccctggatgagggtccaccaaaatatactaaatctgttctgaaaaagggagataaaaccaactttcccaaaaagggagatgttgttcactgctggtatacaggaacactacaagatgggactgtttttgatactaatattcaaacaagtgcaaagaagaagaaaaatgccaagcctttaagttttaaggtcggagtaggcaaagttatcagaggatgggatgaagctctcttgactatgagtaaaggagaaaaggctcgactggagattgaaccagaatgggcttacggaaagaaaggacagcctgatgccaaaattccaccaaatgcaaaactcacttttgaagtggaattagtggatattgattgaaatagcagtgcttcagctctaaggatattagcaacaatgataaaacttggccttgaagaaatttacacaactagttagaacttgttactattgtaaaggaagagtcaactggaaaattcaaggagttaataaaatttgtttacttggtcccagcttttgagagataaatcccttatgaatccctggtctaaaatactttcctacagctgtgtaaaatactggtcaaggagaactttttccttttacctcatgttgtaaacttaagtggctcaataaaaattgatccactgtc

SEQ ID NO: 190745 - DNA, 1425 bp, Homo Sapiens
  misc_feature (1188)..(1247): n is a, c, g, or t
gcccactttgtacaaaaaagttggctgctcgcggcgccgcctcctgctcctcccgctgctgctgccgctgccgccctgagtcactgcctgcgcagctccggccgcctggctccccatactagtcgccgatatttggagttcttacaacatggcagacattgacaacaaagaacagtctgaacttgatcaagatttggatgatgttgaagaagtagaagaagaggaaactggtgaagaaacaaaactcaaagcacgtcagctaactgttcagatgatgcaaaatcctcagattcttgcagcccttcaagaaagacttgatggtctggtagaaacaccaacaggatacattgaaagcctgcctagggtagttaaaagacgagtgaatgctctcaaaaacctgcaagttaaatgtgcacagatagaagccaaattctatgaggaagttcatgatcttgaaaggaagtatgctgttctctatcagcctctatttgataagcgatttgaaattattaatgcaatttatgaacctacggaagaagaatgtgaatggaaaccagatgaagaagatgagatttcggaggaattgaaagaaaaggccaagattgaagatgagaaaaaggatgaagaaaaagaagaccccaaaggaattcctgaattttggttaactgtttttaagaatgttgacttgctcagtgatatggttcaggaacacgatgaacctattctgaagcacttgaaagatattaaagtgaagttctcagatgctggccagcctatgagttttgtcttagaatttcactttgaacccaatgaatattttacaaatgaagtgctgacaaagacatacaggatgaggtcagaaccagatgattctgatcccttttcttttgatggaccagaaattatgggttgtacagggtgccagatagattggaaaaaaggaaagaatgtcactttgaaaactattaagaagaagcagaaacacaagggacgtgggacagttcgtactgtgactaaaacagtttccaatgactctttctttaacttttttgcccctcctgaagttcctgagagtggagatctggatgatgatgctgaagctatccttgctgcagacttcgaaattggtcactttttacgtgagcgtataatcccaagatcagtgttatattttactggagaagctannnnnnnnnnnnnnnnnnnnnnnnnnnnnnnnnnnnnnnnnnnnnnnnnnnnnnnnnnnnaagaaggagatgaggaaaatgatccagactatgacccaaagaaggatcagaacccagcatagtgcaagcagcagtgaagcaggatgtatgtggccttgaggataacctgcactggtctaccttctgcttccctggaaaggatgaatttacatcatttgacaagcctatcttcaagtta

SEQ ID NO: 190746 - DNA, 936 bp, Homo Sapiens
  misc_feature (567)..(626): n is a, c, g, or t
tacaaaaaagttggctgctcgcggcgccgcctcctgctcctcccgctgctgctgccgctgccgccctgagtcactgcctgcgcagctccggccgcctggctccccatactagtcgccgatatttggagttcttacaacatggcagacattgacaacaaagaacagtctgaacttgatcaagatttggatgatgttgaagaagtagaagaagaggaaactggtgaagaaacaaaactcaaagcacgtcagctaactgttcagatgatgcaaaatcctcagattcttgcagcccttcaagaaagacttgatggtctggtagaaacaccaacaggatacattgaaagcctgcctagggtagttaaaagacgagtgaatgctctcaaaaacctgcaagttaaatgtgcacagatagaagccaaattctatgaggaagttcatgatcttgaaaggaagtatgctgttctctatcagcctctatttgataagcgatttgaaattattaatgcaatttatgaacctacggaagaagaatgtgaatggaaaccagatgaagaagatgagatttcnnnnnnnnnnnnnnnnnnnnnnnnnnnnnnnnnnnnnnnnnnnnnnnnnnnnnnnnnnnnccccaaaggaattcctgaattttggttaactgtttttaagaatgttgacttgctcagtgatatggttcaggaacacgatgaacctattctgaagcacttgaaagatattaaagtgaagttctcagatgctggccagcctatgagttttgtcttagaatttcactttgaacccaatgaatattttacaaatgaagtgctgacaaagacatacaaggatgaggtcagaaccagatgattctgatccctttttcttttgatggaccagaaattatgggttgtacagggtgccagatagattgaaaaaaggaaa

SEQ ID NO: 190747 - DNA, 1386 bp, Homo Sapiens
  misc_feature (191)..(206): n is a, c, g, or t
  misc_feature (246)..(263): n is a, c, g, or t
ttgggtttttgcagctaaaataaaaatttcaaatacaattttagttcttacaagataatgtcttaattttgtaccaattcaggtagaagtagaggcctaccttgaattaagggttatactcagtttttaacacattgttgaagaaaaggtaccagctttggaacgagatgctatactaataagcaagtgtnnnnnnnnnnnnnnnngaggaagaaaatcttaagtgattgatgctgttttcttttnnnnnnnnnnnnnnnnnnttcattttctttgggttagagctagagagaaggccccaagcttctatggtttcttctaattcttattgcttaaagtatgagtatgtcacttacccgtgcttctgtttactgtgtaattaaaatgggtagtactgtttacctaactacctcatggatgtgttaaggcatattgagttaaatctcatataatgtttctcaatcttgttaaaagctcaaaattttgggcctatttgtaatgccagtgtgacactaagcattttgttcacaccacgctttgataactaaactggaaaacaaaggtgttaagtacctctgttctggatctgggcagtcagcactctttttagatctttgtgtggctcctatttttatagaagtggagggatgcactatttcacaaggtccaagatttgttttcagatatttttgatgactgtattgtaaatactacagggatagcactatagtattgtagtcatgagacttaaagtggaaataagactatttttgacaaaagatgccattaaatttcagactgtagagccacatttacaatacctcaggctaattactgttaattttggggttgaacttttttttgacagtgagggtggattattggattgtcattagaggaaggtctagatttcctgctcttaataaaattacattgaattgatttttagaggtaatgaaaacttcctttctgagaagttagtgttaaggtcttggaatgtgaacacattgtttgtagtgctatccattcctctcctgagattttaacttactactggaaatccttaaccaattataatagctttttttctttattttcaaaatgatttcctttgctttgattagacactatgtgctttttttatttaaccatagttcatcgaaatgcagctttttctgaacttcaaagatagaatcccatttttaatgaactgaagtagcaaatcatctttttcattctttaggaaatagctattgccaaagtgaaggtgtagataatacctagtcttgttacataaaggggatgtggtttgcagaagaattttctttataaaattgaagttttaagggacgtcagtgtttatgccatttttccagttccaaaatg

SEQ ID NO: 190748 - DNA, 1179 bp, Homo Sapiens
  misc_feature (616)..(624): n is a, c, g, or t
  misc_feature (822)..(845): n is a, c, g, or t
  misc_feature (971)..(980): n is a, c, g, or t
ctttgtacaaaaaagttggcaaagacatacccggatgaggtcagaaccagatgattctgatcccttttcttttgatggaccagaaattatgggttgtacagggtgccagatagattggaaaaaaggaaagaatgtcactttgaaaactattaagaagaagcagaaacacaagggacgtgggacagttcgtactgtgactaaaacagtttccaatgactctttctttaacttttttgcccctcctgaagttcctgagagtggagatctggatgatgatgctgaagctatccttgctgcagacttcgaaattggtcactttttacgtgagcgtataatcccaagatcagtgttatattttactggagaagctattgaagatgatgatgatgattatgatgaagaaggtgaagaagcggatgaggaaggggaagaagaaggagatgaggaaaatgatccagactatgacccaaagaaggatcaaaacccagcagagtgcaagcagcagtgaagcaggatgtatgtggccttgaggataacctgcactgtaatagcctaaacacaactcttatttacttacagccttatgtttttgtattttcttggtagactaggtaannnnnnnnnaaaggacaggaaactgatattttaaagaccaatttgttctacctagcattttaactagtttttctgccagctatgttgaatgcacaaattctgtcacgcatgttcattcattgctacataatttggttcttctggaatatttttatgtagctcttggagtacagctatgaaaattaacaactgttaaaggaaataccnnnnnnnnnnnnnnnnnnnnnnnnccttgaagaaccaaagtattttttcagctggttgttgaatagggttaagtccgcttggattagctgtgcctttcattactttgttacagaaatgcagtgacttatactaagacaatttattgtttnnnnnnnnnnttggcaagacaactatatggttaagaaattccagtatgaccacaccccataactgttattagagtgtttaagggattattgtgttttggtgacatagttaactgtaaagtaacctgactcatatagttactggtacacagtgaggtgaataaaacgggattttcagaattagcctgaatttaactgtatttttaaattt

SEQ ID NO: 190749 - DNA, 1784 bp, Homo Sapiens; identical to SEQ ID NO: 183437
  misc_feature (64)..(73): n is a, c, g, or t
  misc_feature (377)..(407): n is a, c, g, or t
  misc_feature (587)..(602): n is a, c, g, or t
  misc_feature (642)..(654): n is a, c, g, or t
  misc_feature (1532)..(1542): n is a, c, g, or t

SEQ ID NO: 190750 - DNA, 914 bp, Homo Sapiens
ttggcgctaattgtatatgagcgcgagcggcgggctcttgggtcttttttagcgccatctgctcgcggcgccgcctcctgctcctcccgctgctgctgccgctgccgccctgagtcactgcctgcgcagctccggccgcctggctccccatactagtcgccgatatttggagttcttacaacatggcagacattgacaacaaagaacagtctgaacttgatcaagatttggatgatgttgaagaagtagaagaagaggaaactggtgaagaaacaaaactcaaagcacgtcagctaactgttcagatgatgcaaaatcctcagattcttgcagcccttcaagaaagacttgatggtctggtagaaacaccaacaggatacattgaaagcctgcctagggtagttaaaagacgagtgaatgctctcaaaaacctgcaagttaaatgtgcacagatagaagccaaattctatgaggaagttcatgatcttgaaaggaagtatgctgttctctatcagcctctatttgataagcgatttgaaattattaatgcaatttatgaacctacggaagaagaatgtgaatggaaaccagatgaagaagatgagatttcggaggaattgaaagaaaaggccaagattgaagatgagaaaaaggatgaagaaaaagaagaccccaaaggaattcctgaattttggttaactgtttttaagaatgttgacttgctcagtgatatggttcacgaacacgatgaacctattctgaagcacttgaaagatattaaagtgaagttctcagatgctggccagcctatgagttttgtcttagaatttcactttgaacccaatgaatattttacaaatgaagtgctgacaaagacatacaggatgaggtcagaaccagatgattctgatccc

SEQ ID NO: 190751 - DNA, 1266 bp, Homo Sapiens
  misc_feature (440)..(500): n is a, c, g, or t
ttggcttacaacatggcagacattgacaacaaagaacagtctgaacttgatcaagatttggatgatgttgaagaagtagaagaagaggaaactggtgaagaaacaaaactcaaagcacgtcagctaactgttcagatgatgcaaaatcctcagattcttgcagcccttcaagaaagacttgatggtctggtagaaacaccaacaggatacattgaaagcctgcctagggtagttaaaagacgagtgaatgctctcaaaaacctgcaagttaaatgtgcacagatagaagccaaattctatgaggaagttcatgatcttgaaaggaagtatgctgttctctatcagcctctatttgataagcgatttgaaattattaatgcaatttatgaacctacggaagaagaatgtgaatggaaaccagatgaagaagatgagatttnnnnnnnnnnnnnnnnnnnnnnnnnnnnnnnnnnnnnnnnnnnnnnnnnnnnnnnnnnnnnccccaaaggaattcctgaattttggttaactgtttttaagaatgttgacttgctcagtgatatggttcaggaacacgatgaacctattctgaagcacttgaaagatattaaagtgaagttctcagatgctggccagcctatgagttttgtcttagaatttcactttgaacccaatgaatattttacaaatgaagtgctgacaaagacatacaggatgaggtcagaaccagatgattctgatcccttttcttttgatggaccagaaattatgggttgtacagggtgccagatagattgggaaaaaaggaaagaatgtcactttgaaaactattaagaagaagcagaaacacaagggacgtgggacagttcgtactgtgactaaaacagtttccaatgactctttctttaacttttttgcccctcctgaagttcctgagagtggagatctggatgatgatgctgaagctatccttgctgcagacttcgaaattggtcactttttacgtgagcgtataatcccaagatcagtgttatattttactggagaagctattgaagatgatgatgatgattatgatgaagaaggtgaagaagcggatgaggtaatgtttaccaaatgagcaaataattctctgtggttaacacattgacgactcaattgaatgacttatgtattcctttgctataatcattctgtgatttgggataaaaacattttggaaaacatgattttagaattctacagccaaacaatgtatgtataagg

SEQ ID NO: 190752 - DNA, 2928 bp, Homo Sapiens; identical to SEQ ID NO: 183438

SEQ ID NO: 190753 - DNA, 902 bp, Homo Sapiens
ctttgtacaaaaaagttgggctggagtctcccctggaagggctgaccgacgagatcaacttcctcaggcagctatatgaagaggagatccgggagctgcagtcccagatctcggacacatctgtggtgctgtccatggacaacagccgctccctggacatggacagcatcattgctgaggtcaaggcacagtacgaggatattgccaaccgcagccgggctgaggctgagagcatgtaccagatcaagtatgaggagctgcagagcctggctgggaagcacggggatgacctgcggcgcacaaagactgagatctctgagatgaaccggaacatcagccggctccaggctgagattgagggcctcaaaggccagagggcttccctggaggccgccattgcagatgccgagcagcgtggagagctggccattaaggatgccaacgccaagttgtccgagctggaggccgccctgcagcgggccaagcaggacatggcgcggcagctgcgtgagtaccaggagctgatgaacgtcaagctggccctggacatcgagatcgccacctacaggaagctgctggagggcgaggagagccggctggagtctgggatgcagaacatgagtattcatacgaagaccaccagcggctatgcaggtggtctgagctcggcctatgggggcctcacaagccccggcctcagctacagcctgggctccagctttggctctggcgcgggctccagctccttcagccgcaccagctcctccagggccgtggttgtgaagaagatcgagacacgtgatgggaagctggtgtctgagtcctctgacgtcctgcccaagtgaacagctgcggcagcccctcccagcctacccctcctgcgctgccccagagcctgggaa

SEQ ID NO: 190754 - DNA, 1876 bp, Homo Sapiens; identical to SEQ ID NO: 183439

SEQ ID NO: 190755 - DNA, 2097 bp, Homo Sapiens; identical to SEQ ID NO: 183440

SEQ ID NO: 190756 - DNA, 558 bp, Homo Sapiens
ttggagcagaacaagctgctggagaccaagtggacgctgctgcaggagcagaagtcggccaagagcagccgcctcccagacatctttgaggcccagattgctggccttcggggtcagcttgaggcactgcaggtggatgggggccgcctggaggcggagctgcggagcatgcaggatgtggtggaggacttcaagaataagtacgaagatgaaattaaccgccgcacagctgctgagaatgagtttgtggtgctgaagaaggatgtggatgctgcctacatgagcaaggtggagctggaggccaaggtggatgccctgagcttctccagcagtgcgggtcctgggctcctgaaggcttattcgatccggaccgcatccgccagtcgcaggagtgcccgcgactgagccgcctcccaccactccactcctccagccaccacccacaatcacaagaagattcccacccctgcctcccatgcctggtcccaagacagtgagacagtctggaaagtgatgtcagaatagcttccattaaagcagcctcattctgaggcctga

SEQ ID NO: 190757 - DNA, 542 bp, Homo Sapiens
ttgtacaaaaaagttggccaggagctgaccgaacgtcaagctggccctggacatcgagatcgccacctacaggaagctgctggagggcgaggagagccggctggagtctgggatgcagaacatgagtattcatacgaagaccaccagcggctatgcaggtggtctgagctcggcctatgggggcctcacaagccccggcctcagctacagcctgggctccagctttggctctggcgcgggctccagctccttcagccgcaccagctcctccagggccgtggttgtgaagaagatcgagacacgtgatgggaagctggtgtctgagtcctctgacgtcctgcccaagtgaacagctgcggcagcccctcccagcctacccctcctgcgctgccccagagcctgggaaggaggccgctatgcagggtagcactgggaacaggagacccacctgaggctcagccctagccctcagcccacctggggagtttactacctggggaccccccttgcccatgcctccagctacaaaacaattcaattgc

SEQ ID NO: 190758 - DNA, 685 bp, Homo Sapiens
cctataaaagccaactttgtacaaaaaagttggcaaccgcagccgggctgggaagcacggggatgacctgcggcgcacaaagactgagatctctgagatgaaccggaacatcagccggctccaggctgagattgagggcctcaaaggccagagggcttccctggaggccgccattgcagatgccgagcagcgtggagagctggccattaaggatgccaacgccaagttgtccgagctggaggccgccctgcagcgggccaagcaggacatggcgcggcagctgcgtgagtaccaggagctgatgaacgtcaagctggccctggacatcgagatcgccacctacaggaagctgctggagggcgaggagagccggctggagtctgggatgcagaacatgagtattcatacgaagaccaccagcggctatgcaggtggtctgagctcggcctatgggggcctcacaagccccggcctcagctacagcctgggctccagctttggctctggcgcgggctccagctccttcagccgcaccagctcctccagggccgtggttgtgaagaagatcgagacacgtgatgggaagctggtgtctgagtcctctgacgtcctgcccaagtgaacagctgcggcagcccctcccagcctacccctcccgcgctgccccagagcctgggaaggaggc

SEQ ID NO: 190759 - DNA, 677 bp, Homo Sapiens
ttgcaaacaaattgatgagcaatgctttcttttataaaggcccactttgtacaaaaaagttggccgacacatccgtgaaatgctgtccatggacaacagtcgctccctggacctggacggcatcatcgctgaggtcaaggcacagtatgaggagatggccaaatgcagccgggctgaggctgaagcctggtaccagaccaagtttgagaccctccaggcccaggctgggaagcatggggacgacctccggaatacccggaatgagatttcagagatgaaccgggccatccagaggctgcaggctgagatcgacaacatcaagaaccagcgtgccaagttggaggccgccattgccgaggctgaggagcgtggggagctggcgctcaaggatgctcgtgccaagcaggaggagctggaagccgccctgcagcgggccaagcaggatatggcacggcagctgcgtgagtaccaggaactcatgagcgtgaagctggccctggacatcgagatcgccacctaccgcaagctgctggagggcgaggagagccggttggctggagatggagtgggagccgtgaatatctctgtgatgaattccactggtggcagtaacagtggcggccggcattgggctgaccctcgggggaaccatgggcagcaatgccctgagcttctcc

SEQ ID NO: 190760 - DNA, 1010 bp, Homo Sapiens
ctttaaaagccaactttgtacaaaaaagttggcgctcctcctcgcccgccgctaggtccatcccggcccagccaccatgtccatccacttcagctccccggtattcacctcgcgctcagccgccttctcgggccgcggcgcccaggtgcgcctgagctccgctcgccccggcggccttggcagcagcagcctctacggcctcggcgcctcgcggccgcgcgtggccgtgcgctctgcctatgggggcccggtgggcgccggcatccgcgaggtcaccattaaccagagcctgctggccccgctgcggctggacgccgacccctccctccagcgggtgcgccaggaggagagcgagcagatcaagaccctcaacaacaagtttgcctccttcatcgacaaggtgcggtttctggagcagcagaacaagctgctggagaccaagtggacgctgctgcaggagcagaagtcggccaagagcagccgcctcccagacatctttgaggcccagattgctggccttcggggtcagcttgaggcactgcaggtggatgggggccgcctggaggcggagctgcggagcatgcaggatgtggtggaggacttcaagaataagtacgaagatgaaattaaccgccgcacagctgctgagaatgagtttgtggtgctgaagaaggatgtggatgctgcctacatgagcaaggtggagctggaggccaaggtggatgccctgaatgatgagatcaacttcctcaggaccctcaatgagacggagttgacagagctgcagtcccagatctccgacacatctgtggtgctgtccatggacaacagtcgctccctggacctggacggcatcatcgctgaggtcaaggcacagtatgaggagatggccaaatgcagccgggctgaggctgaagcctggtaccagaccaagtttgagaccctccaggcccaggctgggaagcatggggacgacctccggaatacccggaatgagatttcagagatga

SEQ ID NO: 190761 - DNA, 1133 bp, Homo Sapiens
ctttgtacaaaaaagttggcctccctccagcgggtgcgccaggaggagagcgagcagatcaagaccctcaacaacaagtttgcctccttcatcgacaaggtgcggtttctggagcagcagaacaagctgctggagaccaagtggacgctgctgcaggagcagaagtcggccaagagcagccgcctcccagacatctttgaggcccagattgctggccttcggggtcagcttgaggcactgcaggtggatgggggccgcctggaggcggagctgcggagcatgcaggatgtggtggaggacttcaagaataagtacgaagatgaaattaaccgccgcacagctgctgagaatgagtttgtggtgctgaagaaggatgtggatgctgcctacatgagcaaggtggagctggaggccaaggtggatgccctgaatgatgagatcaacttcctcaggaccctcaatgagacggagttgacagagctgcagtcccagatctccgacacatctgtggtgctgtccatggacaacagtcgctccctggacctggacggcatcatcgctgaggtcaaggcacagtatgaggagatggccaaatgcagccgggctgaggctgaagcctggtaccagaccaagtttgagaccctccaggcccaggctgggaagcatggggacgacctccggaatacccggaatgagatttcagagatgaaccgggccatccagaggctgcaggctgagatcgacaacatcaagaaccagcgtgccaagttggaggccgccattgccgaggctgaggagcgtggggagctggcgctcaaggatgctcgtgccaagcaggaggagctggaagccgccctgcagcgggccaagcaggatatggcacggcagctgcgtgagtaccaggaactcatgagcgtgaagctggccctggacatcgagatcgccacctaccgcaagctgctggagggcgaggagagccggttggctggagatggagtgggagccgtgaatatctctgtgatgaattccactggtggcagtagcagtggcggtggcattgggctgaccctcgggggaaccatgggcagcaatgccctgagcttctccagcagtgcgggtcctgggctcctgaa

SEQ ID NO: 190762 - DNA, 936 bp, Homo Sapiens
ccaactttgtacaaaaaagttggcttctgcgtcctgctgagctctgttctctccagcacctcccaacccactagtgcctggttctcttgctccaccaggaacaagccaccatgtctcgccagtcaagtgtgtccttccggagcgggggcagtcgtagcttcagcaccgcctctgccatcaccccgtctgtctcccgcaccagcttcacctccgtgtcccggtccgggggtggcggtggtggtggcttcggcagggtcagccttgcgggtgcttgtggagtgggtggctatggcagccggagcctctacaacctggggggctccaagaggatatccatcagcactagtggtggcagcttcaggaaccggtttggtgctggtgctggaggcggctatggctttggaggtggtgccggtagtggatttggtttcggcggtggagctggtggtggctttgggctcggtggcggagctggctttggaggtggcttcggtggccctggctttcctgtctgccctcctggaggtatccaagaggtcactgtcaaccagagtctcctgactcccctcaacctgcaaatcgaccccagcatccagagggtgaggaccgaggagcgcgagcagatcaagaccctcaacaataagtttgcctccttcatcgacaaggtgcggttcctggagcagcagaacaaggttctggacaccaagtggaccctgctgcaggagcagggcaccaagactgtgaggcagaacctggagccgttgttcgagcagtacatcaacaacctcagaggcagctggacagcatcgtgggggaacggggccgcctggactcagagctgagaaacatgcaggacctggtggaagacttcaagaacaagtatgaggatgaaatcaacaagcgtaccactgctgaaaatgagtttgtgatgctgaa

SEQ ID NO: 190763 - DNA, 914 bp, Homo Sapiens; identical to SEQ ID NO: 183442

SEQ ID NO: 190764 - DNA, 1655 bp, Homo Sapiens; identical to SEQ ID NO: 183444
  misc_feature (1395)..(1433): n is a, c, g, or t

SEQ ID NO: 190765 - DNA, 2480 bp, Homo Sapiens; identical to SEQ ID NO: 183445

SEQ ID NO: 190766 - DNA, 808 bp, Homo Sapiens; identical to SEQ ID NO: 183446

SEQ ID NO: 190767 - DNA, 737 bp, Homo Sapiens
ctaagttacaggcgtcaaccaccacactcggccctccttgcaatttattttagtgaagtgatcatgatattaatgacccaggaaacttcgtttctctgctctcaacatagtaggaactttaagactattcttttacaggtacaggtttgcagattccgccagcagcacagcaagctctacagatgagtggctctttggcatttggtgctgtggcagatttgcaaacaagactttcccagcagactgaagcttcagctttagctgcagctgcctctgttcagccacttgcaacacaatgtttccaactctctaacatgtttaaccctcaaacagaagaagaagttggatgggataccgagattaaggatgatgtgattgaagaatgtaataaacatggaggagttattcatatttatgttgacaaaaattcagctcagggcaatgtgtatgtgaagtgcccatcaattgctgcagctattgctgctgtcaatgcattgcatggcaggtggtttgctggtaaaatgataacagcagcatatgtacctcttccaacttaccacaacctgtttcctgattctatgacagcaacacagctactggttccaagtagacgatgaaggaagatatagtcccttatgtatatagctttttttctttcttgaaattcatcttgagttatcttttatttagataaaaataaagaggcaaggatctactgtcatttgtatgcaatttcc

SEQ ID NO: 190768 - DNA, 1231 bp, Homo Sapiens; identical to SEQ ID NO: 179984
  misc_feature (62)..(72): n is a, c, g, or t
  misc_feature (1037)..(1049): n is a, c, g, or t

SEQ ID NO: 190769 - DNA, 3843 bp, Homo Sapiens; identical to SEQ ID NO: 179985
  misc_feature (181)..(189): n is a, c, g, or t
  misc_feature (1589)..(1598): n is a, c, g, or t
  misc_feature (3378)..(3396): n is a, c, g, or t

SEQ ID NO: 190770 - DNA, 1187 bp, Homo Sapiens; identical to SEQ ID NO: 183447

SEQ ID NO: 190771 - DNA, 354 bp, Homo Sapiens
ctttgtacaaaaaagttggcaattaatgtatcccgtaaaagtttctttgtaaatactatgtgttctggtgtgtcttaaaattccaaacaaaatgatccctgcatttcctgaagatgtttaaacgtgagagtctggtaggcaaagcagtctgagaaagaaataggaaatgcagaaataggttttgtctggttgcatataatctttgctctttttaagctctgtgagctctgaaatatatttttgggttacttcagtgtgtttgacaagacagcttgatatttctatcaaacaaatgactttcatattgcaacaatctttgtaagaaccactctattataagtctcttaaaaaggc

SEQ ID NO: 190772 - DNA, 2274 bp, Homo Sapiens; identical to SEQ ID NO: 183448
  misc_feature (93)..(101): n is a, c, g, or t
  misc_feature (206)..(229): n is a, c, g, or t

SEQ ID NO: 190773 - DNA, 1298 bp, Homo Sapiens; identical to SEQ ID NO: 183449

SEQ ID NO: 190774 - DNA, 1958 bp, Homo Sapiens; identical to SEQ ID NO: 183450
  misc_feature (511)..(523): n is a, c, g, or t

SEQ ID NO: 190775 - DNA, 1647 bp, Homo Sapiens; identical to SEQ ID NO: 183452
  misc_feature (100)..(122): n is a, c, g, or t
  misc_feature (376)..(408): n is a, c, g, or t

SEQ ID NO: 190776 - DNA, 1164 bp, Homo Sapiens; identical to SEQ ID NO: 183454
  misc_feature (992)..(1000): n is a, c, g, or t

SEQ ID NO: 190777 - DNA, 1531 bp, Homo Sapiens; identical to SEQ ID NO: 183455

SEQ ID NO: 190778 - DNA, 1029 bp, Homo Sapiens; identical to SEQ ID NO: 183456

SEQ ID NO: 190779 - DNA, 1638 bp, Homo Sapiens; identical to SEQ ID NO: 179986

SEQ ID NO: 190780 - DNA, 345 bp, Homo Sapiens
ttgtacaaaaaagttgggacaagttttccttatataccagtctgaaaccaaaaaccttctgttcaatgacaacactgagtgtctggccagactccatggcaaaacaacatatgaaaaatatttgggaccacagtatgtcgcaggcattactaatctgaaaaagtgctcaacctcccccctcctggaagcctgtgaattcctcaggaagtaaaaccgaagaagatggcccagctccccaagaaagcctcagccattcactgcccccagctcttctccccaggtgtgttggggccttggcctcccctgctgaaggtggggattgcccatccattttcttacaattcc

SEQ ID NO: 190781 - DNA, 1335 bp, Homo Sapiens
ccataatagcacaactttgtacaaaaagttggccggctgcggatctgggaagcgcctcttcacggcactgggatccgcatctgcctgggatcatcaagccctagaagctgggtttctttaaattagggctgccgttttctgtttctccctgggctgcggaaagccagaagattttatctagcttatacaaggctgctggtgttccctctttttttccacgagggtgtttttggctgcaattgcatgaaatcccaatggtgtagaccagtggcgatggatctaggagtttaccaactgagacatttttcaatttctttcttgtcatccttgctggggactgaaaacgcttctgtgagacttgataatagctcctctggtgcaagtgtggtagctattgacaacaaaatcgagcaagctatggatctagtgaaaagccatttgatgtatgcggtcagagaagaagtggaggtcctcaaagagcaaatcaaagaactaatagagaaaaattcccagctggagcaggagaacaatctgctgaagacactggccagtcctgagcagcttgcccagtttcaggcccagctgcagactggctccccccctgccaccacccagccacagggcaccacacagccccccgcccagccagcatcgcagggctcaggaccaaccgcatagctgcctatgcccccgcagaactggctgctgcgtgtgaactgaacagacggagaagatgtgctagggagaatctgcctccacagtcacccatttcattgctcgctgcgaaagagacgtgagactgacatatgccattatctcttttccagtattaaacactcatatgcttatggcttggagaaatttcttagttgggtgaattaaaggttaatccgagaattagcatggatataccgggacctcatgcagcttggcagatatctgagaaatggtttaattcatgctcaggagctgtgtgcctttccatcccttccggctccctacccctcacttccaagggttctctctcctgcttgcgcttagtgtcctacatggggttgtgaagcgatggagctcctcactggactcgcctctctcctctcctccccccaggaggaacttgaaaggagggtaaaaagactaaaatgagggggaacagagttcactgtacaaatttgacaactgtcaccaaattcataaaaaaatagtactgtgcctctttcttctcaaacaatggatgacacaaaactatgagagtgacaaaatggtgacaggtagctgggaactaggctatcttacatgaaggttggtttgcttattgtataatttgtgtatgta

SEQ ID NO: 190782 - DNA, 1353 bp, Homo Sapiens
ttggctattgggcaacagggcggggcaaagccctgaataaaggggcgcagggcaggcgcaagtggcagagccttcgtttggcaagtcgcctccagaccgcagacatgaaacttgtcttcctcgtcctgctgttcctcggggccctcggactgtgtctggctggccgtaggagaaggagtgttcagtggtgcgccgtatcccaacccgaggccacaaaatgcttccaatggcaaaggaatatgagaaaagtgcgtggccctcctgtcagctgcataaagagagactcccccatccagtgtatccaggccattgcggaaaacagggccgatgctgtgacccttgatggtggtttcatatacgaggcaggcctggccccctacaaactgcgacctgtagcggcggaagtctacgggaccgaaagacagccacgaactcactattatgccgtggctgtggtgaagaagggcggcagctttcagctgaacgaactgcaaggtctgaagtcctgccacacaggccttcgcaggaccgctggatggaatgtccctatagggacacttcgtccattcttgaattggacgggtccacctgagcccattgaggcagctgtggccaggttcttctcagccagctgtgttcccggtgcagataaaggacagttccccaacctgtgtcgcctgtgtgcggggacaggggaaaacaaatgtgccttctcctcccaggaaccgtacttcagctactctggtgccttcaagtgtctgagagacggggctggagacgtggcttttatcagagagagcacagtgtttgaggacctgtcagacgaggctgaaagggacgagtatgagttactctgcccagacaacactcggaagccagtggacaagttcaaagactgccatctggcccgggtcccttctcatgccgttgtggcacgaagtgtgaatggcaaggaggatgccatctggaatcttctccgccaggcacaggaaaagtttggaaaggacaagtcaccgaaattccagctctttggctcccctagtgggcagaaagatctgctgttcaaggactctgccattgggttttcgagggtgcccccgaggatagattctgggctgtaccttggctccggctacttcactgccatccagaacttgaggaaaagtgaggaggaagtggctgcccggcgtgcgcgggtcgtgtggtgtgcggtgggcgagcaggagctgcgcaagtgtaaccagtggagtggcttgagcgaaagcagcgtgacctgctcctcggcctccaccacaaaggactgcatccccctggtgctgaaaggagaagctgatgccatgagtttggatggag

SEQ ID NO: 190783 - DNA, 2633 bp, Homo Sapiens; identical to SEQ ID NO: 183458
  misc_feature (532)..(572): n is a, c, g, or t

SEQ ID NO: 190784 - DNA, 1141 bp, Homo Sapiens; identical to SEQ ID NO: 183459

SEQ ID NO: 190785 - DNA, 983 bp, Homo Sapiens; identical to SEQ ID NO: 183460

SEQ ID NO: 190786 - DNA, 683 bp, Homo Sapiens
actttgtacaaaaaagttggttgaaaggagggtctaaaagactaaaatgagggggaacagagttcactgtacaaatttgacaactgtcaccaaaattcataaaaaacaatagtactgtgcctctttcttctcaaacaatggatgacacaaaactatgagagtgacaaaatggtgacaggtagctgggacctaggctatcttaccatgaaggttgttttgcttattgtatatttgtgtatgtagtgtaactattttgtacaatagaggactgtaactactatttaggttgtacagattgaaatttagttgtttcattggctgtctgaggaggtgtggacttttatatatagatctacataaaaactgctacatgacaaaaaccacacctaaagaaattttaagaatttggcacagttactcactttgtgtaatctgaaatctagctgctgaatacgctgaagtaaatccttgttcactgaagtctttcaattgagctggttgaatactttgaaaaatgctcagttctaactaatgaaatggatttcccagtaggggtttctgcatatcacctgtatagtagttatatgcatatgtttctgtgcatgttctctacacaattgtaaggtgtcactgtatttaactgttgcacttgtcaactttcaataaagcatataaatgttgat

SEQ ID NO: 190787 - DNA, 1265 bp, Homo Sapiens
  misc_feature (163)..(215): n is a, c, g, or t
ctttgtacaaaaaagttggcagagaagaagtggaggtcctcaaagagcaaatcaaagaactaatagagaaaaattcccagctggagcaggagaacaatctgctgaagacactggccagtcctgagcagcttgcccagtttcaggcccagctgcagactggctnnnnnnnnnnnnnnnnnnnnnnnnnnnnnnnnnnnnnnnnnnnnnnnnnnnnngcatcgcagggctcaggaccaaccgcatagctgcctatgcccccgcagaactggctgctgcgtgtgaactgaacagacggagaagatgtgctagggagaatctgcctccacagtcacccatttcattgctcgctgcgaaagagacgtgagactgacatatgccattatctcttttccagtattaaacactcatatgcttatggcttggagaaatttcttagttgggtgaattaaaggttaatccgagaattagcatggatataccgggacctcatgcagcttggcagatatctgagaaatggtttaattcatgctcaggagctgtgtgcctttccatcccttccggctccctacccctcacttccaagggttctctctcctgcttgcgcttagtgtcctacatggggttgtgaagcgatggagctcctcactggactcgcctctctcctctcctccccccaggaggaacttgaaaggagggtaaaaagactaaaatgagggggaacagagttcactgtacaaatttgacaactgtcaccaaaattcataaaaaacaatagtactgtgcctctttcttctcaaacaatggatgacacaaaactatgagagtgacaaaatggtgacaggtagctgggacctaggctatcttaccatgaaggttgttttgcttattgtatatttgtgtatgtagtgtaactattttgtacaatagaggactgtaactactatttaggttgtacagattgaaatttagttgtttcattggctgtctgaggaggtgtggacttttatatatagatctacataaaaactgctacatgacaaaaaccacacctaaagaaattttaagaatttggcacagttactcactttgtgtaatctgaaatctagctgctgaatacgctgaagtaaatccttgttcactgaaagtctttcaattgagctggttgaatactttgaaaaatgctcagttctactaatggaaatggatttcccagtaggggtttctgcatatccactgtatagtagttatatgcatattgttttctg

SEQ ID NO: 190788 - DNA, 847 bp, Homo Sapiens
aattgatgagcaatgcttttcttataaagcctactttgtacaaaaaagttggcggccttccaccacccgccaacagaattcatacgagaaggcgacgatgaccggactgtgtgccgggagatccgccacaactccacgggctgcctgcggatgaaggaccagtgtgacaagtgccgggagatcttgtctgtggactgttccaccaacaacccctcccaggctaagctgcggcgggagctcgacgaatccctccaggtcgctgagaggttgaccaggaaatacaacgagctgctaaagtcctaccagtggaagatgctcaacacctcctccttgctggagcagctgaacgagcagtttaactgggtgtcccggctggcaaacctcacgcaaggcgaagaccagtactatctgcgggtcaccacggtggcttcccacacttctgactcggacgttccttccggtgtcactgaggtggtcgtgaagctctttgactctgatcccatcactgtgacggtccctgtagaagtctccaggaagaaccctaaatttatggagaccgtggcggagaaagcgctgcaggaataccgcaaaaagcaccgggaggagtgagatgtggatgttgcttttgcacctacgggggcatctgagtccagctccccccaagatgagctgcagccccccagagagagctctgcacgtcaccaagtaaccaggcccccagcctccaggctcccaactccgcccagcctctccccgctctggatcctgcactctaacactcgactctgctgctcatgggaagaacagaattgctcctgcatgcaactaattcaataaaactgtcttg

SEQ ID NO: 190789 - DNA, 906 bp, Homo Sapiens
caactttgtacaaaaaagttggctacgaagcagagatctgaagacagcatgtacacagccattccccagagtggctctccattcccaggctcagtgcaggatccaggcctgcatgtgtggcgggtggagaagctgaagccggtgcctgtggcgcaagagaaccagggcgtcttcttctcgggggactcctacctagtgctgcacaatggcccagaagaggtttcccatctgcacctgtggataggccagcagtcatcccgggatgagcagggggcctgtgccgtgctggctgtgcacctcaacacgctgctgggagagcggcctgtgcagcaccgcgaggtgcagggcaatgagtctgacctcttcatgagctacttcccacggggcctcaagtaccaggaaggtggtgtggagtcagcatttcacaagacctccacaggagccccagctgccatcaagaaactctaccaggtgaaggggaagaagaacatccgtgccaccgagcgggcactgaactgggacagcttcaacactggggactgcttcatcctggacctgggccagaacatcttcgcctggtgtggtggaaagtccaacatcctggaacgcaacaaggcgagggacctggccctggccatccgggacagtgagcgacagggcaaggcccaggtggagattgtcactgatggggaggagcctgctgagatgatccaggtcctgggccccaacctgctctgaaggagggcaaccctgaggaagacctcacagctgacaaggcaaatgcccaggccgcagctctgtataaggtctctgatgccactgggacagatgaacctgaacaaaagtggctgactccagcccatttgcccttgaactgctgatatctgatgactgctttgtgctgga

SEQ ID NO: 190790 - DNA, 945 bp, Homo Sapiens; identical to SEQ ID NO: 179988

SEQ ID NO: 190791 - DNA, 2286 bp, Homo Sapiens; identical to SEQ ID NO: 179989
  misc_feature (316)..(352): n is a, c, g, or t
  misc_feature (1935)..(1965): n is a, c, g, or t

SEQ ID NO: 190792 - DNA, 1469 bp, Homo Sapiens; identical to SEQ ID NO: 179990
  misc_feature (103)..(133): n is a, c, g, or t
  misc_feature (934)..(943): n is a, c, g, or t

SEQ ID NO: 190793 - DNA, 1828 bp, Homo Sapiens; identical to SEQ ID NO: 179991
  misc_feature (109)..(139): n is a, c, g, or t
  misc_feature (940)..(949): n is a, c, g, or t

SEQ ID NO: 190794 - DNA, 1026 bp, Homo Sapiens; identical to SEQ ID NO: 179992

SEQ ID NO: 190795 - DNA, 1486 bp, Homo Sapiens; identical to SEQ ID NO: 179993
  misc_feature (109)..(139): n is a, c, g, or t
  misc_feature (938)..(946): n is a, c, g, or t

SEQ ID NO: 190796 - DNA, 1271 bp, Homo Sapiens; identical to SEQ ID NO: 179994
  misc_feature (823)..(832): n is a, c, g, or t

SEQ ID NO: 190797 - DNA, 1389 bp, Homo Sapiens; identical to SEQ ID NO: 183464
  misc_feature (1303)..(1313): n is a, c, g, or t

SEQ ID NO: 190798 - DNA, 1514 bp, Homo Sapiens; identical to SEQ ID NO: 179995

SEQ ID NO: 190799 - DNA, 832 bp, Homo Sapiens
ctttgtacaaaaaagttggcaatgaggtgattgatgactttatgactcgactggaccagctgcgggcagagagtgcttcggggaaccaggtgtcggacatggctcaactcttctactactttgccttggaagctatttgctacatcctgttcgagaaacgcattggctgcctgcagcgatccatccccgaggacaccgtgaccttcgtcagatccatcgggttaatgttccagaactcactctatgccaccttcctccccaagtggactcgccccgtgctgcctttctggaagcgatacctggatggttggaatgccatcttttcctttgggaagaagctgattgatgagaagctcgaagatatggaggcccaactgcaggcagcagggccagatggcatccaggtgtctggctacctgcacttcttactggccagtggacagctcagtcctcgggaggccatgggcagcctgcctgagctgctcatggctggagtggacacgacatccaacacgctgacatgggccctgtaccacctctcaaaggaccctgagatccaggaggccttgcacgaggaagtggtgggtgtggtgccagccgggcaagtgccccagcacaaggactttgcccacatgccgttgctcaaagctgtgcttaaggagactctgcgtctctaccctgtggtccccaaaactcccggatcatagaaaaggaaattgaaattgatggcttcctcttccccaagaacacccattttgtgttctgccactatgtggtgtcccgggaccccactgccttctctgagcctgaaagcttccagccccaccgctgg

SEQ ID NO: 190800 - DNA, 1841 bp, Homo Sapiens; identical to SEQ ID NO: 183468
  misc_feature (1423)..(1518): n is a, c, g, or t
  misc_feature (1587)..(1609): n is a, c, g, or t

SEQ ID NO: 190801 - DNA, 1129 bp, Homo Sapiens; identical to SEQ ID NO: 179997
  misc_feature (234)..(269): n is a, c, g, or t
  misc_feature (332)..(448): n is a, c, g, or t
  misc_feature (922)..(937): n is a, c, g, or t

SEQ ID NO: 190802 - DNA, 1249 bp, Homo Sapiens; identical to SEQ ID NO: 179998
  misc_feature (856)..(870): n is a, c, g, or t
  misc_feature (1084)..(1132): n is a, c, g, or t

SEQ ID NO: 190803 - DNA, 1784 bp, Homo Sapiens; identical to SEQ ID NO: 183469

SEQ ID NO: 190804 - DNA, 3018 bp, Homo Sapiens; identical to SEQ ID NO: 183470
  misc_feature (2549)..(2559): n is a, c, g, or t

SEQ ID NO: 190805 - DNA, 2264 bp, Homo Sapiens; identical to SEQ ID NO: 183473
  misc_feature (2100)..(2112): n is a, c, g, or t

SEQ ID NO: 190806 - DNA, 1322 bp, Homo Sapiens; identical to SEQ ID NO: 183475
  misc_feature (58)..(74): n is a, c, g, or t
  misc_feature (1033)..(1046): n is a, c, g, or t
  misc_feature (1185)..(1199): n is a, c, g, or t

SEQ ID NO: 190807 - DNA, 2043 bp, Homo Sapiens; identical to SEQ ID NO: 183476
  misc_feature (340)..(353): n is a, c, g, or t
  misc_feature (492)..(505): n is a, c, g, or t
  misc_feature (1497)..(1509): n is a, c, g, or t
  misc_feature (1623)..(1632): n is a, c, g, or t

SEQ ID NO: 190808 - DNA, 1726 bp, Homo Sapiens; identical to SEQ ID NO: 183479

SEQ ID NO: 190809 - DNA, 2135 bp, Homo Sapiens; identical to SEQ ID NO: 183480
  misc_feature (1768)..(1768): n is a, c, g, or t

SEQ ID NO: 190810 - DNA, 778 bp, Homo Sapiens
gtacaaaaaagttggcaagaagtagtatcttatgatataataagagatgcatttgaaaacactgcaacagtgaacttttgcatctcaagaaaacattgaaaaattctatgaattgttgtagccggtgaattgagtcgtattctgtcacataatattttgaagaaaacttggctgtcgaaacatttttctctctgactgctgcttgaatgttcttggaggctgtttcttatgtatgggttttttttaatgtgatcccttcatttgaatattaatggctttttccattaaagaataaaatattttggacaatgccgataaatgtatgaagttagtatccacatcataaattcagagtgatgtttagcagtaaatcaatattttgaagtgatacacagatgtctttcctccccacaaacttttttaaacaaaaaacaagacctcttttctttagatggtgccacctatgcccaccacaacagagattttacatggaaaccgggctcagtgagaactgatttcctgcccaatatttgtctttgggctgtctctagtgactaattattaaggaatctagctggttatacagttcaaggctttctatgttgttaatgaacctcaaaaatagccgttaagacatgaaatacagcagcaggttaccaatgcgaacaggtagttcgcatttatgtaaaacattcagaaaatgaagttttgaatttgttggaacattcaaaggacttgagagcattttattgtaacttaaaaaattaaatacaactgt

SEQ ID NO: 190811 - DNA, 890 bp, Homo Sapiens
ttggtgtcctttctctctccccggacagcatgagcttcaccactcgctccaccttctccaccaactaccggtccctgggctctgtccaggcgcccagctacggcgcccggccggtcagcagcgcggccagcgtctatgcaggcgctgggggctctggttcccggatctccgtgtcccgctccaccagcttcaggggcggcatggggtccgggggcctggccaccgggatagccgggggtctggcaggaatgggaggcatccagaacgagaaggagaccatgcaaagcctgaacgaccgcctggcctcttacctggacagagtgaggagcctggagaccgagaaccggaggctggagagcaaaatccgggagcacttggagaagaagggaccccaggtcagagactggagccattacttcaagatcatcgaggacctgagggctcagatcttcgcaaatactgtggacaatgcccgcatcgttctgcagattgacaatgcccgtcttgctgctgatgactttagagtcaagtaagtttgggggctagagagctgggggtccaggggtggagctaagaaggatctgctccccaggctgggtcagttaggggctcacagtgggatcctgttaggtgtgggtggatgagagtcagggtccatcagtgtattcatttaactgttcatttgtataaccccgtttaagaatactgtcctccaagtgccaagaatggtgctcaggggattaccacctaattgctgactcaagttgctggtttgcaatgggcacagaacttctcttagtagtggcatgagttgagaaggttctggatcagagataggggcccctctgatcacctccactcctataggtatgagacagagctggccatgc

SEQ ID NO: 190812 - DNA, 952 bp, Homo Sapiens
actttgtacaaaaaagttggcttcgcaaatactgtggacaatgcccgcatcgttctgcagattgacaatgcccgtcttgctgctgatgactttagagtcaagtatgagacagagctggccatgcgccagtctgtggagaacgacatccatgggctccgcaaggtcattgatgacaccaatatcacacgactgcagctggagacagagatcgaggctctcaaggaggagctgctcttcatgaagaagaaccacgaagaggaagtaaaaggcctacaagcccagattgccagctctgggttgaccgtggaggtagatgcccccaaatctcaggacctcgccaagatcatggcagacatccgggcccaatatgacgagctggctcggaagaaccgagaggagctagacaagtactggtctcagcagattgaggagagcaccacagtggtcaccacacagtctgctgaggttggagctgctgagacgacgctcacagagctgagacgtacagtccagtccttggagatcgacctggactccatgagaaatctgaaggccagcttggagaacagcctgagggaggtggaggcccgctacgccctacagatggagcagctcaacgggatcctgctgcaccttgagtcagagctggcacagacccgggcagagggacagcgccaggcccaggagtatgaggccctgctgaacatcaaggtcaagctggaggctgagatcgccacctaccgccgcctgctggaagatggcgaggactttaatcttggtgatgccttggacagcagcaactccatgcaaaccatccaaaagaccaccacccgccggatagtggatggcaaagtggtgtctgagaccaatgacaccaaagttctgaggcattaagccagcagaagcagggtaccctttggggagcaggaggccaataaaaagttcagagttg

SEQ ID NO: 190813 - DNA, 979 bp, Homo Sapiens
ggagtggctgctgtcccaaggcatcaccaagaattaaagtcctcgccattttccagcaggccgccggtaggtggcgatctcagcctccagcttgaacttgatgttcagcagggccctcatactcctgggcctggcgctgtccctctgcccgagtctgtgccagctctgactcaaggtgcagcaggatcccgttgagctgctccatctgtagggcgtagcgggcctccacctccctcaggctgttctccaagctggccttcagatttctcatggagtccaggtcgatctccaaggactggactgtacgtctcagctctgtgagcgtcgtctcagcagctccaacctcagcagactgtgtggtgaccactgtggtgctctcctcaatctgctgagaccagtacttgtctagctcctctcggttcttccgagccagctcgtcatattgggcccggatgtctgccatgatcttggcgaggtcctgagatttgggggcatctacctccacggtcaacccagagctggcaatctgggcttgtaggccttttacttcctcttcgtggttcttcttcatgaagagcagctcctccttgagagcctcgatctctgtctccagctgcagtcgtgtgatattggtgtcatcaatgaccttgcggagcccatggatgtcgttctccacagactggcgcatggccagctctgtctcatacttgactctaaagtcatcagcagcaagacgggcattgtcaatctgcagaacgatgcgggcattgtccacagtatttgcgaagatctgagccctcaggtcctcgatgatcttgaagtaatggctccagtctctgacctggggtcccttcttctccaagtgctcccggattttgctctccagcctccggttctcggtctccaggctcctcactctgtccaggtaagaggccaggcggtcgttcgggctttgcatgccaacttttttgtacaaagt

SEQ ID NO: 190814 - DNA, 1033 bp, Homo Sapiens
ctttcaaactttgtacaaaaaatttggcgcaaagcctgagtcctgtcctttctctctccccggacagcatgagcttcaccactcgctccaccttctccaccaactaccggtccctgggctctgtccaggcgcccagctacggcgcccggccggtcagcagcgcggccagcgtctatgcaggcgctgggggctctggttcccggatctccgtgtcccgctccaccagcttcaggggcggcatggggtccgggggcctggccaccgggatagccgggggtctggcaggaatgggaggcatccagaacgagaaggagaccatgcaaagcctgaacgaccgcctggcctcttacctggacagagtgaggagcctggagaccgagaaccggaggctggagagcaaaatccgggagcacttggagaagaagggaccccaggtcagagactggagccattacttcaagatcatcgaggacctgagggctcagatcttcgcaaatactgtggacaatgcccgcatcgttctgcagattgacaatgcccgtcttgctgctgatgactttagagtcaagtatgagacagagctggccatgcgccagtctgtggagaacgacatccatgggctccgcaaggtcattgatgacaccaatatcacacgactgcagctggagacagagatcgaggctctcaaggaggagctgctcttcatgaagaagaaccacgaagaggaagtaaaaggcctacaagcccagattgccagctctgggttgaccgtggaggtagatgcccccaaatctcaggacctcgccaagatcatggcagacatccgggcccaatatgacgagctggctcggaagaaccgagaggagctagacaagtactggtctcagcagattgaggagagcaccacagtggtcaccacacagtctgctgaggttggagctgctgaaacgacgctcacagagctgagacgtacaagttcagtcctttggagatcgaccctgggactccatgaagaaatctgaagggccagctt

SEQ ID NO: 190815 - DNA, 1009 bp, Homo Sapiens
aactttgtacaaaaaagttgggaattcatgtggaggtcagagtggaagcaggtgtgagagggtccagcagaaggaaacatggctgccaaagtgtttgagtccattggcaagtttggcctggccttagctgttgcaggaggcgtggtgaactctgccttatataatgtggatgctgggcacagagctgtcatctttgaccgattccgtggagtgcaggacattgtggtaggggaagggactcattttctcatcccgtgggtacagaaaccaattatctttgactgccgttctcgaccacgtaatgtgccagtcatcactggtagcaaagatttacagaatgtcaacatcacactgcgcatcctcttccggcctgtcgccagccagcttcctcgcatcttcaccagcatcggagaggactatgatgagcgtgtgctgccgtccatcacaactgagatcctcaagtcagtggtggctcgctttgatgctggagaactaatcacccagagagagctggtctccaggcaggtgagcgacgaccttacagagcgagccgccacctttgggctcatcctggatgacgtgtccttgacacatctgaccttcgggaaggagttcacagaagcggtggaagccaaacaggtggctcagcaggaagcagagagggccagatttgtggtggaaaaggctgagcaacagaaaaaggcggccatcatctctgctgagggcgactccaaggcagctgagctgattgccaactcactggccactgcaggggatggcctgatcgagctgcgcaagctggaagctgcagaggacatcgcgtaccagctctcacgctctcggaacatcacctacctgccagcggggcagtccgtgctcctccagctgccccagtgagggcccaccctgcctgcacctccgcgggctgactgggccacagccccgatgattcttaacacagcccttccttctgctcccaccccaaaaatcactgtgaatttcataattg

SEQ ID NO: 190816 - DNA, 1921 bp, Homo Sapiens; identical to SEQ ID NO: 183481

SEQ ID NO: 190817 - DNA, 1639 bp, Homo Sapiens; identical to SEQ ID NO: 183482

SEQ ID NO: 190818 - DNA, 1552 bp, Homo Sapiens; identical to SEQ ID NO: 183487

SEQ ID NO: 190819 - DNA, 1194 bp, Homo Sapiens; identical to SEQ ID NO: 180002
  misc_feature (227)..(235): n is a, c, g, or t
  misc_feature (784)..(924): n is a, c, g, or t

SEQ ID NO: 190820 - DNA, 3732 bp, Homo Sapiens; identical to SEQ ID NO: 180003

SEQ ID NO: 190821 - DNA, 1626 bp, Homo Sapiens; identical to SEQ ID NO: 180004
  misc_feature (193)..(207): n is a, c, g, or t

SEQ ID NO: 190822 - DNA, 1604 bp, Homo Sapiens; identical to SEQ ID NO: 183488
  misc_feature (1479)..(1488): n is a, c, g, or t

SEQ ID NO: 190823 - DNA, 1265 bp, Homo Sapiens; identical to SEQ ID NO: 180005
  misc_feature (411)..(552): n is a, c, g, or t
  misc_feature (1101)..(1109): n is a, c, g, or t

SEQ ID NO: 190824 - DNA, 1014 bp, Homo Sapiens; identical to SEQ ID NO: 180006
  misc_feature (900)..(914): n is a, c, g, or t

SEQ ID NO: 190825 - DNA, 1457 bp, Homo Sapiens; identical to SEQ ID NO: 183489
  misc_feature (86)..(94): n is a, c, g, or t
  misc_feature (467)..(481): n is a, c, g, or t
  misc_feature (728)..(740): n is a, c, g, or t

SEQ ID NO: 190826 - DNA, 897 bp, Homo Sapiens
  misc_feature (731)..(739): n is a, c, g, or t
ttggcacagacaaggaacttgctgaaaggccaaccatttcaggatcagtcaaaggcagcaagcagatagactcaaggtgtgtgaaagatgttatacaccaggagctgccactgcatgtcccaaccagactgtgtctgtctgtgtctgcatgtaagagtgagggagggaaggaaggaactacaagagagtcggagatgatgcagcacacacacaattccccagcccagtgatgcttgtgttgaccagatgttcctgagtctggagcaagcacccaggccagaataacagagctttcttagttggtgaagacttaaacatctgcctgaggtcaggaggcaatttgcctgccttgtacaaaagctcaggtgaaagactgagatgaatgtctttcctctccctgcctcccaccagacttcctcctggaaaacgctttggtagatttggccaggagctttcttttatgtaaattggataaatacacacaccatacactatccacagatatagccaagtagatttgggtagaggatactatttccagaatagtgtttagctcacctagggggatatgtttgtatacacatttgcatatacccacatggggacataagctaatttttttacaggacacagaattctgttcaatgctgttaaatatgccaatagtttaatctcttctattttgttgtcgttgcttgtttgaagaaaatcatgacattccaagttgacannnnnnnnncattttaattaaaatttgaaattctgaacaccgtcagcaccctctcttccctatcatgggtcatctgacccctgtccgtctccttgtccctgcttcatgtttgggggcctttctttaactgccttcctggcttagctcagatggcagatgagagtgta

SEQ ID NO: 190827 - DNA, 1673 bp, Homo Sapiens; identical to SEQ ID NO: 183490
  misc_feature (454)..(466): n is a, c, g, or t
  misc_feature (713)..(729): n is a, c, g, or t
  misc_feature (1101)..(1109): n is a, c, g, or t

SEQ ID NO: 190828 - DNA, 957 bp, Homo Sapiens; identical to SEQ ID NO: 183491

SEQ ID NO: 190829 - DNA, 2497 bp, Homo Sapiens; identical to SEQ ID NO: 183492
  misc_feature (259)..(267): n is a, c, g, or t
  misc_feature (640)..(655): n is a, c, g, or t
  misc_feature (901)..(913): n is a, c, g, or t

SEQ ID NO: 190830 - DNA, 760 bp, Homo Sapiens
  misc_feature (185)..(247): n is a, c, g, or t
ttggagcagagtcagccagcatgaccgagcgccgcgtccccttctcgctcctgcggggccccagctgggaccccttccgcgactggtacccgcatagccgcctcttcgaccaggccttcgggctgccccggctgccggaggagtggtcgcagtggttaggcggcagcagctggccaggctacgtnnnnnnnnnnnnnnnnnnnnnnnnnnnnnnnnnnnnnnnnnnnnnnnnnnnnnnnnnnnnnnngctcagccggcaactcagcagcggggtctcggagatccggcacactgcggaccgctggcgcgtgtccctggatgtcaaccacttcgccccggacgagctgacggtcaagaccaaggatggcgtggtggagatcaccggcaagcacgaggagcggcaggacgagcatggctacatctcccggtgcttcacgcggaaatacacgctgccccccggtgtggaccccacccaagtttcctcctccctgtcccctgagggcacactgaccgtggaggcccccatgcccaagctagccacgcagtccaacgagatcaccatcccagtcaccttcgagtcgcgggcccagcttgggggcccagaagctgcaaaatccgatgagactgccgccaagtaaagccttagcccggatgcccacccctgctgccgccactggctgtgcctcccccgccacctgtgtgttcttttgatacatttatcttctgtttttctcaaataaagttcaaagcaaccacctgt

SEQ ID NO: 190831 - DNA, 332 bp, Homo Sapiens
ttgtacaaaaaagttggcttttctacagcagtccccttcccacccaagtttcctcctccctgtcccctgagggcacactgaccgtggaggcccccatgcccaagctagccacgcagtccaacgagatcaccatcccagtcaccttcgagtcgcgggcccagcttgggggcccagaagctgcaaaatccgatgagactgccgccaagtaaagccttatcccggatgcccacccctgctgccgccaatggctgtgcctcccccgccacctgtgtggtcttttgatacatttatcttctgattttctcaaataaagatcaaaaaaactaatatat

SEQ ID NO: 190832 - DNA, 783 bp, Homo Sapiens
actttgtacaaaaaatttgggtccagagcagcagtcagccagcatgaccgagcgccgcgtccccttctcgctcctgcggggccccagctgggaccccttccgcgactggtacccgcatagccgcctcttcgaccaggccttcgggctgccccggctgccggaggagtggtcgcagtggttaggcggcagcagctggccaggctacgtgcgccccctgccccccgccgccatcgagagccccgcagtggccgcgcccgcctacagccgcgcgctcagccggcaactcagcagcggggtctcggagatccggcacactgcggaccgctggcgcgtgtccctggatgtcaaccacttcgccccggacgagctgacggtcaagaccaaggatggcgtggtggagatcaccggcaagcacgaggagcggcaggacgagcatggctacatctcccggtgcttcacgcggaaatacacgctgccccccggtgtggaccccacccaagtttcctcctccctgtcccctgagggcacactgaccgtggaggcccccatgcccaagctagccacgcagtccaacgagatcaccatcccagtcaccttcgagtcgcgggcccagcttgggggcccagaagctgcaaaatccgatgagactgccgccaagtaaagccttagcccggatgcccacccctgctgccgccactggctgtgcctcccccgccacctgtgtgttcttttgatacatttatcttctgtttttctcaaataaagttcaaagcaaccacctgt

SEQ ID NO: 190833 - DNA, 730 bp, Homo Sapiens
acatgtttatatacttttattaatacaatacacacattataagtcacacacaaaaagagataaaataattagataaaataacataagaatttgaatattttcttcttttgcctaagatatattcatcttgccccatgtattttatggccctctttctgctaataacaataacacactaaaaaatacttgctctgagtcatcagatggagtcttccttcaacaaggctcttcaggtcattggtgctatgaaggagaccccatcagactaacagtggatttctcagcagaaatcataaaggccagaaaacagtggaatggcattttcaaaatgctctttccattgcttttccataccactgcttttcccaggactggagacttggtttccagctctttgcacctcctccagcaatgtcttttttgcagatgtgcttggccttaattccatcaacagtgtcctgagactgaggatagataaaatacttcaggtcaaagcagagcactctccatgccacatcttcaaacaggaagtagaaaccagaaataatcccaaccagaagtgtgcacagctcaggatcacagttgcttgctgtcctctcatatttggggcaatgagaatggtggaccagatggctgagtagatgccaaagaacaccagactggtcagcatgcttccccagacagccagatgactgaatttagtccaagctgcagtctcaaaaccagccaa

SEQ ID NO: 190834 - DNA, 889 bp, Homo Sapiens; identical to SEQ ID NO: 180007

SEQ ID NO: 190835 - DNA, 1000 bp, Homo Sapiens; identical to SEQ ID NO: 180008
  misc_feature (644)..(729): n is a, c, g, or t
  misc_feature (760)..(780): n is a, c, g, or t

SEQ ID NO: 190836 - DNA, 2894 bp, Homo Sapiens; identical to SEQ ID NO: 180009
  misc_feature (573)..(581): n is a, c, g, or t

SEQ ID NO: 190837 - DNA, 3409 bp, Homo Sapiens; identical to SEQ ID NO: 183494

SEQ ID NO: 190838 - DNA, 1855 bp, Homo Sapiens; identical to SEQ ID NO: 183495

SEQ ID NO: 190839 - DNA, 1647 bp, Homo Sapiens; identical to SEQ ID NO: 183496

SEQ ID NO: 190840 - DNA, 2655 bp, Homo Sapiens; identical to SEQ ID NO: 183497

SEQ ID NO: 190841 - DNA, 1515 bp, Homo Sapiens; identical to SEQ ID NO: 183498

SEQ ID NO: 190842 - DNA, 510 bp, Homo Sapiens
  misc_feature (383)..(392): n is a, c, g, or t
atatgtcattctttagacacactacttactaaatttctctttttaaaggatatactgaatttccggttgagccaacttaactgctaattttctattttagctttaaaacattgataagcaacatgaagcaatctagaacttaacctttaaatggctttattaaagaaatccagctatgaaaatcatgcagaaatgattatttacaaacaatcctaccagcacataagaaattcttcctctattctgaaataccatcttctcacaatatactttgatgttatgaatcaatgtctgttctcgaacattatttgtctttctccattaaacaataccaaaataaaatttccagcacaactaagtattgttgacgataagaggatttnnnnnnnnnnttcttttaaaacagaagcttatatacaacttagaatctaaaaccaatagatttatggtaaaccttaaaactgaaccaaaacaaacaaaaaccaaagttttaatcatttaaaaatcatg

SEQ ID NO: 190843 - DNA, 910 bp, Homo Sapiens; identical to SEQ ID NO: 180010

SEQ ID NO: 190844 - DNA, 961 bp, Homo Sapiens; identical to SEQ ID NO: 183500

SEQ ID NO: 190845 - DNA, 942 bp, Homo Sapiens
ttgggttgggacccagcagcccggcgcgcaccgcgtggcttttgggggcagaccccggcgggctgtggcaggagggcggcggcggcggctgcggtcgaagaaggggacgccgacaagagttgaagtattgataacaccaaggaactctatcacaatttgaaaagataagcaaaagtttgatttccagacactacagaagaagtaaaaatgcgtccaatgcgaatttttgtgaatgatgaccgccatgtgatggcaaagcattcttccgtttatccaacacaagaggagctggaggcagtccagaacatggtgtcccacacggagcgggcgctcaaagctgtgtccgactggatagacgagcaggaaaagggtagcagcgagcaggcagagtccgataacatggatgtgcccccagaggacgacagtaaagaaggggctggggaacagaagacggagcacatgaccagaaccctgcggggagtgatgcgggtgggcctggtggcaaagggcctcctactcaagggggacttggatctggagctggtgctgctgtgtaaggagaagcccacaaccgccctcctggacaaggtggccgacaacctggccatccagcttgctgctgtaacagaagacaagtacgaaatactgcaatctgtcgacgatgctgcgattgtgataaaaaacacaaaagagcctccattgtccctgaccatccacctgacatcccctgttgtcagagaagaaatggagaaagtattagctggagaaacgctatcagtcaacgaccccccggacgttctggacaggcagaaatgccttgctgccttggcgtccctccgacacgccaagtggttccaggccagagccaacgggctgaagtcttgtgtcattgtgatccgggtcttgagggacctgtgcactcgcgtgcccacctggggtccc

SEQ ID NO: 190846 - DNA, 1556 bp, Homo Sapiens
ttggcaggttcccgaggcgggaaaagtcgcctcctttgtcctcacaggtcgcggagaggcggaccccctccttggaagccccttcccacgcggattgctgaggaagcctttgtggagttgaagtattgataacaccaaggaactctatcacaatttgaaaagataagcaaaagtttgatttccagacactacagaagaagtaaaaatgcgtccaatgcgaatttttgtgaatgatgaccgccatgtgatggcaaagcattcttccgtttatccaacacaagaggagctggaggcagtccagaacatggtgtcccacacggagcgggcgctcaaagctgtgtccgactggatagacgagcaggaaaagggtagcagcgagcaggcagagtccgataacatggatgtgcccccagaggacgacagtaaagaaggggctggggaacagaagacggagcacatgaccagaaccctgcggggagtgatgcgggtgggcctggtggcaaagggcctcctactcaagggggacttggatctggagctggtgctgctgtgtaaggagaagcccacaaccgccctcctggacaaggtggccgacaacctggccatccagcttgctgctgtaacagaagacaagtacgaaatactgcaatctgtcgacgatgctgcgattgtgataaaaaacacaaaagagcctccattgtccctgaccatccacctgacatcccctgttgtcagagaagaaatggagaaagtattagctggagaaacgctatcagtcaacgaccccccggacgttctggacaggcagaaatgccttgctgccttggcgtccctccgacacgccaagtggttccaggccagagccaacgggctgaagtcttgtgtcattgtgatccgggtcttgagggacctgtgcactcgcgtgcccacctggggtcccctccgaggctggcctctcgagctcctgtgtgagaaatccattggcacggccaacagaccgatgggtgctggcgaggccctgcggagagtgctggagtgcctggcgtcgggcatcgtgatgccagatggttctggcatttatgacccttgtgaaaaagaagccactgatgctattgggcatctagacagacagcaacgggaagatatcacacagagtgcgcagcacgcactgcggctcgctgccttcggccagctccataaagtcctaggcatggaccctctgccttccaagatgcccaagaaaccaaagaatgaaaacccagtggactacaccgttcagatcccaccaagcaccacctatgccattacgcccatgaaacgcccaatggaggaggacggggaggagaagtcgcccagcaaaaagaagaagaagattcagaagaaagaggagaagcagagcccccccaggctatgaatgccctgatgcggttgaaccagctgaagccagggctgcagtacaagctggtgtcccagactgggcccgtccatgcccccatctttaccatgtctgtggaggttgatggcaattcattcgaggcctctgggccctccaaaaa

SEQ ID NO: 190847 - DNA, 1522 bp, Homo Sapiens; identical to SEQ ID NO: 183503

SEQ ID NO: 190848 - DNA, 602 bp, Homo Sapiens
ctttgtacaaaaaagttggcgacaacctcccttactgggaccaggacccaccagagcggggggctccacccagcaccttcaaagggacacctacggcagagaacccagagtacctgggtctggacgtgccagtgtgaaccagaaggccaagtccgcagaagccctgatgtgtcctcagggagcagggaaggcctgacttctgctggcatcaagaggtgggagggccctccgaccacttccaggggaacctgccatgccaggaacctgtcctaaggaaccttccttcctgcttgagttcccagatggctggaaggggtccagcctcgttggaagaggaacagcactggggagtctttgtggattctgaggccctgcccaatgagactctagggtccagtggatgccacagcccagcttggccctttccttccagatcctgggtactgaaagccttagggaagctggcctgagaggggaagcggccctaagggagtgtctaagaacaaaagcgacccattcagagactgtccctgaaacctagtactgccccccatgaggaaggaacagcaatggtgtcagtatccaggctttgtacagagtgc

SEQ ID NO: 190849 - DNA, 2296 bp, Homo Sapiens; identical to SEQ ID NO: 183504

SEQ ID NO: 190850 - DNA, 4250 bp, Homo Sapiens; identical to SEQ ID NO: 183505
  misc_feature (66)..(119): n is a, c, g, or t

SEQ ID NO: 190851 - DNA, 1634 bp, Homo Sapiens; identical to SEQ ID NO: 183506

SEQ ID NO: 190852 - DNA, 596 bp, Homo Sapiens
  misc_feature (367)..(397): n is a, c, g, or t
ttgtacaaaaaagttgggtttgtcaatccttaacaaaaaatgaggattctatctcagctgtcttttctaactgtgtaggttgagttttgaacacgtgcttgtggacatcaggcctcctgccagcagttcttgaagcttctttttcattcctgctactctacctgtatttctcagttgcagcactgagtggtcaaaatacatttctgggccacctcagggaacccatgcatctgcctggcatttaggcagcagagcccctgaccgtcccccacagggctctgcctcacgtcctcatctcatttggctgtgtaaagaaatgggaaaatgtatatttagagagcaattgaggcagttgaccatattcagnnnnnnnnnnnnnnnnnnnnnnnnnnnnnnnctccaagtccaccagtctctgaaattagaacagtaggcggtatgagataatcaggcctaatcatgttgtgattctcttttcttagtggagtggaatgttctatccccacaagaaggattataacttatagacttgtcctgttcagattctgtatttacccattttattgaaacatatactaagttcaatgtatttttgt

SEQ ID NO: 190853 - DNA, 2029 bp, Homo Sapiens; identical to SEQ ID NO: 183508

SEQ ID NO: 190854 - DNA, 1878 bp, Homo Sapiens; identical to SEQ ID NO: 183511
  misc_feature (1661)..(1685): n is a, c, g, or t

SEQ ID NO: 190855 - DNA, 3268 bp, Homo Sapiens; identical to SEQ ID NO: 183512
  misc_feature (166)..(190): n is a, c, g, or t
  misc_feature (2687)..(2720): n is a, c, g, or t

SEQ ID NO: 190856 - DNA, 1121 bp, Homo Sapiens
  misc_feature (122)..(194): n is a, c, g, or t
  misc_feature (759)..(808): n is a, c, g, or t
ttgggttgtcgctcatcctatgacgcgaaagtaaccgagactatcaggatccggagacggaaatgtccgaaggccgcagtacttgaccctgtattttgggagtcgaacggagaatggaaacnnnnnnnnnnnnnnnnnnnnnnnnnnnnnnnnnnnnnnnnnnnnnnnnnnnnnnnnnnnnnnnnnnnnnnnnncggtcacgagttaaacaggtgcttgcagatattgctaagcaagtggacttctggtttggggatgcaaatcttcacaaggatagatttcttcgagaacagatagaaaaatctagagatggatatgttgatatatcactacttgtgtcttttaacaaaatgaaaaaattgactactgatgggaagttaattgccagagcattgagaagttcagctgttgtagagcttgatttggaaggcaccagaatccggaggaaaaaacctctgggggaaagaccaaaggatgaggatgaacgcacagtgtatgtggagttacttcccaaaaatgttaatcacagctggattgaaagagtatttgggaaatgtggcaatgttgtttatataagtataccacattataagtctactggagatccaaagggatttgcgtttgtggaatttgaaacaaaagaacaagcagcaaaagcaattgagtttcttaacaacccaccagaagaagcaccaagaaaacctggcatatttcctaaaacagtgaaaaataagcccattccagccttaagagttgtgnnnnnnnnnnnnnnnnnnnnnnnnnnnnnnnnnnnnnnnnnnnnnnnnnncaatatctaagctaaagaagaaaacatggacacaagcaacaccagcatcagtaaaatgaaaagatccagacccacatctgagggctctgacattgagtccactgaaccccaaaagcagtgctcaaagaaaaagaaaaaacgggacagagttgaagcatctagcttacctgaagtcagaacagggaagaggaagagaagcagctctgaagatgcagaatctctagctcctccgatcaaaagtaaagaaaattattcagaaagacatcattaaggaagcatcagaagcttccaaggaaaatagagatatagaaat

SEQ ID NO: 190857 - DNA, 1455 bp, Homo Sapiens; identical to SEQ ID NO: 183517
  misc_feature (1278)..(1303): n is a, c, g, or t

SEQ ID NO: 190858 - DNA, 1148 bp, Homo Sapiens
gccaactttgtacaaaaaagttgggtctcgcccgggagcggcggcggccatcgagacccacccaaggcgcgtccccctcggcctcccagcgctcccaagccgcagcggccgcgccccttcagctagctcgctcgctcgctctgcttccctgctgccggctgcgccatggcgttggcgttggcggcgctggcggcggtcgagccggcctgcggcagccggtaccagcagttgcagaatgaagaagagtctggagaacctgaacaggctgcaggtgatgctcctccaccttacagcagcatttctgcagagagcgcagcatattttgactacaaggatgagtctgggtttccaaagcccccatcttacaatgtagctacaacactgcccagttatgatgaagcggagaggaccaaggctgaagctactatccctttggttcctgggagagatgaggattttgtgggtcgggatgattttgatgatgctgaccagctgaggataggaaatgatgggattttcatgttaacttttttcatggcattcctctttaactggattgggtttttcctgtctttttgcctgaccacttcagctgcaggaaggtatggggccatttcaggatttggtctctctctaattaaatggatcctgattgtcaggttttccacctatttccctggatattttgatggtcagtactggctctggtgggtgttccttgttttaggctttctcctgtttctcagaggatttatcaattatgcaaaagttcggaagatgccagaaactttctcaaatctccccaggaccagagttctctttatttattaaagatgttttctggcaaaggccttcctgcatttatgaattctctctcaagaagcaagagaacacctgcaggaagtgaatcaagatgcagaacacagaggataatcacctgctttaaaaaaataaagtactgttgaaagatcatttctctctatttgttcctaggtgtaaaattttgatagttaatgcagaattctgtaatcattgaatcattagtggttaatgtgtgaaaaagctcttgcgatcaagtctgtgatgtattaatcatgccttatatattgtttgtagtcattttaagtaacatgagccatgtccctgta

SEQ ID NO: 190859 - DNA, 1180 bp, Homo Sapiens; identical to SEQ ID NO: 183519

SEQ ID NO: 190860 - DNA, 872 bp, Homo Sapiens
cccactttgtacaaaaaacttgtttgttgaatgtctcctctctctttccactctgggaaacctaggtttctgccattctgggtgaccctgtatttctttctggtgcccattccatttgtccagttaatacttcctcttaaaaatctccaagaagctgggtctccagatcccatttagaaccaaccaggtgctgaaaacacatgtagataatggccatcatcctaagcccaaagtagaaaatggtagaaggtagtgggtagaagtcactatataaggaaggggatgggattttccattctaaaagttttggagagggaaatccaggctattaaagtcactaaatttctaagtatgtccatttcccatctcagcttcaagggaggtgtcagcagtattatctccactttcaatctccctccaagctctactctggaggagtctgtcccactctgtcaagtggaatccttccctttccaactctacctccctcactcagctcctttcccctgatcagagaaagggatcaagggggttgggaggggggaaagagaccagccttggtccctaagcctccagaaacgtcttcttaatccccaccttttcttactcccaaaaaagaatgaacacccctgactctggagtggtgtatactgccacatcagtgtttgagtcagtccccagaggagaggggaaccctcctccatcttttttgcaacatctcatttcttccttttgctgttgcttcccccctcacacacttggttttgttctatcctacatttgagatttctattttatgttgaacttgctgctttttttcatattgaaaagatgacatcgcccccagagccaaaaataaatgggaaattgaa

SEQ ID NO: 190861 - DNA, 1189 bp, Homo Sapiens
  misc_feature (680)..(692): n is a, c, g, or t
  misc_feature (705)..(761): n is a, c, g, or t
ctttgtacaaaaaagttggcttcccacgtccccatttctttatgcctggctttgcccctctcaccagccgtggaagccagcagtatcgagctctcacagtgccggaactcacccagcaggtcttcgatgccaagaacatgatggctgcctgtgacccccgccacggccgatacctcaccgtggctgctgtcttccgtggtcggatgtccatgaaggaggtcgatgagcagatgcttaacgtgcagaacaagaacagcagctactttgtggaatggatccccaacaatgtcaagacagccgtctgtgacatcccacctcgtggcctcaagatggcagtcaccttcattggcaatagcacagccatccaggagctcttcaagcgcatctcggagcagttcactgccatgttccgccggaaggccttcctccactggtacacaggcgagggcatggacgagatggagttcaccgaggctgagagcaacatgaacgacctcgtctctgagtatcagcagtaccaggatgccaccgcagaagaggaggaggatttcggtgaggaggccgaagaggaggcctaaggcagagcccccatcacctcaggcttctcagttcccttagccgtcttactcaactgcccctttcctctccctcagaatttgtgtttgctgcctctatcttgnnnnnnnnnnnnncttctgggggggnnnnnnnnnnnnnnnnnnnnnnnnnnnnnnnnnnnnnnnnnnnnnnnnnnnnnnnnntctcctctctctttccactctgggaaacctaggtttctgccattctgggtgaccctgtatttctttctggtgcccattccatttgtccagttaatacttcctcttaaaaatctccaagaagctgggtctccagatcccatttagaaccaaccaggtgctgaaaacacatgtagataatggccatcatcctaagcccaaagtagaaaatggtagaactagtgggtagaagtcactatataacgaagggggatgggattttccattctaaaagttttgggagagggaaatccaggctattaaagtcactaaatttctaagtatgtccatttcccatctcagcttcaaggaggtgtcagcagtattatctccactttcaatctccctcaagctctactctggaaggagtctgtcccactctgtcaagtgaa

SEQ ID NO: 190862 - DNA, 656 bp, Homo Sapiens
  misc_feature (441)..(481): n is a, c, g, or t
ttgtacaaaaaagttggcacccagcacatgtttgatgccaagaacatgatggctgcctgcgacccccgccatggccgctacctgacggttgccgccgtgttcaggggccgcatgtccatgaaggaggtggatgagcaaatgcttaatgtccaaaacaaaaacagcagctattttgttgagtggatccccaacaatgtgaaaacggctgtctgtgacatcccacctcgggggctaaaaatgtccgccaccttcattggcaacagcacggccatccaggagctgttcaagcgcatctccgagcagttcacggccatgttccggcgcaaggccttcctgcactggtacacgggcgagggcatggacgagatggagttcaccgaggccgagagcaacatgaatgacctggtgtccgagtaccagcagtaccaggatgccacagcnnnnnnnnnnnnnnnnnnnnnnnnnnnnnnnnnnnnnnnnntggcctagagccttcagtcactggggaaagcagggaagcagtgtgaactctttattcactcccagcctgtcctgtggcctgtcccactgtgtgcacttgctgttttccctgtccacatccatgctgtacagacaccaccattaaagcattttcatagtgatatacataaaataac

SEQ ID NO: 190863 - DNA, 1438 bp, Homo Sapiens
ctttgtacaaaaaagttggcgctcttctgctgctgtttgtctacttcctcctgcttccccgccgccgccgccgccatcatgagggaaatcgtgcacttgcaggccgggcagtgcggcaaccaaatcggcgccaagttttgggaggtgatcagcgatgagcacggcatcgaccccacgggcacctaccacggggacagcgacctgcagctggaacgcatcaacgtgtactacaatgaggccaccggcggcaagtacgtgccccgcgccgtgctcgtggatctggagcccggcaccatggactccgtgcgctcggggcccttcgggcagatcttccggccggacaacttcgttttcggtcagagtggtgctgggaacaactgggccaaggggcactacacagaaggcgcggagctggtggactcggtgctggatgttgtgagaaaggaggctgagagctgtgactgcctgcagggtttccagctgacccactccctgggtggggggactgggtctgggatgggtaccctcctcatcagcaagatccgggaggagtacccagacaggatcatgaacacgtttagtgtggtgccttcgcccaaagtgtcagacacagtggtggagccctacaacgccaccctctcagtccaccagctcgtagaaaacacagacgagacctactgcattgataacgaagctctctacgacatttgcttcagaaccctaaagctgaccacgcccacctatggtgacctgaaccacctggtgtctgctaccatgagtggggtcaccacctgcctgcgcttcccaggccagctcaatgctgacctgcggaagctggctgtgaacatggtcccgtttccccggctgcacttcttcatgcccggctttgccccactgaccagccggggcagccagcagtaccgggcgctgaccgtgcccgagctcacccagcagatgtttgatgccaagaacatgatggctgcctgcgacccccgccatggccgctacctgacggttgccgccgtgttcaggggccgcatgtccatgaaggaggtggatgagcaaatgcttaatgtccaaaacaaaaacagcagctattttgttgagtggatccccaacaatgtgaaaacggctgtctgtgacatcccacctcgggggctaaaaatgtccgccaccttcattggcaacagcacggccatccaggagctgttcaagcgcatctccgagcagttcacggccatgttccggcgcaaggccttcctgcactggtacacgggcgagggcatggacgagatggagttcaccgaggcccgagagcaacatgaatgacctggtgtcccgagtaccagcagtaccaaggatgccacagccgagaaggagggcgagttcgaggaggaaggctgaggaggaggtggcctaaagccttcagtcactgggg

SEQ ID NO: 190864 - DNA, 897 bp, Homo Sapiens
gggtgagctcgggcacggtcagggcccggtactgctggctgccgcggctggtgagcggcgcgaagccaggcatgaagaagtgcaggcgcgggaagggcaccatgttcaccgccagcttgcgcaggtcagcattgagctggcccgggaagcgcagcgaggtggtgaccccactcatggtggcggacaccaggtggttgaggtccccgtaggtgggcgttgtcagcttcagagtgcggaagcagatgtcatagagcgcctcgttgtcgatgcagtaggtctcgtctgtattctccaccagctggtgcaccgacagtgtggcattgtagggctccaccaccgtgtccgacaccttgggcgagggcatgacgctgaaggtgttcatgatgcggtccgggaactcctcacggatcttgctgatgagcagcgtgcccatgcctgagcccgtgccgccgcccagcgagtgcgtgagctggaagccctgcaggcagtcgcagtgctcgcactccttccgcaccacgtccagcactgcgtccaccagctccgcgccctccgtgtagtgccctttcgcccagttgttccctgcacccgtctggccaaagatgaagttgtcaggccggaaaagctgcccaaaaggcccagaccgcacgctgtccatggtgcctggctctaagtccaccagggcggccctgggcacatatttctgagaggatgactcattgtagtagacgttgattctctccagctgcagcgccgagtctcccacgtagcctccggccgggtcgatgccgtgctcatcgctgatcacttcccaaaacttggtgccgatctggttcccgcactggcccgcctggatgtgcacgatctccctcatggcgggcgcggctctgcgacaaccaa

SEQ ID NO: 190865 - DNA, 1363 bp, Homo Sapiens
ttggctcccctctcctttctccctctcagaaccttcctgccgtcgcgtttgcacctcgctgctccagcctctggggcgcattccaaccttccagcctgcgacctgcggagaaaaaaaattacttattttcttgccccatacataccttgaggcgagcaaaaaaattaaattttaaccatgagggaaatcgtgcacatccaggctggtcagtgtggcaaccagatcggtgccaagttctgggaggtgatcagtgatgaacatggcatcgaccccaccggcacctaccacggggacagcgacctgcagctggaccgcatctctgtgtactacaatgaagccacaggtggcaaatatgttcctcgtgccatcctggtggatctagaacctgggaccatggactctgttcgctcaggtccttttggccagatctttagaccagacaactttgtatttggtcagtctggggcaggtaacaactgggccaaaggccactacacagagggcgccgagctggttgattctgtcctggatgtggtacggaaggaggcagagagctgtgactgcctgcagggcttccagctgacccactcactgggcgggggcacaggctctggaatgggcactctccttatcagcaagatccgagaagaataccctgatcgcatcatgaataccttcagtgtggtgccttcacccaaagtgtctgacaccgtggtcgagccctacaatgccaccctctccgtccatcagttggtagagaatactgatgagacctattgcattgacaacgaggccctctatgatatctgcttccgcactctgaagctgaccacaccaacctacggggatctgaaccaccttgtctcagccaccatgagtggtgtcaccacctgcctccgtttccctggccagctcaatgctgacctccgcaagttggcagtcaacatggtccccttcccacgtctccatttctttatgcctggctttgcccctctcaccagccgtggaagccagcagtatcgagctctcacagtgccggaactcacccagcaggtcttcgatgccaagaacatgatggctgcctgtgacccccgccacggccgatacctcaccgtggctgctgtcttccgtggtcggatgtccatgaaggaggtcgatgagcagatgcttaacgtgcagaacaagaacagcagctactttgtggaatggatccccaacaatgtcaagacagccgtctgtgacatcccacctcgtggcctcaagatggcagtcaccttcattggcaatagcacagccatccaggagctcttcagcgcatctcggagcagttcactgccatgttccgccggaaagcctttcctcc

SEQ ID NO: 190866 - DNA, 1654 bp, Homo Sapiens
ttggccgcagccgcccgccagacgcgcccagtatgagggggatcgtgcacatccaggccggccagtgcggcaaccagatcggggccaagttctgggaagtcatcagtgatgagcatggcatcgaccccagcggcaactacgtgggcgactcggacttgcagctggagcggatcagcgtctactacaacgaggcctcttctcacaagtacgtgcctcgagccattctggtggacctggaacccggaaccatggacagtgtccgctcaggggcctttggacatctcttcaggcctgacaatttcatctttggtcagagtggggccggcaacaactgggccaagggtcactacacggagggggcggagctggtggattcggtcctggatgtggtgcggaaggagtgtgaaaactgcgactgcctgcagggcttccagctgacccactcgctggggggcggcacgggctccggcatgggcacgttgctcatcagcaaggtgcgtgaggagtatcccgaccgcatcatgaacaccttcagcgtcgtgccctcacccaaggtgtcagacacggtggtggagccctacaacgccacgctgtccatccaccagctggtggagaacacggatgagacctactgcatcgacaacgaggcgctctacgacatctgcttccgcaccctcaagctggccacgcccacctacggggacctcaaccacctggtatcggccaccatgagcggagtcaccacctccttgcgcttcccgggccagctcaacgctgacctgcgcaagctggccgtcaacatggtgcccttcccgcgcctgcacttcttcatgcccggcttcgcccccctcacagcccggggcagccagcagtaccgggccctgaccgtgcccgagctcacccagcagatgttcgatgccaagaacatgatggccgcctgcgacccgcgccacggccgctacctgacggtggccaccgtgttccggggccgcatgtccatgaaggaggtggacgagcagatgctggccatccagagcaagaacagcagctacttcgtggagtggatccccaacaacgtgaaggtggccgtgtgtgacatcccgccccgcggcctcaagatgtcctccaccttcatcgggaacagcacggccatccaggagctgttcaagcgcatctccgagcagttcacggccatgttccggcgcaaggccttcctgcactggtacacgggcgagggcatggacgaaatggagttcaccgaggccgagagcaacatgaacgacctggtgtccgagtaccagcagtaccaggacgccacggccgaggaagagggcgagatgtacgaagacgacgaggaggagtcggaggcctagggccccaagtgaagctgctcgcagctggagtgagaggcaggtggcggccggggccgaagccagcagtgtctaaaccccctgagccatcttgctgccgacaccctgctttcccctcgccctagggctcccttgccgccctcctgcagtatttatggcctcgtcctccccacctaggccacgtgtgagctgctcctgtctctgtcttattgcagctcaggcctgacgttttacggttttgttttttactggtttgtgtttatattttcggggatacttataaa

SEQ ID NO: 190867 - DNA, 988 bp, Homo Sapiens; identical to SEQ ID NO: 183520
  misc_feature (249)..(261): n is a, c, g, or t
  misc_feature (274)..(330): n is a, c, g, or t

SEQ ID NO: 190868 - DNA, 699 bp, Homo Sapiens
ctttgtacaaaaaagttggccttcccaccctttaaatttctttatgcctggctttgcccctctcaccagccgtggaagccagcagtatcgagctctcacagtgccggaactcacccagcaggtcttcgatgccaagaacatgatggctgcctgtgacccccgccacggccgatacctcaccgtggctgctgtcttccgtggtcggatgtccatgaaggaggtcgatgagcagatgcttaacgtgcagaacaagaacagcagctactttgtggaatggatccccaacaatgtcaagacagccgtctgtgacatcccacctcgtggcctcaagatggcagtcaccttcattggcaatagcacagccatccaggagctcttcaagcgcatctcggagcagttcactgccatgttccgccggaaggccttcctccactggtacacaggcgagggcatggacgagatggagttcaccgaggctgagagcaacatgaacgacctcgtctctgagtatcagcagtaccaggatgccaccgcagaagaggaggaggatttcggtgaggaggccgaagaggaggcctaaggcagagcccccatcacctcaggcttctcagttcccttagccgtcttactcaactgcccctttcctctccctcagaatttgtgtttgctgcctctatcttgttttttgttttttcttct

SEQ ID NO: 190869 - DNA, 1318 bp, Homo Sapiens
  misc_feature (921)..(933): n is a, c, g, or t
  misc_feature (946)..(1002): n is a, c, g, or t
ctttgtacaaaaaagttggtgatcgcatcatttaataccttcagtgtggtgccttcacccaaagtgtctgacaccgtggtcgagccctacaatgccaccctctccgtccatcagttggtagagaatactgatgagacctattgcattgacaacgaggccctctatgatatctgcttccgcactctgaagctgaccacaccaacctacggggatctgaaccaccttgtctcagccaccatgagtggtgtcaccacctgcctccgtttccctggccagctcaatgctgacctccgcaagttggcagtcaacatggtccccttcccacgtctccatttctttatgcctggctttgcccctctcaccagccgtggaagccagcagtatcgagctctcacagtgccggaactcacccagcaggtcttcgatgccaagaacatgatggctgcctgtgacccccgccacggccgatacctcaccgtggctgctgtcttccgtggtcggatgtccatgaaggaggtcgatgagcagatgcttaacgtgcagaacaagaacagcagctactttgtggaatggatccccaacaatgtcaagacagccgtctgtgacatcccacctcgtggcctcaagatggcagtcaccttcattggcaatagcacagccatccaggagctcttcaagcgcatctcggagcagttcactgccatgttccgccggaaggccttcctccactggtacacaggcgagggcatggacgagatggagttcaccgaggctgagagcaacatgaacgacctcgtctctgagtatcagcagtaccaggatgccaccgcagaagaggaggaggatttcggtgaggaggccgtcttactcaactgcccctttcctctccctcagaatttgtgtttgctgcctctatcttgnnnnnnnnnnnnncttctgggggggnnnnnnnnnnnnnnnnnnnnnnnnnnnnnnnnnnnnnnnnnnnnnnnnnnnnnnnnntctcctctctctttccactctgggaaacctaggtttctgccattctgggtgaccctgtatttctttctggtgcccattccatttgtccagttaatacttcctcttaaaaatctccaagaagctgggtctccagatcccatttagaaccaaccaggtgctgaaaacacatgtagataatggccatcatcctaagcccaaagtagaaaatggtagaacgtagtgggtagaagtcactatataaggaagggatgggattttctattctaaaagttttggagagggaaatccagggctattaaagtcactaaaatttcta

SEQ ID NO: 190870 - DNA, 898 bp, Homo Sapiens; identical to SEQ ID NO: 183521

SEQ ID NO: 190871 - DNA, 934 bp, Homo Sapiens
actttgtacaaaaaagttggcaaaaaaataaaattttaaccatgagggaaatcgtgcacatccaggctggtcagtgtggcaaccagatcggtgccaagttctgggaggtgatcagtgatgaacatggcatcgaccccaccggcacctaccacggggacagcgacctgcagctggaccgcatctctgtgtactacaatgaagccacaggtggcaaatatgttcctcgtgccatcctggtggatctagaacctgggaccatggactctgttcgctcaggtccttttggccagatctttagaccagacaactttgtatttggtcagtctggggcaggtaacaactgggccaaaggccactacacagagggcgccgagctggttgattctgtcctggatgtggtacggaaggaggcagagagctgtgactgcctgcagggcttccagctgacccactcactgggcgggggcacaggctctggaatgggcactctccttatcagcaagatccgagaagaataccctgatcgcatcatgaataccttcagtgtggtgccttcacccaaagtgtctgacaccgtggtcgagccctacaatgccaccctctccgtccatcagttggtagagaatactgatgagacctattgcattgacaacgaggccctctatgatatctgcttccgcactctgaagctgaccacaccaacctacggggatctgaaccaccttgtctcagccaccatgagtggtgtcaccacctgcctccgtttccctggccagctcaatgctgacctccgcaagttggcagtcaacatggtccccttcccacgtctccatttctttatgcctggcttttgcccctctcaccagccgtggaagccagcaatatcgagctctcacagtgccggaacttcacccagcagtcctcgatgccagaa

SEQ ID NO: 190872 - DNA, 1425 bp, Homo Sapiens
  misc_feature (1149)..(1161): n is a, c, g, or t
  misc_feature (1174)..(1230): n is a, c, g, or t
gatgagcaatgctttttctcataatagccaactttgtacaaaaaagttggtgattctgtcctggatgtggtacggaaggaggcagagagctgtgactgcctgcagggcttccagctgacccactcactgggcgggggcacaggctctggaatgggcactctccttatcagcaagatccgagaagaataccctgatcgcatcatgaataccttcagtgtggtgccttcacccaaagtgtctgacaccgtggtcgagccctacaatgccaccctctccgtccatcagttggtagagaatactgatgagacctattgcattgacaacgaggccctctatgatatctgcttccgcactctgaagctgaccacaccaacctacggggatctgaaccaccttgtctcagccaccatgagtggtgtcaccacctgcctccgtttccctggccagctcaatgctgacctccgcaagttggcagtcaacatggtccccttcccacgtctccatttctttatgcctggctttgcccctctcaccagccgtggaagccagcagtatcgagctctcacagtgccggaactcacccagcaggtcttcgatgccaagaacatgatggctgcctgtgacccccgccacggccgatacctcaccgtggctgctgtcttccgtggtcggatgtccatgaaggaggtcgatgagcagatgcttaacgtgcagaacaagaacagcagctactttgtggaatggatccccaacaatgtcaagacagccgtctgtgacatcccacctcgtggcctcaagatggcagtcaccttcattggcaatagcacagccatccaggagctcttcaagcgcatctcggagcagttcactgccatgttccgccggaaggccttcctccactggtacacaggcgagggcatggacgagatggagttcaccgaggctgagagcaacatgaacgacctcgtctctgagtatcagcagtaccaggatgccaccgcagaagaggaggaggatttcggtgaggaggccgaagaggaggcctaaggcagagcccccatcacctcaggcttctcagttcccttagccgtcttactcaactgcccctttcctctccctcagaatttgtgtttgctgcctctatcttgnnnnnnnnnnnnncttctgggggggnnnnnnnnnnnnnnnnnnnnnnnnnnnnnnnnnnnnnnnnnnnnnnnnnnnnnnnnntctcctctctctttccactctgggaaacctagtttctgccattctgggtgaccctgtatttctttctggtgcccattccatttgtccagttaatacttcctcttaaaaatccccaagaagctgggtctccagatcccatttagaaccaaccaggtgctgaaaacacatgtagataatggccatcatcctaagccc

SEQ ID NO: 190873 - DNA, 1104 bp, Homo Sapiens
  misc_feature (934)..(952): n is a, c, g, or t
ttgggacatgagtgtcaaggcagagatgggtctaggtgacagaaaaggaagtaatggctctctagaagaatggtatgaccaggataagcctgaagtctctctcctcttccagttcctgcagatccttacagcctgctttgggtcattcgcccatggtggcaatgacgtaagcaatgccattgggcctctggttgctttatatttggtttatgacacaggagatgtttcttcaaaagtggcaacaccaatatggcttctactctatggtggtgttggtatctgtgttggtctgtgggtttggggaagaagagttatccagaccatggggaaggatctgacaccgatcacaccctctagtggcttcagtattgaactggcatctgccctcactgtggtgattgcatcaaatattggccttcccatcagtacaacacattgtaaagtgggctctgttgtgtctgttggctggctccggtccaagaaggctgttgactggcgtctctttcgtaacatttttatggcctggtttgtcacagtccccatttctggagttatcagtgctgccatcatggcaatcttcagatatgtcatcctcagaatgtgaagctgtttgagattaaaatttgtgtcaatgtttgggaccatcttaggtattcctgctcccctgaagaatgattacagtgttaacagaagactgacaagagtctttttatttgggagccagaggagggaagtgttacttgtgctataactgcttttgtgctaaatatgaattgtctaaaaattagctgtgtaaaatagcccgggttccactggctcctgctgaggtcccctttccttctgggctgtgaattcctgtacatatttctctactttttgtatcaagcttcaattccattatgttttaatgttgtctctgaagatgacttgtgannnnnnnnnnnnnnnnnnnaaaccatgaagagccgtttgacagagcatgctctgcgttgttggttttcacccagcttctgccctcacatgcacagggatttaacaacaaaaatataactacaacttccccttgtagtctcttatataagtaagtcccttggtactctgccc

SEQ ID NO: 190874 - DNA, 1665 bp, Homo Sapiens; identical to SEQ ID NO: 183524
  misc_feature (318)..(329): n is a, c, g, or t
  misc_feature (385)..(454): n is a, c, g, or t
  misc_feature (1222)..(1239): n is a, c, g, or t

SEQ ID NO: 190875 - DNA, 1201 bp, Homo Sapiens
actttgtacaaaaaagttggaagaagaaaaacgaacaacatcaaactctatgtccgccgtgtgttcatcatggacagctgtgatgagttgataccagagtatctcaattttatccgtggtgtggttgactctgaggatctgcccctgaacatctcccgagaaatgctccagcagagcaaaatcttgaaagtcattcgcaaaaacattgttaagaagtgccttgagctcttctctgagctggcagaagacaaggagaattacaagaaattctatgaggcattctctaaaaatctcaagcttggaatccacgaagactccactaaccgccgccgcctgtctgagctgctgcgctatcatacctcccagtctggagatgagatgacatctctgtcagagtatgtttctcgcatgaaggagacacagaagtccatctattacatcactggtgagagcaaagagcaggtggccaactcagcttttgtggagcgagtgcggaaacggggcttcgaggtggtatatatgaccgagcccattgacgagtactgtgtgcagcagctcaaggaatttgatgggaagagcctggtctcagttaccaaggagggtctggagctgcctgaggatgaggaggagaagaagaagatggaagagagcaaggcaaagtttgagaacctctgcaagctcatgaaagaaatcttagataagaaggttgagaaggtgacaatctccaatagacttgtgtcttcaccttgctgcattgtgaccagcacctacggctggacagccaatatggagcggatcatgaaagcccaggcacttcgggacaactccaccatgggctatatgatggccaaaaagcacctggagatcaaccctgaccaccccattgtggagacgctgcggcagaaggctgaggccgacaagaatgataaggcagttaaggacctggtggtgctgctgtttgaaaccgccctgctatcttctggcttttcccttgaggatccccagacccactccaaccgcatctatcgcatgatcaagctaggtctaggtattgatgaagatgaagtggcagcagaggaacccaatgctgcagttcctgatgagatcccccctctcgagggcgatgagatgcgtctcgcatggaagaagtcgattagttaggagttcatagttggaaacttgtgccttgtatagtgtcccc

SEQ ID NO: 190876 - DNA, 1178 bp, Homo Sapiens
  misc_feature (563)..(623): n is a, c, g, or t
ttgggtggatagctgcatttccatgtcccatagtatacccagtggaacatgtctgaaactgaacttactgcttctttcatactcacattgaatattcacgttttttccttgatttggtggagtcttttacttgcccaatccaaaaaaagcaaagtattcttcaactacttgtttactactccttcctctcctactgttcttactgattcagctcaatttccttccttccttccttccttacttacttacatgtgggcggtgtggtgttggcttttattctgcctacttggtggcagaaaatgtggttgtgattgtttatgctgcgctaagagctcttatgcttgggagtcttctgctggaggttccttcactgtgcgtgctgaccatggtgagcccattggcaggggtaccaaagtgatcctccatcttaaagaagatcagacagagtacctagaagagaggcgggtcaaagaagtagtgaagaagcattctcagttcataggctatcccatcaccctttatttggagaaggaacgagagaaggaaattagtgatgatgaggnnnnnnnnnnnnnnnnnnnnnnnnnnnnnnnnnnnnnnnnnnnnnnnnnnnnnnnnnnnnncgaagatgtgggttcagatgaggaggatgacagcggtaaggataagaagaagaaaactaagaagatcaaagagaaatacattgatcaggaagaactaaacaagaccaagcctatttggaccagaaaccctgatgacatcacccaagaggagtatggagaattctacaagagcctcactaatgactgggaagaccacttggcagtcaagcacttttctgtagaaggtcagttggaattcagggcattgctatttattcctcgtcgggctccctttgacctttttgagaacaagaagaaaaagaacaacatcaaactctatgtccgccgtgtgttcatcatggacagctgtgatgagttgataccagagtatctcaattttatccgtggtgtggttgactctgaggatctgcccctgaacatctcccgagaaatgctccagcagagcaaaatcttgaaagtcattcgcaaaaacattgttaagaagtgccttgagctcttctctgagctggcagaagacaaggagaattacagaaattctatgagcattctctaaaa

SEQ ID NO: 190877 - DNA, 1285 bp, Homo Sapiens
gcttttttataatagccaactttgtacaaaaaagttgggatcgaagatgtgggttcagatgaggaggatgacagcggtaaggataagaagaagaaaactaagaagatcaaagagaaatacattgatcaggaggaactaaacaagaccaagcctatttggaccagaaaccctgatgacatcacccaagaggagtatggagaattctacaagagcctcactaatgactgggaagaccacttggcagtcaagcacttttctgtagaaggtcagttggaattcagggcattgctatttattcctcgtcgggctccctttgacctttttgagaacaagaagaaaaagaacaacatcaaactctatgtccgccgtgtgttcatcatggacagctgtgatgagttgataccagagtatctcaattttatccgtggtgtggttgactctgaggatctgcccctgaacatctcccgagaaatgctccagcagagcaaaatcttgaaagtcattcgcaaaaacattgttaagaagtgccttgagctcttctctgagctggcagaagacaaggagaattacaagaaattctatgaggcattctctaaaaatctcaagcttggaatccacgaagactccactaaccgccgccgcctgtctgagctgctgcgctatcatacctcccagtctggagatgagatgacatctctgtcagagtatgtttctcgcatgaaggagacacagaagtccatctattacatcactggtgagagcaaagagcaggtggccaactcagcttttgtggagcgagtgcggaaacggggcttcgaggtggtatatatgaccgagcccattgacgagtactgtgtgcagcagctcaaggaatttgatgggaagagcctggtctcagttaccaaggagggtctggagctgcctgaggatgaggaggagaagaagaagatggaagagagcaaggcaaagtttgagaacctctgcaagctcatgaaagaaatcttagataagaaggttgagaaggtgacaatctccaatagacttgtgtcttcaccttgctgcattgtgaccagcacctacggctggacagccaatatggagcggatcatgaaagcccaggcacttcgggacaactccaccatgggctatatgatggccaaaaagcacctggagatcaaccctgaccaccccattgtggagacgctgcggcagaaggctgagccgacaagaatgataagcagttaagacctggtggtgctgctgtttgaaacgccctgctatcttc

SEQ ID NO: 190878 - DNA, 1039 bp, Homo Sapiens
tttgtacaaaaaagttggcccagtctgcgtatgatagagatgacatctctgtcagagtatgtttctcgcatgaaggagacacagaagtccatctattacatcactggtgagagcaaagagcaggtggccaactcagcttttgtggagcgagtgcggaaacggggcttcgaggtggtatatatgaccgagcccattgacgagtactgtgtgcagcagctcaaggaatttgatgggaagagcctggtctcagttaccaaggagggtctggagctgcctgaggatgaggaggagaagaagaagatggaagagagcaaggcaaagtttgagaacctctgcaagctcatgaaagaaatcttagataagaaggttgagaaggtgacaatctccaatagacttgtgtcttcaccttgctgcattgtgaccagcacctacggctggacagccaatatggagcggatcatgaaagcccaggcacttcgggacaactccaccatgggctatatgatggccaaaaagcacctggagatcaaccctgaccaccccattgtggagacgctgcggcagaaggctgaggccgacaagaatgataaggcagttaaggacctggtggtgctgctgtttgaaaccgccctgctatcttctggcttttcccttgaggatccccagacccactccaaccgcatctatcgcatgatcaagctaggtctaggtattgatgaagatgaagtggcagcagaggaacccaatgctgcagttcctgatgagatcccccctctcgagggcgatgaggatgcgtctcgcatggaagaagtcgattaggttaggagttcatagttggaaaacttgtgcccttgtatagtgtccccatgggctcccactgcagcctcgagtgcccctgtcccacctggctccccctgctggtgtctagtgtttttttccctctcctgtccttgtgttgaaggcagtaaactaaagtgtcaagccccatttccctcctctacttcttgacagcaggattggatgttgggtattgtgggtt

SEQ ID NO: 190879 - DNA, 966 bp, Homo Sapiens
ctttgtacaaaaaagttggggccaactcagcttttgtggagcgagtgcggaaacggggcttcgaggtggtatatatgaccgagcccattgacgagtactgtgtgcagcagctcaaggaatttgatgggaagagcctggtctcagttaccaaggagggtctggagctgcctgaggatgaggaggagaagaagaagatggaagagagcaaggcaaagtttgagaacctctgcaagctcatgaaagaaatcttagataagaaggttgagaaggtgacaatctccaatagacttgtgtcttcaccttgctgcattgtgaccagcacctacggctggacagccaatatggagcggatcatgaaagcccaggcacttcgggacaactccaccatgggctatatgatggccaaaaagcacctggagatcaaccctgaccaccccattgtggagacgctgcggcagaaggctgaggccgacaagaatgataaggcagttaaggacctggtggtgctgctgtttgaaaccgccctgctatcttctggcttttcccttgaggatccccagacccactccaaccgcatctatcgcatgatcaagctaggtctaggtattgatgaagatgaagtggcagcagaggaacccaatgctgcagttcctgatgagatcccccctctcgagggcgatgaggatgcgtctcgcatggaagaagtcgattaggttaggagttcatagttggaaaacttgtgcccttgtatagtgtccccatgggctcccactgcagcctcgagtgcccctgtcccacctggctccccctgctggtgtctagtgtttttttccctctcctgtccttgtgttgaaagcagtaaactaaagggtgtccagccccattcccctctctactcctggcagcaaggattgggatgttgtgtattgcggtttatttttattttcctccattttggtcctgaaa

SEQ ID NO: 190880 - DNA, 716 bp, Homo Sapiens
ctttgtacaaaaaagttggccttgctgcactgtgaccagcacctacggctggacagccaatatggagcggatcatgaaagcccaggcacttcgggacaactccaccatgggctatatgatggccaaaaagcacctggagatcaaccctgaccaccccattgtggagacgctgcggcagaaggctgaggccgacaagaatgataaggcagttaaggacctggtggtgctgctgtttgaaaccgccctgctatcttctggcttttcccttgaggatccccagacccactccaaccgcatctatcgcatgatcaagctaggtctaggtattgatgaagatgaagtggcagcagaggaacccaatgctgcagttcctgatgagatcccccctctcgagggcgatgaggatgcgtctcgcatggaagaagtcgattaggttaggagttcatagttggaaaacttgtgcccttgtatagtgtccccatgggctcccactgcagcctcgagtgcccctgtcccacctggctccccctgctggtgtctagtgtttttttccctctcctgtccttgtgttgaaggcagtaaactaagggtgtcaagccccattccctctctactcttgacagcaggattggatgttgtgtattgtggtttattttattttcttcattttgttctgaaattaaagtatgcaaaataaagaatatgccctttttata

SEQ ID NO: 190881 - DNA, 1009 bp, Homo Sapiens
ctttgtacaaaaaagttgggacagagtacctagttagagaggcgggtcaaagaagtagtgaagaagcattctcagttcataggctatcccatcaccctttatttggagaaggaacgagagaaggaaattagtgatgatgaggcagaggaagagaaaggtgagaaagaagaggaagataaagatgatgaagaaaaacccaagatcgaagatgtgggttcagatgaggaggatgacagcggtaaggataagaagaagaaaactaagaagatcaaagagaaatacattgatcaggaagaactaaacaagaccaagcctatttggaccagaaaccctgatgacatcacccaagaggagtatggagaattctacaagagcctcactaatgactgggaagaccacttggcagtcaagcacttttctgtagaaggtcagttggaattcagggcattgctatttattcctcgtcgggctccctttgacctttttgagaacaagaagaaaaagaacaacatcaaactctatgtccgccgtgtgttcatcatggacagctgtgatgagttgataccagagtatctcaattttatccgtggtgtggttgactctgaggatctgcccctgaacatctcccgagaaatgctccagcagagcaaaatcttgaaagtcattcgcaaaaacattgttaagaagtgccttgagctcttctctgagctggcagaagacaaggagaattacaagaaattctatgaggcattctctaaaaatctcaagcttggaatccacgaagactccactaaccgccgccgcctgtctgagctgctgcgctatcatacctcccagtctggagatgagatgacatctctgtcagagtatgtttctcgcatgaaggagacacagaagtccatctattacatcactggtgagagcaaagagcagtggccaactcagcttttgtggagcgagtgcggaaacggggcttcgaggtggtatatatgaccgagcccattgacga

SEQ ID NO: 190882 - DNA, 958 bp, Homo Sapiens; identical to SEQ ID NO: 180015
  misc_feature (708)..(758): n is a, c, g, or t

SEQ ID NO: 190883 - DNA, 933 bp, Homo Sapiens
ttggtccgggaaagtttctttggaggtccggcccggagcggccatgtcccacggccccaagcagcccggcgcggccgccgcgccggcgggcggcaaggctccgggccagcatgggggcttcgtggtgactgtcaagcaagagcgcggcgagggtccacgcgcgggcgagaaggggtcccacgaggaggagccggtgaagaaacgcggctggcccaagggcaagaagcggaagaagattctgccgaatgggcccaaggcaccggtcacgggctacgtgcgcttcctgaacgagcggcgcgagcagatccgcacgcgccacccggatctgccctttcccgagatcaccaagatgctgggcgccgagtggagcaagctgcagccaacggaaaagcagcggtacctggatgaggccgagagagagaagcagcagtacatgaaggagctgcgggcgtaccagcagtctgaagcctataagatgtgcacggagaagatccaggagaagaagatcaagaaagaagactcgagctctgggctcatgaacactctcctgaatggacacaagggtggggactgcgatggcttctccaccttcgatgttcccatcttcactgaagagttcttggaccaaaacaaagcgcgtgaggcggagcttcggcgcttgcggaagatgaatgtggccttcgaggagcagaacgcggtactgcagaggcacacgcagagcatgagcagcgcgcgcgagcgtctggagcaggagctggcgctggaggagcggaggacgctggcgctgcagcagcagctccaggccgtgcgccaggcgctcaccgccagcttcgcctcactgccggtgccgggcacgggcgaaacgcccacgctgggcactctggacttctacatggcccggcttcacgggagccatcgagcgcgaccccgccc

SEQ ID NO: 190884 - DNA, 1478 bp, Homo Sapiens
ttggcgtcgcgcagtcgggaggtccgggaaagtttctttggaggtccggcccggagcggccatgtcccacggccccaagcagcccggcgcggccgccgcgccggcgggcggcaaggctccgggccagcatgggggcttcgtggtgactgtcaagcaagagcgcggcgagggtccacgcgcgggcgagaaggggtcccacgaggaggaggtgagagtccctgcgctgagctgggggaggccccgggctcccgccccagcctcgaagccccgccccaggctggatttttattgcttgtggctccgcccacagcccattttcctctggaagctgagaccccgccccgtgccagctgccacgcccctgacaggtcctctgccactctaagtccaggccccgcccaccgcacaatgccagctctgcccactctaaggtcccgcccacttccactccttgggggcggcaccctccccttggtcctgtgggcccgttctccagcagaaaaccacgcccaccaagcagaggccacgcccacaaccgaagtcaacgccaaccctgtactcaaacctcggcccatagttcctcagatcccctcacccctggccagggatccctctaacccaccgtgtcccgactgctgaccgggccctacctccatcttttccgggttcttcctcccagctaggccccgcccccatccccgcccatacgcgttaggccccgcccatgcccctctgagccctgccccagtacgccaggcccccctcccaacgacgcagcccggttctgcagccggtgaagaaacgcggctggcccaagggcaagaagcggaagaagattctgccgaatgggcccaaggcaccggtcacgggctacgtgcgcttcctgaacgagcggcgcgagcagatccgcacgcgccacccggatctgccctttcccgagatcaccaagatgctgggcgccgagtggagcaagctgcagccaacggaaaagcagcggtacctggatgaggccgagagagagaagcagcagtacatgaaggagctgcgggcgtaccagcagtctgaagcctataagatgtgcacggagaagatccaggagaagaagatcaagaaagaagactcgagctctgggctcatgaacactctcctgaatggacacaagggtggggactgcgatggcttctccaccttcgatgttcccatcttcactgaagagttcttggaccaaaacaaagcgcgtgaggcggagcttcggcgcttgcggaagatgaatgtggccttcgaggagcagatcgcggtactgcagaggcacacgcagagcatgagcagcgcgcgcgagcgtctggagcaggagctggcgctggaggagcggaaggacgctggcgctgcagcagcagctccaggccgtgcgcagggcgctcaccgccagccttcgcctcactgccggtgccgggcacgggcgaaacgcccacgctggg

SEQ ID NO: 190885 - DNA, 959 bp, Homo Sapiens; identical to SEQ ID NO: 180018

SEQ ID NO: 190886 - DNA, 1340 bp, Homo Sapiens; identical to SEQ ID NO: 183526
  misc_feature (1202)..(1211): n is a, c, g, or t

SEQ ID NO: 190887 - DNA, 912 bp, Homo Sapiens
  misc_feature (401)..(410): n is a, c, g, or t
ttggcctgataacagggagacattagatcacaaacctcgagtcaccaacattttcccaaaacagaagtatttgtcaaagaagactaccaaaaggaagcgtggctacattaaaaataagctggtttttaagaaaggcaagaaaatatctaagaagactgtttaaatgcactgttctggttcctaacttgaagcagttgtccttgtgagaaccggtctttgcctttagctcatgtcgtgtttcacagcaaagagggtacagaaccatcactggtccaggttaatgtacaaaattttctggcaatgcctgattaaaaaaataaaattggcttgttgagaacagctgttttcgatttctaatgtgaagcaagacagagcactgctgtaaatgtctagcagcagannnnnnnnnnattggtacatattatccttcaaatctgagaatttggactaactgcaccaaagaaccctctaatttggtccctggcacatgcatacttgtcaatgtttttattcttttacaagacctgcattttatttgaattacccgaatagcaatatgtaaaatacaagtgacaaaatgtgatgagagcttcttgaaccggtaaactagtacaggtctgagaaagacatattagaagaatcattatacttccttgaattatatttattttcatgtttctctaatgcaaagaatgtttcatcaaatgtatattttctgttgcttactgtttgctctgagaagaagctgctgtttcaaagatggacctctgagtagctaattgattcaagtagtttttttatgttgacacattattactgctgttagcagtcgttttcaccaggtacttacagagcagatttcatacatcatttcattcaagggctaaatttatatttttttggaaatcatgg

SEQ ID NO: 190888 - DNA, 1895 bp, Homo Sapiens; identical to SEQ ID NO: 183528

SEQ ID NO: 190889 - DNA, 1209 bp, Homo Sapiens; identical to SEQ ID NO: 183529
  misc_feature (283)..(338): n is a, c, g, or t

SEQ ID NO: 190890 - DNA, 1416 bp, Homo Sapiens; identical to SEQ ID NO: 183531

SEQ ID NO: 190891 - DNA, 1334 bp, Homo Sapiens
  misc_feature (256)..(279): n is a, c, g, or t
ttggtaatggtccatatgtagttaaacccatgagtatggtatatgaatgtcttttttaaatgttaaaatgtgttgtctatttaataagttaattaaaatgcagatcaaagcaccaccatttgctttttccacagatcattaacatttccttaaagtatgtaagtacctttgcaaatgcaaatgtactagtaattttcacttaagcttttgagaccgaattccattccaccagttatcacttagccactgtaatttnnnnnnnnnnnnnnnnnnnnnnnntgtcttggtagaggtcgttaattagactcaacatgtactgcctttttgcagtctattatgacagtgtcttttagcacaaataatagagctaaaaaatgtcctgtcacttccattataagaaatctggattcatatctaagtgtatattataatactgtacagttaagagttcagaacaagtggtaatgttttctcttaatttaactcattttgtgccttctttactcattcaaacacacatacattttacatatagtttatttctttatgaaatgctaatcttcagcccgtaccaaaaagtagagtggagcctctttgcactactactatcaataaattttaaatcagttggatttttaagcattttttaaaagctgacattaaagtaaatctaaaaaaagtttaacaaactggccaagacactaatttttatgtataatcacaatattttatactcacctttattgactaaaaataattatgctacatgttgtcctgcatcagaagaattatttcttcttgccagtgttttgggatttgaagataatggttcactcaaagaacctattattttctctactgaggaacccaatgtagaacttgcactgatatttttattactgcctttatatgaatctataggtatctaaatgttaaggcatgtatgatctttgatcatttcttttttcaaattaaagttgtataaaagtttcaatatcttgccttaaattagttgcctattctttctaggattcaaatattgtgacatttaaaaaagaaaacattcacttttgaaacttagacttcagatcaaaaaggactgaacccccactatcataatccatacattcatttccatgttgtttgactagcagtgcatatatgaatgaatatggtaatttaatcttacctataagaaccaaatactttaaattatattaagatagtgaataaagatgtataattatttttattaataccttgaatatattccgtggattgaatgtgacttcataactgtactaacgattgtattaaaatatttctggaataaa

SEQ ID NO: 190892 - DNA, 1400 bp, Homo Sapiens; identical to SEQ ID NO: 180020
  misc_feature (274)..(566): n is a, c, g, or t
  misc_feature (568)..(584): n is a, c, g, or t
  misc_feature (1183)..(1206): n is a, c, g, or t

SEQ ID NO: 190893 - DNA, 930 bp, Homo Sapiens; identical to SEQ ID NO: 183533

SEQ ID NO: 190894 - DNA, 1242 bp, Homo Sapiens; identical to SEQ ID NO: 183534
  misc_feature (218)..(473): n is a, c, g, or t
  misc_feature (1060)..(1110): n is a, c, g, or t

SEQ ID NO: 190895 - DNA, 1621 bp, Homo Sapiens; identical to SEQ ID NO: 183538
  misc_feature (1350)..(1358): n is a, c, g, or t

SEQ ID NO: 190896 - DNA, 919 bp, Homo Sapiens
  misc_feature (718)..(727): n is a, c, g, or t
ctttgtacaaaaatgttgggtttctgcgacttgtgttgggactgctgataggaagatgtcttcaggaaatgctaaaattgggcaccctgcccccaacttcaaagccacagctgttatgccagatggtcagtttaaagatatcagcctgtctgactacaaaggaaaatatgttgtgttcttcttttaccctcttgacttcacctttgtgtgccccacggagatcattgctttcagtgatagggcagaagaatttaagaaactcaactgccaagtgattggtgcttctgtggattctcacttctgtcatctagcatgggtcaatacacctaagaaacaaggaggactgggacccatgaacattcctttggtatcagacccgaagcgcaccattgctcaggattatggggtcttaaaggctgatgaaggcatctcgttcaggggcctttttatcattgatgataagggtattcttcggcagatcactgtaaatgacctccctgttggccgctctgtggatgagactttgagactagttcaggccttccagttcactgacaaacatggggaagtgtgcccagctggctggaaacctggcagtgataccatcaagcctgatgtccaaaagagcaaagaatatttctccaagcagaagtgagcgctgggctgttttagtgccaggctgcggtgggcagccatgagaacaaaacctcttctgtannnnnnnnnnccattagtaaaacacaagacttcagattcagccgaattgtggtgtcttacaaggcaggcctttcctacagggggtggagagaccagcctttcttcctttggtaggaatggcctgagttggcgttgtgggcaggctactgggtttgtatgatgtattactagagcaacccattaatcttttgtagtttgtatt

SEQ ID NO: 190897 - DNA, 929 bp, Homo Sapiens
  misc_feature (182)..(191): n is a, c, g, or t
caaaagattaatgggttgctctactaatacatcatacaaaaccagtagcctgcccacaacgccaactcaggccattcttaccaaaggaagaaaggctggtctctccaccccctgtaggaaaggcctgccttgtaagacaccacaattcggctgaatctgaagtcttgtgttttactaatggnnnnnnnnnntacagaagaggttttgttctcatggctgcccaccgcagcctggcactaaaacagcccagcgctcacttctgcttggagaaatattctttgctcttttggacatcaggcttgatggtatcactgccaggtttccagccagctgggcacacttccccatgtttgtcagtgaactggaaggcctgaactagtctcaaagtctcatccacagagcggccaacagggaggtcatttacagtgatctgccgaagaatacccttatcatcaatgataaaaaggcccctgaacgagatgccttcatcagcctttaagaccccataatcctgagcaatggtgcgcttcgggtctgataccaaaggaatgttcatgggtcccagtcctccttgtttcttaggtgtattgacccatgctagatgacagaagtgagaatccacagaagcaccaatcacttggcagttgagtttcttaaattcttctgccctatcactgaaagcaatgatctccgtggggcacacaaaggtgaagtcaagagggtaaaagaagaacacaacatattttcctttgtagtcagacaggctgatatctttaaactgaccatctggcataacagctgtggctttgaagttgggggcagggtgcccaattttagcatttcctgaagacatcttcctatcagcagtcccaacacaagtcgcagaaactaccacccaacttttttgtacaaagtgggcattataaaaa

SEQ ID NO: 190898 - DNA, 954 bp, Homo Sapiens
ccttaagcaaactttgtacaaaaaagttgggtcggtggttagtttctgcgacttgtgttgggactgctgataggaagatgtcttcaggaaatgctaaaattgggcaccctgcccccaacttcaaagccacagctgttatgccagatggtcagtttaaagatatcagcctgtctgactacaaaggaaaatatgttgtgttcttcttttaccctcttgacttcacctttgtgtgccccacggagatcattgctttcagtgatagggcagaagaatttaagaaactcaactgccaagtgattggtgcttctgtggattctcacttctgtcatctagcatgggtcaatacacctaagaaacaaggaggactgggacccatgaacattcctttggtatcagacccgaagcgcaccattgctcaggattatggggtcttaaaggctgatgaaggcatctcgttcaggggcctttttatcattgatgataagggtattcttcggcagatcactgtaaatgacctccctgttggccgctctgtggatgagactttgagactagttcaggccttccagttcactgacaaacatggggaagtgtgcccagctggctggaaacctggcagtgataccatcaagcctgatgtccaaaagagcaaagaatatttctccaagcagaagtgagcgctgggctgttttagtgccaggctgcggtgggcagccatgagaacaaaacctcttctgtattttatttttccattagtaaaacacaagacttcagattcagccgaattgtggtgtcttacaaggcaggcctttcctacagggggtggagagaccagcctttcttcctttggtaggaatggcctgagttggcgttgtgggcaggctactggtttgtatgatgtattagtaaagcaacccattaatcttttgtagtttgtattaaacttgaactgag

SEQ ID NO: 190899 - DNA, 764 bp, Homo Sapiens
  misc_feature (42)..(51): n is a, c, g, or t
ccacaatcggctgaatctgaagtcttgtgttttactaatggnnnnnnnnnntacagaagaggttttgttctcatggctgcccaccgcagcctggcactaaaacagcccagcgctcacttctgctgggagaaatattctttgctcttttggacatcaggcttgatggtatcactgccaggtttccagccagctgggcacacttccccatgtttgtcagtgaactggaaggcctgaactagtctcaaagtctcatccacagagcggccaacagggaggtcatttacagtgatctgccgaagaatacccttatcatcaatgataaaaaggcccctgaacgagatgccttcatcagcctttaagaccccataatcctgagcaatggtgcgcttcgggtctgataccaaaggaatgttcatgggtcccagtcctccttgtttcttaggtgtattgacccatgctagatgacagaagtgagaatccacagaagcaccaatcacttggcagttgagtttcttaaattcttctgccctatcactgaaagcaatgatctccgtggggcacacaaaggtgaagtcaagagggtaaaagaagaacacaacatattttcctttgtagtcagacaggctgatatctttaaactgaccatctggcataacagctgtggctttgaagttgggggcagggtgcccaattttagcatttcctgaagacatcttcctatcagcagtcccaacacaagtcgcagaaactaaccaccgacccaa

SEQ ID NO: 190900 - DNA, 922 bp, Homo Sapiens
  misc_feature (727)..(736): n is a, c, g, or t
ttgggttcttgcctgggtcgggtggttagtttctgcgacttgtgttgggactgctgataggaagatgtcttcaggaaatgctaaaattgggcaccctgcccccaacttcaaagccacagctgttatgccagatggtcagtttaaagatatcagcctgtctgactacaaaggaaaatatgttgtgttcttcttttaccctcttgacttcacctttgtgtgccccacggagatcattgctttcagtgatagggcagaagaatttaagaaactcaactgccaagtgattggtgcttctgtggattctcacttctgtcatctagcatgggtcaatacacctaagaaacaaggaggactgggacccatgaacattcctttggtatcagacccgaagcgcaccattgctcaggattatggggtcttaaaggctgatgaaggcatctcgttcaggggcctttttatcattgatgataagggtattcttcggcagatcactgtaaatgacctccctgttggccgctctgtggatgagactttgagactagttcaggccttccagttcactgacaaacatggggaagtgtgcccagctggctggaaacctggcagtgataccatcaagcctgatgtccaaaagagcaaagaatatttctcccagcagaagtgagcgctgggctgttttagtgccaggctgcggtgggcagccatgagaacaaaacctcttctgtannnnnnnnnnccattagtaaaacacaagacttcagattcagccgaattgtggtgtcttacaaggcaggccttttctacacggggtggagagaccagcctttcttcctttggtggaatggcctgagttggcgttgtgggcaagctactggtttgtatgatgtattagtagagcaacccattaatcctttgtagtttg

SEQ ID NO: 190901 - DNA, 636 bp, Homo Sapiens
  misc_feature (439)..(449): n is a, c, g, or t
actttgtacaaaaaagttggctgtcatctagcatggagtcaatacacctaagaaacaaggaggactgggacccatgaacattcctttggtatcagacccgaagcgcaccattgctcaggattatggggtcttaaaggctgatgaaggcatctcgttcaggggcctttttatcattgatgataagggtattcttcggcagatcactgtaaatgacctccctgttggccgctctgtggatgagactttgagactagttcaggccttccagttcactgacaaacatggggaagtgtgcccagctggctggaaacctggcagtgataccatcaagcctgatgtccaaaagagcaaagaatatttctccaagcagaagtgagcgctgggctgttttagtgccaggctgcggtgggcagccatgagaacaaaacctcttctgtannnnnnnnnnnccattagtaaaacacaagacttcagattcagccgaattgtggtgtcttacaaggcaggcctttcctacagggggtggagagaccagcctttcttcctttggtaagaatggcctgagttggcgttgtgggcaggctactggtttgtatgatgtattagtatagcaacccattaatcttttgtaatttg

SEQ ID NO: 190902 - DNA, 544 bp, Homo Sapiens
tttgtacaaaaaagttggcttaaaggctccatgaaagcatctcgttcaggggcctttttatcattgatgataagggtattcttcggcagatcactgtaaatgacctccctgttggccgctctgtggatgagactttgagactagttcaggccttccagttcactgacaaacatggggaagtgtgcccagctggctggaaacctggcagtgataccatcaagcctgatgtccaaaagagcaaagaatatttctccaagcagaagtgagcgctgggctgttttagtgccaggctgcggtgggcagccatgagaacaaaacctcttctgtattctttttttccattagtaaaacacaagacttcagattcagcccaattgtggtgtcttacaaggcaggcctttcctacagggggtggagagaccagcctttcttcctttggtaggaatggcctgagttggcgttgtgggcaggctactggtttgtatgatgtattagtagagcaacccattaatcttttgtagtttgtattaaaacttgaactgag

SEQ ID NO: 190903 - DNA, 938 bp, Homo Sapiens
  misc_feature (725)..(734): n is a, c, g, or t
caactttgtacaaaaaagttgggttagtttctgccacttgtgttgggactgctgataggaagatgtcttcaggaaatgctaaaattgggcaccctgcccccaacttcaaagccacagctgttatgccagatggtcagtttaaagatatcagcctgtctgactacaaaggaaaatatgttgtgttcttcttttaccctcttgacttcacctttgtgtgccccacggagatcattgctttcagtgatagggcagaagaatttaagaaactcaactgccaagtgattggtgcttctgtggattctcacttctgtcatctagcatgggtcaatacacctaagaaacaaggaggactgggacccatgaacattcctttggtatcagacccgaagcgcaccattgctcaggattatggggtcttaaaggctgatgaaggcatctcgttcaggggcctttttatcattgatgataagggtattcttcggcagatcactgtaaatgacctccctgttggccgctctgtggatgagactttgagactagttcaggccttccagttcactgacaaacatggggaagtgtgcccagctggctggaaacctggcagtgataccatcaagcctgatgtccaaaagagcaaagaatatttctccaagcagaagtgagcgctgggctgttttagtgccaggctgcggtgggcagccatgagaacaaaacctcttctgtannnnnnnnnnccattagtaaaacacaagacttcagattcagccgaattgtggtgtcttacaaggcaggcctttcctacaggggggtggagagaccagcctttcttcctttggtacaatggcctgagttggcgttgtgggcaggctactggtttgtatgatgtattagtagagcacccattaatcttttgtagtttgtatttaaacttgaactga

SEQ ID NO: 190904 - DNA, 2530 bp, Homo Sapiens; identical to SEQ ID NO: 183542
  misc_feature (563)..(591): n is a, c, g, or t
  misc_feature (861)..(891): n is a, c, g, or t

SEQ ID NO: 190905 - DNA, 1587 bp, Homo Sapiens; identical to SEQ ID NO: 183544
  misc_feature (1365)..(1380): n is a, c, g, or t

SEQ ID NO: 190906 - DNA, 1491 bp, Homo Sapiens; identical to SEQ ID NO: 183545
  misc_feature (1149)..(1159): n is a, c, g, or t

SEQ ID NO: 190907 - DNA, 1930 bp, Homo Sapiens; identical to SEQ ID NO: 183546
  misc_feature (1210)..(1277): n is a, c, g, or t
  misc_feature (1419)..(1439): n is a, c, g, or t

SEQ ID NO: 190908 - DNA, 1279 bp, Homo Sapiens; identical to SEQ ID NO: 183549

SEQ ID NO: 190909 - DNA, 530 bp, Homo Sapiens
ccctggaaatattagcattgatacccattttatcctccaacttatgggggaagggaaagtaaaagtgagggagggaagagccagaacctttgggtgagggcaactttgggtcagactgccaggctacagagttaagggaagctggccccagaacagtcctgtggcgattctgttctacttcctgcattaaaaacagacttgacactgggctcccagacgatccaggacacaatgcctcactgttatgcacacgtatcagctgctctggtaggcttgacaagggtttgctttaaatgaagggtttgctaatttgggaccctccctccatatagttggcctgtgccccccagagcagacattccttgtcctgcatacctgacacagcttgtgagttccctgcatgtacaccagcattacaaatgatcctgtaaaggtgagactttcaactaggcacaagctagaagacgaggccagagcagctttttataggtaattagccaacttttttgtacaaagttggctttttaaag

SEQ ID NO: 190910 - DNA, 1587 bp, Homo Sapiens; identical to SEQ ID NO: 183552
  misc_feature (1356)..(1385): n is a, c, g, or t

SEQ ID NO: 190911 - DNA, 1305 bp, Homo Sapiens; identical to SEQ ID NO: 183553

SEQ ID NO: 190912 - DNA, 1126 bp, Homo Sapiens; identical to SEQ ID NO: 183554
  misc_feature (520)..(594): n is a, c, g, or t
  misc_feature (956)..(977): n is a, c, g, or t

SEQ ID NO: 190913 - DNA, 1662 bp, Homo Sapiens; identical to SEQ ID NO: 183555
  misc_feature (482)..(503): n is a, c, g, or t
  misc_feature (904)..(939): n is a, c, g, or t

SEQ ID NO: 190914 - DNA, 433 bp, Homo Sapiens
tttgtacaaaaaagttggctcccagattcctataaaaattattccaccgacgtggaggcagccgtcaacagcctggtcaatttgtacctgcaggcctcctacacctacctctctctgggcttctatttcgaccgcgatgatgtggctctggaaggcgtgagccacttcttccgcgaactggccgaggagaagcgcgagggctacgagcgtctcctgaagatgcaaaaccagcgtggcggccgcgctctcttccaggacatcaagaagccagctgaagatgagtggggtaaaaccccagacgccatgaaagctgccatggccctggataaaattctgaaccaggcccttttggatcttcatgccctgggttctgcccgcacggacccccatctctgtgacttcctggagactcacttcctagatgaggaagtga

SEQ ID NO: 190915 - DNA, 633 bp, Homo Sapiens
ctttgtacaaaaaagttggcagaattattccccttttaaaaagggaggcagccgtcaacagcctggtcaatttgtacctgcaggcctcctacacctacctctctctgggcttctatttcgaccgcgatgatgtggctctggaaggcgtgagccacttcttccgcgaactggccgaggagaagcgcgagggctacgagcgtctcctgaagatgcaaaaccagcgtggcggccgcgctctcttccaggacatcaagaagccagctgaagatgagtggggtaaaaccccagacgccatgaaagctgccatggccctggagaaaaagctgaaccttgtttttttggatcttcatgccctgggttctgcccgcacggacccccatctctgtgacttcctggagactcacttcctagatgaggaagtgaagcttatcaagaagatgggtgaccacctgaccaacctccacaggctgggtggcccggaggctgggctgggcgagtatctcttcgaaaggctcactctcaagcacgactaagagccttctgagcccaaccacttctgaagggccccttgcaaagtaataaggcttctgcctaagcttctccctccagccaataacagctttcttaactatc

SEQ ID NO: 190916 - DNA, 584 bp, Homo Sapiens
gatgagcaatgcttttttcaccatttagaacaactttgtacaaaaaagttggcctaccctacctgggcttctatttcgaccgcgatgatgtggctctggaaggcgtgagccacttcttccgcgaactggccgaggagaagcgcgagggctacgagcgtctcctgaagatgcaaaaccagcgtggcggccgcgctctcttccaggacatcaagaagccagctgaagatgagtggggtaaaaccccagacgccatgaaagctgccatggccctggagaaaaagctgaaccaggcccttttggatcttcatgccctgggttctgcccgcacggacccccatctctgtgacttcctggagactcacttcctagatgaggaagtgaagcttatcaagaagatgggtgaccccctgaccaacctccacaggctgggtggcccggaggctgggctgggcgagtatctcttcgaaaggctcactctcaagctcgactaagagccttctgagcccagcgacttctgaagggccccttgcaaagtaatatggcttctgcctaagcctctccctccagccgataggcagctttct

SEQ ID NO: 190917 - DNA, 1213 bp, Homo Sapiens; identical to SEQ ID NO: 183558

SEQ ID NO: 190918 - DNA, 1200 bp, Homo Sapiens; identical to SEQ ID NO: 183559

SEQ ID NO: 190919 - DNA, 1426 bp, Homo Sapiens; identical to SEQ ID NO: 180023
  misc_feature (560)..(595): n is a, c, g, or t
  misc_feature (831)..(908): n is a, c, g, or t

SEQ ID NO: 190920 - DNA, 2161 bp, Homo Sapiens; identical to SEQ ID NO: 180024
  misc_feature (558)..(598): n is a, c, g, or t
  misc_feature (667)..(667): n is a, c, g, or t
  misc_feature (837)..(914): n is a, c, g, or t
  misc_feature (2078)..(2094): n is a, c, g, or t

SEQ ID NO: 190921 - DNA, 1282 bp, Homo Sapiens; identical to SEQ ID NO: 183562

SEQ ID NO: 190922 - DNA, 1366 bp, Homo Sapiens; identical to SEQ ID NO: 180026

SEQ ID NO: 190923 - DNA, 782 bp, Homo Sapiens; identical to SEQ ID NO: 180027
  misc_feature (357)..(384): n is a, c, g, or t
  misc_feature (608)..(651): n is a, c, g, or t

SEQ ID NO: 190924 - DNA, 1652 bp, Homo Sapiens; identical to SEQ ID NO: 183563

SEQ ID NO: 190925 - DNA, 1798 bp, Homo Sapiens; identical to SEQ ID NO: 180028
  misc_feature (676)..(703): n is a, c, g, or t
  misc_feature (927)..(970): n is a, c, g, or t

SEQ ID NO: 190926 - DNA, 1039 bp, Homo Sapiens; identical to SEQ ID NO: 183564

SEQ ID NO: 190927 - DNA, 1667 bp, Homo Sapiens; identical to SEQ ID NO: 183565

SEQ ID NO: 190928 - DNA, 800 bp, Homo Sapiens
ctttgtacaaaaaagttggtgctttttgagctttcatgttggtttattttcacagattggggtaacgtgcactgtaagacgtatgtaacatgatgttaactttgtgtggtctaaagtgtttagctgtcaagccggatgcctaagtagaccaaatcttgttattgaagtgttctgagctgtatcttgatgtttagaaaagtattcgttacatcttgtaggatctactttttgaacttttcattccctgtagttgacaattctgcatgtactagtcctctagaaataggttaaactgaagcaacttgatggaaggatctctccacagggcttgttttccaaagaaaagtattgtttggaggagcaaagttaaaagcctacctaagcatatcgtaaagctgttcaaaaataactcagacccagtcttgtggatggaaatgtagtgctcgagtcacattctgcttaaagttgtaacaaatacagatgagttaaaagatattgtgtgacagtgtcttatttagggggaaaggggagtatctggatgacagttagtgccaaaatgtaaaacatgaggcgctagcaggagatggttaaacactagctgctccaagggttgacatggtcttcccagcatgtactcagcaggtgtggggtggagcacatgtaggcacagaaaacaggaatgcagacaacatgcatcccctgcgtccatgagttacatgtgttctcttagtgtccacgttgttttgatgttattcatggaataccttctgtgctaaatacagtcacttaattccttgggc

SEQ ID NO: 190929 - DNA, 944 bp, Homo Sapiens
gtactgaacaggtaagtcatccctcagccagagattagtctacttcttccatgcgtgatgtgtcgtcatctccttcaaggggtggcatttcttcagttacagcagcactggtatcatcagcagtagggtcatcttcatcaatacctgtttccaaaataaaatcctcatattacaaagatttcttaaagccagctattagggtaatactcctggtttctatctgctttcaagacagtattacaggacatatgagtctcaatttcatttctttgctcttgtaagaccttacttatccctaaaaaaaacatactttaatacctccaagcagcaagcaggacaaggtgctccaagtttggataactgaaagtttaccattttcttcaatgtcacgtgtgtttattttctttttaacattacatagtataaggcttacccagaccaagtttgatcatcctgtagatcctgttagcatgtgtctggggatcttccagactgaagccagaagacaggagcgcagtttcataaagcaagatgaccagatccttcacagacttgtcgttcttatcagcctctgccttttgccttaaggtctcaataatggaatggtcagggtttatctccaggtgtttctttgctgccatgtaacccattgttgagttgtctcttagggcttgagctttcatgattctctccatgtttgctgtccagccatatgtgcttgtgacaatacagcatggagatgtcaccaatcggtttgacacaaccacctgtaatcaaaaagtgatgactaggaacctagaaagattaattcctaaactttcattgtgaaatgaaatctgtagaacccaaatttcaatagatccaaaatactatctactgtcaaatacaacttaaatgtcgcattaggtatccaaagagcacaggttataatttcatgtttccaa

SEQ ID NO: 190930 - DNA, 956 bp, Homo Sapiens
ttggggcaggcgcgggggtggcgcgtcagttgcttcagcgtcccggtgtggctgtgccgttggtcctgtgcggtcacttagccaagatgcctgaggaaacccagacccaagaccaaccgatggaggaggaggaggttgagacgttcgcctttcaggcagaaattgcccagttgatgtcattgatcatcaatactttctactcgaacaaagagatctttctgagagagctcatttcaaattcatcagatgcattggacaaaatccggtatgaaagcttgacagatcccagtaaattagactctgggaaagagctgcatattaaccttataccgaacaaacaagatcgaactctcactattgtggatactggaattggaatgaccaaggctgacttgatcaataaccttggtactatcgccaagtctgggaccaaagcgttcatggaagctttgcaggctggtgcagatatctctatgattggccagttcggtgttggtttttattctgcttatttggttgctgagaaagtaactgtgatcaccaaacataacgatgatgagcagtacgcttgggagtcctcagcagggggatcattcacagtgaggacagacacaggtgaacctatgggtcgtggaacaaaagttatcctacacctgaaagaagaccaaactgagtacttggaggaacgaagaataaaggagattgtgaagaaacattctcagtttattggatatcccattactctttttgtggagaaggaacgtgataaagaagtaagcgatgatgaggctgagaaaaggaagacaaagaagaggaaaaagaaaaagaagagaaagagtcggaagacaaacctgaaattgaagatgttggttctgatgaggaagagaaaagaggatggtgacaagaagaagaaaaagattaagaaaagtacatcgatcaaagagctcacaaacaaa

SEQ ID NO: 190931 - DNA, 1516 bp, Homo Sapiens; identical to SEQ ID NO: 183566
  misc_feature (281)..(327): n is a, c, g, or t
  misc_feature (369)..(424): n is a, c, g, or t
  misc_feature (956)..(972): n is a, c, g, or t

SEQ ID NO: 190932 - DNA, 1683 bp, Homo Sapiens
ctttgtacaaaaaagttggctcagccttctgttagagaacgtcttcggaaacatggcttagaagtgatctatatgattgagcccattgatgagtactgtgtccaacagctgaaggaatttgaggggaagactttagtgtcagtcaccaaagaaggcctggaacttccagaggatgaagaagagaaaaagaagcaggaagagaaaaaaacaaagtttgagaacctctgcaaaatcatgaaagacatattggagaaaaaagttgaaaaggtggttgtgtcaaaccgattggtgacatctccatgctgtattgtcacaagcacatatggctggacagcaaacatggagagaatcatgaaagctcaagccctaagagacaactcaacaatgggttacatggcagcaaagaaacacctggagataaaccctgaccattccattattgagaccttaaggcaaaaggcagaggctgataagaacgacaagtctgtgaaggatctggtcatcttgctttatgaaactgcgctcctgtcttctggcttcagtctggaagatccccagacacatgctaacaggatctacaggatgatcaaacttggtctgggtattgatgaagatgaccctactgctgatgataccagtgctgctgtaactgaagaaatgccaccccttgaaggagatgacgacacatcacgcatggaagaagtagactaatctctggctgagggatgacttacctgttcagtactctacaattcctctgataatatattttcaaggatgtttttctttatttttgttaatattaaaaagtctgtatggcatgacaactactttaaggggaagataagatttctgtctactaagtgatgctgtgataccttaggcactaaagcagagctagtaatgctttttgagtttcatgttggtttattttcacagattggggtaacgtgcactgtaagacgtatgtaacatgatgttaactttgtgtggtctaaagtgtttagctgtcaagccggatgcctaagtagaccaaatcttgttattgaagtgttctgagctgtatcttgatgtttagaaaagtattcgttacatcttgtaggatctactttttgaacttttcattccctgtagttgacaattctgcatgtactagtcctctagaaataggttaaactgaagcaacttgatggaaggatctctccacagggcttgttttccaaagaaaagtattgtttggaggagcaaagttaaaagcctacctaagcatatcgtaaagctgttcaaaaataactcagacccagtcttgtggatggaaatgtagtgctcgagtcacattctgcttaaagttgtaacaaatacagatgagttaaaagatattgtgtgacagtgtcttatttagggggaaaggggagtatctggatgacagttagtgccaaaatgtaaaacatgaggcgctagcaggagatggttaaacactagctgctccaagggttgacatggtcttcccagcatgtactcagcaggtgtggggtggagcacatgtaggcacagaaaacaggaatgcagacaacatgcattccctgcgtccatgagttacatgtgttctcttagtgtccacgttgttttgatgttattcatggaataccttctgtgctaaatacagtcacttaattccttggc

SEQ ID NO: 190933 - DNA, 1164 bp, Homo Sapiens
actttgtacaaaaaagttgggcccatctggaccagaaatcccgacgatattactaatgaggagtacggagaattctataagagcttgaccaatgactgggaagatcacttggcagtgaagcatttttcagttgaaggacagttggaattcagagcccttctatttgtcccacgacgtgctccttttgatctgtttgaaaacagaaagaaaaagaacaatatcaaattgtatgtacgcagagttttcatcatggataactgtgaggagctaatccctgaatatctgaacttcattagaggggtggtagactcggaggatctccctctaaacatatcccgtgagatgttgcaacaaagcaaaattttgaaagttatcaggaagaatttggtcaaaaaatgcttagaactctttactgaactggcggaagataaagagaactacaagaaattctatgagcagttctctaaaaacataaagcttggaatacacgaagactctcaaaatcggaagaagctttcagagctgttaaggtactacacatctgcctctggtgatgagatggtttctctcaaggactactgcaccagaatgaaggagaaccagaaacatatctattatatcacaggtgagaccaaggaccaggtagctaactcagcctttgtggaacgtcttcggaaacatggcttagaagtgatctatatgattgagcccattgatgagtactgtgtccaacagctgaaggaatttgaggggaagactttagtgtcagtcaccaaagaaggcctggaacttccagaggatgaagaagagaaaaagaagcaggaagagaaaaaaacaaagtttgagaacctctgcaaaatcatgaaagacatattggagaaaaaagttgaaaaggtggttgtgtcaaaccgattggtgacatctccatgctgtattgtcacaagcacatatggctggacagcaaacatggagagaatcatgaaagctcaagccctaagagacaactcaacaatgggttacatggcagcaaagaaacacctggagataaaccctgaccattccattattgagaccttaaggcaaaaggcagaggctgataagaacgacaagtctgtgaaggatctggtcatcttgctttatgaaactgcgctcctgtcttctggc

SEQ ID NO: 190934 - DNA, 953 bp, Homo Sapiens
  misc_feature (760)..(804): n is a, c, g, or t
ctttgtacaaaaaagttgggtggccgttggtcctgtgcggtcacttagccaagatgcctgaggaaacccagacccaagaccaaccgatggaggaggaggaggttgagacgttcgcctttcaggcagaaattgcccagttgatgtcattgatcatcaatactttctactcgaacaaagagatctttctgagagagctcatttcaaattcatcagatgcattggacaaaatccggtatgaaagcttgacagatcccagtaaattagactctgggaaagagctgcatattaaccttataccgaacaaacaagatcgaactctcactattgtggatactggaattggaatgaccaaggctgacttgatcaataaccttggtactatcgccaagtctgggaccaaagcgttcatggaagctttgcaggctggtgcagatatctctatgattggccagttcggtgttggtttttattctgcttatttggttgctgagaaagtaactgtgatcaccaaacataacgatgatgagcagtacgcttgggagtcctcagcagggggatcattcacagtgaggacagacacaggtgaacctatgggtcgtggaacaaaagttatcctacacctgaaagaagaccaaactgagtacttggaggaacgaagaataaaggagattgtgaagaaacattctcagtttattggatatcccattactctttttgtggagaaggaacgtgataaagaagtaagcgatgatgaggctgnnnnnnnnnnnnnnnnnnnnnnnnnnnnnnnnnnnnnnnnnnnnngtcggaagacaaacctgaaattgaagatgttggttctgatgaggaagaagaaaagaaggatggtgacaagacgaagaagaagagattaaggaaaagtacatcgatcaagaagagctcaacaaacaaagcccatctggaccagaaatccc

SEQ ID NO: 190935 - DNA, 1138 bp, Homo Sapiens
actttgtacaaaaaagttggcgcagagttttcatcatggataactgtgaggagctaatccctgaatatctgaacttcattagaggggtggtagactcggaggatctccctctaaacatatcccgtgagatgttgcaacaaagcaaaattttgaaagttatcaggaagaatttggtcaaaaaatgcttagaactctttactgaactggcggaagataaagagaactacaagaaattctatgagcagttctctaaaaacataaagcttggaatacacgaagactctcaaaatcggaagaagctttcagagctgttaaggtactacacatctgcctctggtgatgagatggtttctctcaaggactactgcaccagaatgaaggagaaccagaaacatatctattatatcacaggtgagaccaaggaccaggtagctaactcagcctttgtggaacgtcttcggaaacatggcttagaagtgatctatatgattgagcccattgatgagtactgtgtccaacagctgaaggaatttgaggggaagactttagtgtcagtcaccaaagaaggcctggaacttccagaggatgaagaagagaaaaagaagcaggaagagaaaaaaacaaagtttgagaacctctgcaaaatcatgaaagacatattggagaaaaaagttgaaaaggtggttgtgtcaaaccgattggtgacatctccatgctgtattgtcacaagcacatatggctggacagcaaacatggagagaatcatgaaagctcaagccctaagagacaactcaacaatgggttacatggcagcaaagaaacacctggagataaaccctgaccattccattattgagaccttaaggcaaaaggcagaggctgataagaacgacaagtctgtgaaggatctggtcatcttgctttatgaaactgcgctcctgtcttctggcttcagtctggaagatccccagacacatgctaacaggatctacaggatgatcaaacttggtctgggtattgatgaagatgaccctactgctgatgataccagtgctgctgtaactgaagaaatgccaccccttgaagagatgacgacacatcacgcatggaagaagtagactaatctctggctgaggga

SEQ ID NO: 190936 - DNA, 919 bp, Homo Sapiens
  misc_feature (752)..(797): n is a, c, g, or t
ttggggtgtggctgtgccgttggtcctgtgcggtcacttagccaagatgcctgaggaaacccagacccaagaccaaccgatggaggaggaggaggttgagacgttcgcctttcaggcagaaattgcccagttgatgtcattgatcatcaatactttctactcgaacaaagagatctttctgagagagctcatttcaaattcatcagatgcattggacaaaatccggtatgaaagcttgacagatcccagtaaattagactctgggaaagagctgcatattaaccttataccgaacaaacaagatcgaactctcactattgtggatactggaattggaatgaccaaggctgacttgatcaataaccttggtactatcgccaagtctgggaccaaagcgttcatggaagctttgcaggctggtgcagatatctctatgattggccagttcggtgttggtttttattctgcttatttggttgctgagaaagtaactgtgatcaccaaacataacgatgatgagcagtacgcttgggagtcctcagcagggggatcattcacagtgaggacagacacaggtgaacctatgggtcgtggaacaaaagttatcctacacctgaaagaagaccaaactgagtacttggaggaacgaagaataaaggagattgtgaagaaacattctcagtttattggatatcccattactctttttgtggagaaggaacgtgataaagaagtaagcgatgatgaggctnnnnnnnnnnnnnnnnnnnnnnnnnnnnnnnnnnnnnnnnnnnnnngtcggaagacaaacctgaaattgaagatgttggttctgatgaggaagagaaaagaacgatggtgacaagaagaagatgacgacgattatgaaaagtacatcgatcaagagagctcacaaaac

SEQ ID NO: 190937 - DNA, 1104 bp, Homo Sapiens
ttgtacaaaaaaagttgggcttggaatacacgaagactctcaaaatcggaagaagctttcagagctgttaaggtactacacatctgcctctggtgatgagatggtttctctcaaggactactgcaccagaatgaaggagaaccagaaacatatctattatatcacaggtgagaccaaggaccaggtagctaactcagcctttgtggaacgtcttcggaaacatggcttagaagtgatctatatgattgagcccattgatgagtactgtgtccaacagctgaaggaatttgaggggaagactttagtgtcagtcaccaaagaaggcctggaacttccagaggatgaagaagagaaaaagaagcaggaagagaaaaaaacaaagtttgagaacctctgcaaaatcatgaaagacatattggagaaaaaagttgaaaaggtggttgtgtcaaaccgattggtgacatctccatgctgtattgtcacaagcacatatggctggacagcaaacatggagagaatcatgaaagctcaagccctaagagacaactcaacaatgggttacatggcagcaaagaaacacctggagataaaccctgaccattccattattgagaccttaaggcaaaaggcagaggctgataagaacgacaagtctgtgaaggatctggtcatcttgctttatgaaactgcgctcctgtcttctggcttcagtctggaagatccccagacacatgctaacaggatctacaggatgatcaaacttggtctgggtattgatgaagatgaccctactgctgatgataccagtgctgctgtaactgaagaaatgccaccccttgaaggagatgacgacacatcacgcatggaagaagtagactaatctctggctgagggatgacttacctgttcagtactctacaattcctctgataatatattttcaaggatgtttttctttatttttgttaatattaaaaagtctgtatggcatgacaactactttaaggggaagataagatttctgtctactaagtgatgctgtgataccttaggcactaaagcagagctagtaatgctttttgagtttcatgttgggtttatttt

SEQ ID NO: 190938 - DNA, 950 bp, Homo Sapiens
  misc_feature (770)..(815): n is a, c, g, or t
ctttgtacaaaaaagttggcccggtgtggctgtgccgttggtcctgtgcggtcacttagccaagatgcctgaggaaacccagacccaagaccaaccgatggaggaggaggaggttgagacgttcgcctttcaggcagaaattgcccagttgatgtcattgatcatcaatactttctactcgaacaaagagatctttctgagagagctcatttcaaattcatcagatgcattggacaaaatccggtatgaaagcttgacagatcccagtaaattagactctgggaaagagctgcatattaaccttataccgaacaaacaagatcgaactctcactattgtggatactggaattggaatgaccaaggctgacttgatcaataaccttggtactatcgccaagtctgggaccaaagcgttcatggaagctttgcaggctggtgcagatatctctatgattggccagttcggtgttggtttttattctgcttatttggttgctgagaaagtaactgtgatcaccaaacataacgatgatgagcagtacgcttgggagtcctcagcagggggatcattcacagtgaggacagacacaggtgaacctatgggtcgtggaacaaaagttatcctacacctgaaagaagaccaaactgagtacttggaggaacgaagaataaaggagattgtgaagaaacattctcagtttattggatatcccattactctttttgtggagaaggaacgtgataaagaagtaagcgatgatgaggctnnnnnnnnnnnnnnnnnnnnnnnnnnnnnnnnnnnnnnnnnnnnnngtcggaagacaaacctgaaattgaagatgttggttctgatgaggaggagaaaagaacgatgggtgacaagagaagagagaagattaggaaaagtacatcgatcaagaagagctcaacaaaaccaagcccatctgg

SEQ ID NO: 190939 - DNA, 1106 bp, Homo Sapiens
  misc_feature (75)..(121): n is a, c, g, or t
  misc_feature (165)..(207): n is a, c, g, or t
ttgggtttattggatatcccattactctttttgtggagaaggaacgtgataaagaagtaagcgatgatgaggctnnnnnnnnnnnnnnnnnnnnnnnnnnnnnnnnnnnnnnnnnnnnnnngtcggaagacaaacctgaaattgaagatgttggttctgatgagnnnnnnnnnnnnnnnnnnnnnnnnnnnnnnnnnnnnnnnnnnnttaaggaaaagtacatcgatcaagaagagctcaacaaaacaaagcccatctggaccagaaatcccgacgatattactaatgaggagtacggagaattctataagagcttgaccaatgactgggaagatcacttggcagtgaagcatttttcagttgaaggacagttggaattcagagcccttctatttgtcccacgacgtgctccttttgatctgtttgaaaacagaaagaaaaagaacaatatcaaattgtatgtacgcagagttttcatcatggataactgtgaggagctaatccctgaatatctgaacttcattagaggggtggtagactcggaggatctccctctaaacatatcccgtgagatgttgcaacaaagcaaaattttgaaagttatcaggaagaatttggtcaaaaaatgcttagaactctttactgaactggcggaagataaagagaactacaagaaattctatgagcagttctctaaaaacataaagcttggaatacacgaagactctcaaaatcggaagaagctttcagagctgttaaggtactacacatctgcctctggtgatgagatggtttctctcaaggactactgcaccagaatgaaggagaaccagaaacatatctattatatcacaggtgagaccaaggaccaggtagctaactcagcctttgtggaacgtcttcggaaacatggcttagaagtgatctatatgattgagcccattgatgagtactgtgtccaacagctgaaggaatttgaggggaagactttagtgtcagtcaccaaagaaggcctggaacttccagaggatgaagaagagaaaaagaagcaggagagaaaaaaacaaagtttgagaatctctgcaaatcatgaaagacatattgga

SEQ ID NO: 190940 - DNA, 933 bp, Homo Sapiens
  misc_feature (758)..(802): n is a, c, g, or t
ttgggtcccggtgtggctgtgccgttggtcctgtgcggtcacttagccaagatgcctgaggaaacccagacccaagaccaaccgatggaggaggaggaggttgagacgttcgcctttcaggcagaaattgcccagttgatgtcattgatcatcaatactttctactcgaacaaagagatctttctgagagagctcatttcaaattcatcagatgcattggacaaaatccggtatgaaagcttgacagatcccagtaaattagactctgggaaagagctgcatattaaccttataccgaacaaacaagatcgaactctcactattgtggatactggaattggaatgaccaaggctgacttgatcaataaccttggtactatcgccaagtctgggaccaaagcgttcatggaagctttgcaggctggtgcagatatctctatgattggccagttcggtgttggtttttattctgcttatttggttgctgagaaagtaactgtgatcaccaaacataacgatgatgagcagtacgcttgggagtcctcagcagggggatcattcacagtgaggacagacacaggtgaacctatgggtcgtggaacaaaagttatcctacacctgaaagaagaccaaactgagtacttggaggaacgaagaataaaggagattgtgaagaaacattctcagtttattggatatcccattactctttttgtggagaaggaacgtgataaagaagtaagcgatgatgaggctgnnnnnnnnnnnnnnnnnnnnnnnnnnnnnnnnnnnnnnnnnnnnngtcggaagacaaacctgaaattgaagatgttggttctgatgaggaagaagaaaagagatggtgacagaagagagagagattaagggaaaagtacatcgatcaagaagagctcacaaacaagcccatctgga

SEQ ID NO: 190941 - DNA, 912 bp, Homo Sapiens
  misc_feature (531)..(577): n is a, c, g, or t
  misc_feature (621)..(663): n is a, c, g, or t
tccggtatgaaagcttgacagatcccagtaaattagactctgggaaagagctgcatattaaccttataccgaacaaacaagatcgaactctcactattgtggatactggaattggaatgaccaaggctgacttgatcaataaccttggtactatcgccaagtctgggaccaaagcgttcatggaagctttgcaggctggtgcagatatctctatgattggccagttcggtgttggtttttattctgcttatttggttgctgagaaagtaactgtgatcaccaaacataacgatgatgagcagtacgcttgggagtcctcagcagggggatcattcacagtgaggacagacacaggtgaacctatgggtcgtggaacaaaagttatcctacacctgaaagaagaccaaactgagtacttggaggaacgaagaataaaggagattgtgaagaaacattctcagtttattggatatcccattactctttttgtggagaaggaacgtgataaagaagtaagcgatgatgaggctnnnnnnnnnnnnnnnnnnnnnnnnnnnnnnnnnnnnnnnnnnnnnnngtcggaagacaaacctgaaattgaagatgttggttctgatgagnnnnnnnnnnnnnnnnnnnnnnnnnnnnnnnnnnnnnnnnnnnttaaggaaaagtacatcgatcaagaagagctcaacaaaacaaagcccatctggaccagaaatcccgacgatattactaatgaggagtacggagaattctataagagcttgaccaatgactgggaagatcacttggcagtgaagcatttttcagttgaagacagttggaattcagagcccttctatttgtcccacgacgtgctccttttgatctgtttgaaaacagaaagaaaagaacaatatcaaattg

SEQ ID NO: 190942 - DNA, 1017 bp, Homo Sapiens
ctttgtacaaaaaagttgggttttcatcatccgataaaaagtgaggagctaatccctgaatatctgaacttcattagaggggtggtagactcggaggatctccctctaaacatatcccgtgagatgttgcaacaaagcaaaattttgaaagttatcaggaagaatttggtcaaaaaatgcttagaactctttactgaactggcggaagataaagagaactacaagaaattctatgagcagttctctaaaaacataaagcttggaatacacgaagactctcaaaatcggaagaagctttcagagctgttaaggtactacacatctgcctctggtgatgagatggtttctctcaaggactactgcaccagaatgaaggagaaccagaaacatatctattatatcacaggtgagaccaaggaccaggtagctaactcagcctttgtggaacgtcttcggaaacatggcttagaagtgatctatatgattgagcccattgatgagtactgtgtccaacagctgaaggaatttgaggggaagactttagtgtcagtcaccaaagaaggcctggaacttccagaggatgaagaagagaaaaagaagcaggaagagaaaaaaacaaagtttgagaacctctgcaaaatcatgaaagacatattggagaaaaaagttgaaaaggtggttgtgtcaaaccgattggtgacatctccatgctgtattgtcacaagcacatatggctggacagcaaacatggagagaatcatgaaagctcaagccctaagagacaactcaacaatgggttacatggcagcaagaaacacctggagataaaccctgaccattccattattgagaccttatgcaaaaggcagaggctgataagacgacaagtctgtgaaggatctggtcatcttgctttatgaaactgcgctcctgtcttctggcttcagtctggaagatccccagaacacatgctaacagatctacaggatgatcaaaccttggtctgggtatgatgaa

SEQ ID NO: 190943 - DNA, 989 bp, Homo Sapiens; identical to SEQ ID NO: 183568
  misc_feature (97)..(97): n is a, c, g, or t
  misc_feature (818)..(833): n is a, c, g, or t

SEQ ID NO: 190944 - DNA, 1202 bp, Homo Sapiens; identical to SEQ ID NO: 183569
  misc_feature (273)..(288): n is a, c, g, or t

SEQ ID NO: 190945 - DNA, 1396 bp, Homo Sapiens; identical to SEQ ID NO: 183570
  misc_feature (178)..(186): n is a, c, g, or t
  misc_feature (538)..(596): n is a, c, g, or t

SEQ ID NO: 190946 - DNA, 2030 bp, Homo Sapiens; identical to SEQ ID NO: 183571
  misc_feature (687)..(695): n is a, c, g, or t
  misc_feature (1178)..(1192): n is a, c, g, or t
  misc_feature (1296)..(1315): n is a, c, g, or t

SEQ ID NO: 190947 - DNA, 817 bp, Homo Sapiens; identical to SEQ ID NO: 183572

SEQ ID NO: 190948 - DNA, 1367 bp, Homo Sapiens; identical to SEQ ID NO: 183574
  misc_feature (377)..(440): n is a, c, g, or t
  misc_feature (703)..(715): n is a, c, g, or t
  misc_feature (754)..(789): n is a, c, g, or t
  misc_feature (962)..(970): n is a, c, g, or t

SEQ ID NO: 190949 - DNA, 1649 bp, Homo Sapiens; identical to SEQ ID NO: 183575
  misc_feature (97)..(131): n is a, c, g, or t
  misc_feature (170)..(182): n is a, c, g, or t
  misc_feature (433)..(513): n is a, c, g, or t
  misc_feature (1258)..(1274): n is a, c, g, or t

SEQ ID NO: 190950 - DNA, 1455 bp, Homo Sapiens; identical to SEQ ID NO: 183576
  misc_feature (368)..(437): n is a, c, g, or t
  misc_feature (699)..(711): n is a, c, g, or t
  misc_feature (750)..(787): n is a, c, g, or t
  misc_feature (960)..(968): n is a, c, g, or t

SEQ ID NO: 190951 - DNA, 1283 bp, Homo Sapiens; identical to SEQ ID NO: 183577
  misc_feature (488)..(496): n is a, c, g, or t
  misc_feature (669)..(703): n is a, c, g, or t
  misc_feature (742)..(754): n is a, c, g, or t
  misc_feature (1007)..(1085): n is a, c, g, or t

SEQ ID NO: 190952 - DNA, 605 bp, Homo Sapiens
  misc_feature (115)..(123): n is a, c, g, or t
gccaactttgtacaaaaaagttggcaaagttattttatactgactgtatattttaaagtatactctcagatatggcctcttacagtatttaagatatagcaaggacatggctgannnnnnnnnataaaaattggcactaataagtgggtttattggtcttttctaattgtataatttaatttagtacaaagtttgtaaaatatcagaggatatatatatattgtttctacgacatggtattgcatttatatctttttactacagtgatctgtgacagcagcagcttcatgttgtattttttttactgaaattgtaaaatatccatcttaaagacatcaactattctaaaaattgtgtacaggatattcctttagtggtggaattaaaatgtacgaatacttgctttttcaaaaaaatgtattttctgttaaaagtttaaagatttttgctataatggaagaaaaatgtaatcgtaaatattaattttgtacctatattgtgcaatacttgaaaaaaacggtataaaagtattttgagtcagtgtcttacatgttaacagggactgagatagtttatattaagtttgtaataaaattccttaaaat

SEQ ID NO: 190953 - DNA, 1335 bp, Homo Sapiens; identical to SEQ ID NO: 183578
  misc_feature (381)..(461): n is a, c, g, or t
  misc_feature (712)..(724): n is a, c, g, or t
  misc_feature (763)..(797): n is a, c, g, or t
  misc_feature (970)..(978): n is a, c, g, or t
  misc_feature (1151)..(1159): n is a, c, g, or t

SEQ ID NO: 190954 - DNA, 1010 bp, Homo Sapiens
tttgtacaaaaaagttggccaacaaggcccctagaagaggcatcctcacctccaaccaccgcaactcctgggccaaggcatacaacaccctcatcaaagacaaggtgaaccgggattccgtgcgctccatccagaagagcatcttcaccgtgtgcctagatgcaaccatgcccagggtctcagaagacgtgtaccgcagccacgtggcaggccagatgctgcatgggggcggcagcaggctcaacagcggcaaccgctggttcgacaagacgctgcagttcatcgtggcagaagatggctcctgtgggcttgtgtacgagcatgctgcagcggaggggccccctattgtcacccttctggactatgtcatcgagtacacgaagaaacccgagcttgtgcggtctcccatggtgcccctgcccatgcccaagaagctgcggttcaacatcacccccgagatcaagagcgacatcgagaaggccaacacgggaaacctcagcatcatgatccaggacctggatatcaccgtgatggtgttccaccattttggaaaagacttccccaagtcggagaagctaagcccagatgccttcatccagatggctttgcagctggcctactacaggatctacggacaggcatgtgccacctatgaaagtgcctccctgcgcatgtttcacctgggccgcaccgacaccatccgctcggcttccatggactcactcacctttgtcaaggccatggatgactccagcgtcacggagcaccagaaggtggagctgctgcggaaggccgtgcaacccaccgaggctacaccgaccgggccatccgcggggaggcctttgatcgacacctgctgggcctgaagctgcaggccatcgaggacctggtgagcatgcccgacatcttcatggacacctccctacgccatcgccatgcacttccacctctccaccagccaggtccctgccaagacagactgtgtcatgttcttcgggcccgtggtcccc

SEQ ID NO: 190955 - DNA, 2198 bp, Homo Sapiens; identical to SEQ ID NO: 183579

SEQ ID NO: 190956 - DNA, 727 bp, Homo Sapiens
  misc_feature (344)..(381): n is a, c, g, or t
ttggattgttttaaatctgttattttgctatttgcctgttagacatgactgatgacatatctgaaagacaagtatgttgagagttgctggtgtaaaatacgtttgaaatagttgatctacaaaggccatgggaaaaattcagagagttaggaaggaaaaaccaatagctttaaaacctgtgtgccattttaagagttacttaatgtttggtaacttttatgccttcactttacaaattcaagccttagataaaagaaccgagcaattttctgctaaaaagtccttgatttagcactatttacatacaggccatactttacaaagtatttgctgaatggggaccnnnnnnnnnnnnnnnnnnnnnnnnnnnnnnnnnnnnnnaatgtctggtgctttctatcacctcttctaatcttttaatgtatttgtttgcaattttggggtaagacttttttatgagtactttttctttgaagttttagcggtcaatttgcctttttaatgaacatgtgaagttatactgtggctatgcaacagctctcacctacgcgagtcttactttgagttagtgccataacagaccactgtatgtttacttctcaccatttgagttgcccatcttgtttcacactagtcacattcttgttttaagtgcctttagttttaacagttcactttttacagtgctatttactgaagttatttattaaatatgcctaaaatactt

SEQ ID NO: 190957 - DNA, 655 bp, Homo Sapiens
  misc_feature (354)..(393): n is a, c, g, or t
ccgatttaagtattttaggcatatttaataaataacttcagtaaatagcactgtaaaaagtgaactgttaaaactaaaggcacttaaaacaagaatgtgactagtgtgaaacaagatgggcaactcaaatggtgagaagtaaacatacagtggtctgttatggcactaactcaaagtaagactcgcgtaggtgagagctgttgcatagccacagtataacttcacatgttcattaaaaaggcaaattgaccgctaaaacttcaaagaaaaagtactcataaaaaaagtcttaccccaaaattgcaaacaaatacattaaaagattagaagaggtgatagaaagcaccagacatnnnnnnnnnnnnnnnnnnnnnnnnnnnnnnnnnnnnnnnngtccccattcagcaaatactttgtaaagtatggcctgtatgtaaatagtgctaaatcaaggactttttagcagaaaattgctcggttcttttatctaaggcttgaatttgtaaagtgaaggcataaaagttaccaaacattaagtaactcttaaaatggcacacaggttttaaagctattggtttttccttcctaactctctgaatttttcccatggcctttgtagatcaactatttcaaacgtattttacaccagcaccaa

SEQ ID NO: 190958 - DNA, 1215 bp, Homo Sapiens
actttgtacaaaaaagttggcccactggtccaccacatcattccaattgtagctggtgtggttgctggaattgttcttattggccttgcattactgctgatatggaagcttttaatgataattcatgacagaagggagtttgctaaatttgaaaaggagaaaatgaatgccaaatgggacacgggtgaaaatcctatttataagagtgccgtaacaactgtggtcaatccgaagtatgagggaaaatgagtactgcccgtgcaaatcccacaacactgaatgcaaagtagcaatttccatagtcacagttaggtagctttagggcaatattgccatggttttactcatgtgcaggttttgaaaatgtacaatatgtataatttttaaaatgttttattattttgaaaataatgttgtaattcatgccagggactgacaaaagacttgagacaggatggttattcttgtcagctaaggtcacattgtgcctttttgaccttttcttcctggactattgaaatcaagcttattggattaagtgatatttctatagcgattgaaagggcaatagttaaagtaatgagcatgatgagagtttctgttaatcatgtattaaaactgatttttagctttacaaatatgtcagtttgcagttatgcagaatccaaagtaaatgtcctgctagctagttaaggattgttttaaatctgttattttgctatttgcctgttagacatgactgatgacatatctgaaagacaagtatgttgagagttgctggtgtaaaatacgtttgaaatagttgatctacaaaggccatgggaaaaattcagagagttaggaaggaaaaaccaatagctttaaaacctgtgtgccattttaagagttacttaatgtttggtaacttttatgccttcactttacaaattcaagccttagataaaagaaccgagcaattttctgctaaaaagtccttgatttagcactatttacatacaggccatactttacaaagtatttgctgaatggggaccttttgagttgaatttattttattatttttattttgtttaatgtctggtgctttctatcacctcttctaatcttttaatgtatatgattgcaattttggggtaagacttttttatgagtactttttcttcgaagttttagcggtcaatttgcctttttaatgaacatgtgaagtaatactgt

SEQ ID NO: 190959 - DNA, 234 bp, Homo Sapiens
ctataaaaaacaactttgtacaaaaaagttggctttttttatgacttaaaaaaatctttgaagttttagcggtcaatttgcctttttaatgaacatgtgaagttatactgtggctatgcaacagctctcacctacgcgagtcttactttgagttactgccataacagaccactgtatgtttacttctcaccatttgagttgcccatcttgtttcacactaatcacattcttgtt

SEQ ID NO: 190960 - DNA, 1332 bp, Homo Sapiens; identical to SEQ ID NO: 183580
  misc_feature (1132)..(1171): n is a, c, g, or t

SEQ ID NO: 190961 - DNA, 1788 bp, Homo Sapiens; identical to SEQ ID NO: 183581
  misc_feature (1568)..(1607): n is a, c, g, or t

SEQ ID NO: 190962 - DNA, 1280 bp, Homo Sapiens
ctttgtacaaaaaagttggcttcaaataagtgtctcaaaaaaggattctgacagctttaaaattaggcctctgggctttacggaggaagtagaggttattcttcagtacatctgtgaatgtgaatgccaaagcgaaggcatccctgaaagtcccaagtgtcatgaaggaaatgggacatttgagtgtggcgcgtgcaggtgcaatgaagggcgtgttggtagacattgtgaatgcagcacagatgaagttaacagtgaagacatggatgcttactgcaggaaagaaaacagttcagaaatctgcagtaacaatggagagtgcgtctgcggacagtgtgtttgtaggaagagggataatacaaatgaaatttattctggcaaattctgcgagtgtgataatttcaactgtgatagatccaatggcttaatttgtggaggaaatggtgtttgcaagtgtcgtgtgtgtgagtgcaaccccaactacactggcagtgcatgtgactgttctttggatactagtacttgtgaagccagcaacggacagatctgcaatggccggggcatctgcgagtgtggtgtctgtaagtgtacagatccgaagtttcaagggcaaacgtgtgagatgtgtcagacctgccttggtgtctgtgctgagcataaagaatgtgttcagtgcagagccttcaataaaggagaaaagaaagacacatgcacacaggaatgttcctattttaacattaccaaggtagaaagtcgggacaaattaccccagccggtccaacctgatcctgtgtcccattgtaaggagaaggatgttgacgactgttggttctattttacgtattcagtgaatgggaacaacgaggtcatggttcatgttgtggagaatccagagtgtcccactggtccagacatcattccaattgtagctggtgtggttgctggaattgttcttattggccttgcattactgctgatatggaagcttttaatgataattcatgacagaagggagtttgctaaatttgaaaaggagaaaatgaatgccaaatgggacacgggtgaaaatcctatttataagagtgccgtaacaactgtggtcaatccgaagtatgagggaaaatgagtactgcccgtgcaaatcccacaacactgaatgcaaagtagcaatttccatagtcacagttaggtagctttagggcaatattgccatggttttactcatgtgcaggttttgaaaatgtacaatatgtataatttttaaaatgttttattatttt

SEQ ID NO: 190963 - DNA, 702 bp, Homo Sapiens
  misc_feature (511)..(539): n is a, c, g, or t
ttgggtgatatttctatagcgattgaaagggcaatagttaaagtaatgagcatgatgagagtttctgttaatcatgtattaaaactgatttttagctttacaaatatgtcagtttgcagttatgcagaatccaaagtaaatgtcctgctagctagttaaggattgttttaaatctgttattttgctatttgcctgttagacatgactgatgacatatctgaaagacaagtatgttgagagttgctggtgtaaaatacgtttgaaatagttgatctacaaaggccatgggaaaaattcagagagttaggaaggaaaaaccaatagctttaaaacctgtgtgccattttaagagttacttaatgtttggtaacttttatgccttcactttacaaattcaagccttagataaaagaaccgagcaattttctgctaaaaagtccttgatttagcactatttacatacaggccatactttacaaagtatttgctgaatggggaccttttgagttgnnnnnnnnnnnnnnnnnnnnnnnnnnnnnatgtctggtgctttctatcacctcttctaatcttttaatgtatttgtttgcaattttggggtaagacttttttatgagtactttttctttgaagttttaacggtcaatttgcctttttaatgaacatgtgaagttatactgtggctatgcaacagctctcacc

SEQ ID NO: 190964 - DNA, 1291 bp, Homo Sapiens
  misc_feature (927)..(975): n is a, c, g, or t
ttggagcgcggcggcggcgttgttcagtcagagcgagaacattccagaggtcgcccagctccggcgctgacgggtgtggaccgcggacgtcgctgggacagcccctccccgctgctcggcggcggcacctggcccggccgctcctcgctgcgcttcgcctccgcctcctcggactcggactcgggtttatatcgcgcctcacttcatcccagtcccgggcgagcagcgttgggtttatgtctttatttgacgaaaacgagctgttgcgcagccattggtacctgtattggggaaacatagcatacaagcaagaagcttacagcctcagtggcgaaaattttttcatgtcagagaccgagaactcttgcagtcgtttatgtcatcccttcttctccagacagaagataccaaaaagttgcaatcaaagatctcttcatcttattgataaagccactaataagccaaaatgtctgtcaatgtcaaccgcagcgtgtcagaccagttctatcgctacaagatgccccgtctgattgccaaggttgagggcaaaggcaatggaatcaagacagttatagtcaacatggttgacgttgcaaaggcgcttaatcggcctccaacgtatcccaccaaatattttggttgtgagctgggagcacagacccagtttgatgttaagaatgaccgttacattgtcaatggatctcatgaggcgaataagctgcaagacatgttggatggattcattaaaaaatttgttctctgtcctgaatgtgagaatcctgaaacagatttgcatgtcaatccaaagaagcaaacaataggtaattcttgtaaagcctgtggctatcgaggcatgcttgacacacatcataaactctgcacattcattctcaaaaacccacctgagaatagtgacagtggtacagnnnnnnnnnnnnnnnnnnnnnnnnnnnnnnnnnnnnnnnnnnnnnnnnntggctccgtatccagcagtgagacaccacgaccaccaccaccaccaaatgaaattaatcctcctccacatacaatggaagaagaggaggatgatgactggggagaagatacaactgaggaagctcaaaggcgtcgaatggatgaaatcagtgaccatgcaaaagttctgacactcagtgatgatttggaaagaacaattgacgagagggtcaatatcctctttgattttgttaagaaaagaaagaagagggtgttattgattcatctgacaaagaaatcgttgctgaagcagaaagactggatgtaaaagccatgg

SEQ ID NO: 190965 - DNA, 922 bp, Homo Sapiens
caaacgtgagtgtaaaacatctgtgtacaagcctgtgttcttcaaattcatgcaaacgcgggcagccacatctccgcgtggatgggcaggactgtcctcagggccggctctgctcatccgccctggctggctgctccgctgaacagagctgcggctgtgatgctgaggctgggttgcgtgtgctctgcagcgggtgaagcaaccacaggcttagaaaggtgcgggatccgacaggggcttgtcaccactccccgctgaggaagggaggttgtcactgccgttctctctgtcacccacaaccttagactttatggtcccaactcggtcctcaaacgacttgaaggtcgcagagttcctcatgtctccaagcttcctgctgatggcagagcccactgtggacagggcagctgaagtcttctgtcctgcctgtgaaagagtttcctgagtcttcttgtagaggtctgactgggtcactttctcattccactctccaagtttctcagaagttttcacataggcgctagagacctgcacgtcatgccagctcctggacaggttctgtttcagctcccccagggtggagaggcccagcctcctcttgagctctccacagtgcctctccttggctgccaggacctggcgcagagtgacaatttcctcttccaccttggtaagctcagccctgagctcctcctcctcagcctctgtcagaccctcaacagcaggagtccgggcagccacacctgtgtcgacaggaacatccgtcatggagtcagacagcagacctttgttaggagaattcaggttgatatcttggccggcggagtccatgttcgggcggcgtccggaccgctgtcgcgggcgctatgggagccgagcgggcggcgccgggagaagctcgccgcgtacacactagccccaa

SEQ ID NO: 190966 - DNA, 1147 bp, Homo Sapiens
aaagctagattcgcgtaacaatcaggcagctgcctgagggtcagtttcctttctgggggtctcagaaaaatggacagttttctcgttcggcattttgagataaaaaattgcgtaacaggtaggacttgctgggtgattgcattccttctgtgagtcagggaaggaggaggaggaagaagtcagaaaatgccacttattttatgcttagaactcttcactccttcaacattctgatgggctaacatgattcccaaagggagcctgggctttggctcaatattctttcaaaccctccgccctgtccacttcctgcacccctaggaaggacagcacagtgatctgtttcatctacaaacgtgagtgtaaaacatctgtgtacaagcctgtgttcttcaaattcatgcaaacgcggcagccacatctccgcgtggatgggcaggactgtcctcagggccggctctgctcatccgccctggctggctgctccgctgaacagagctgcggctgtgatgctgaggctgggttgcgtgtgctctgcagcgggtgaagcaaccacaggcttagaaaggtgcgggatccgacaggggcttgtcaccactccccgctgaggaagggaggttgtcactgccgttctctctgtcacccacaaccttagactttatggtcccaactcggtcctcaaacgacttgaaggtcgcagagttcctcatgtctccaagcttcctgctgatggcagagcccactgtggacagggcagctgaagtcttctgtcctgcctgtgaaagagtttcctgagtcttcttgtaggcgctagagacctgcacgtcatgccagctcctggacaggttctgtttcagctcccccagggtggagaggcccagcctcctcttgagctctccacagtgcctctccttggctgccaggacctggcgcagagtgacaatttcctcttccaccttggtaagctcagccctgagctcctcctcctcagcctctgtcagaccctcaacagcaggagtccgggcagccacacctgtgtcgacaggaacatccgtcatggagtcagacagcagacctttgttaggagaattcaggttgatatcttggccggcggagtccatgttcgggcggcgtccggaccgcccaa

SEQ ID NO: 190967 - DNA, 501 bp, Homo Sapiens
ctttgtacaaaaaagttgggttttatgtcacgcaaactccatcccagtgtacaaaacctgcttctcttctcaaccgtggcagctcccgctggctcctatgccctgccctaaagggctcttgagcctctgggaatgggaggggccaagagaaggaaaaccctgtctttagcaccctttaaaagaactgtgccccccttctcagtgctgcctttgcatgggcctggcccggctcacattcgtcagtgactccaaccctcctgcttgctgtacttgggatgaaacgaccccacaggtcaggtggagggtggggcgtgggcatcagccaggattgccgttacagtctttttctcaggagctacaaagatctcttcctgttactaaatagtcgcaccccagcaccctctctcgcacaccggggccctgcatgtcacatggcgtggtctgcagggggagctctgtgccttactggctcttggcaggacactgagggcctgcctgtgg

SEQ ID NO: 190968 - DNA, 965 bp, Homo Sapiens; identical to SEQ ID NO: 180031
  misc_feature (767)..(775): n is a, c, g, or t

SEQ ID NO: 190969 - DNA, 2552 bp, Homo Sapiens; identical to SEQ ID NO: 183587

SEQ ID NO: 190970 - DNA, 1256 bp, Homo Sapiens; identical to SEQ ID NO: 183588

SEQ ID NO: 190971 - DNA, 686 bp, Homo Sapiens; identical to SEQ ID NO: 180032

SEQ ID NO: 190972 - DNA, 963 bp, Homo Sapiens
ctttgtacaaaaaagttggcacatccatgctgaatttgtactcctggtcacatcccatgtaagcatcactcatgaagtatagagtgtagttgtgggcaccagtggctggagccacaaagtccaacttcaccttggccttctgctgcaggatcagcctcttgatggagatgaggctattggacttggtgtctccaatcaccacccaccagccctcttcacgtttctgcgggaagagaggcgcaatgacagggcctgtgacttcctcctctcgctccagctgcaccagcaccaccgctggcccgccactgcggatgctgtccttatccaccacctcctaagatagttcgatattagggtagcagttacaaaagcgagccacatctgtaatctggctgtcagtcagctgaagaattgtgttccgttcttcatcctccatctccatgatgtcgaaaacactcttcactcccttgtctgtgcaacgtttgatatgctcagagatgaagtgtggcagctgcttcaggtatgagtccttggaccacatggcttgggtgaccatctgggccaattccatagctgccagagcagagctgagccacccattgctggagaggacatccacgcaggcctggacgagccggactgccttactaaggatttcctccgtatctgactgcaactcagcactcagctgcatgcgggacaggtgagcctgcaggagcaggttggtcttgatgtgcggatcattgaacttagggttattcagcttgtcagggaccttctgagccaactgcctcaggaagttttcttcatggtgctggatggggatattctcgtaccctgctgcattggagatgatctccataagccctcgcaccttggtcttggcgttgaggaagaggaagatcaaacgttgtgccagaaactacctctgaaggctacacttttcccaagttcaggatgggg

SEQ ID NO: 190973 - DNA, 1993 bp, Homo Sapiens; identical to SEQ ID NO: 183589

SEQ ID NO: 190974 - DNA, 1103 bp, Homo Sapiens
ttggcaaaaggaagcccgtatgggccgtggaacagttgaacagattgtgtaccttgttcactgtggcataatagaaccgttgatgaacctcttacctgcaaaagataccaagattattctggttatcctggatgccatttcaaatatctttcaggctgctgagaaactaggtgaaactgagaaacttagtataatgattgaagaatgtggaggcgtagacaaaattgaagctctacaaaaccatgaaaatgagtctgtatataaggcttcattaagcttaactgagaagtatttctctgtagagctttggtttctacaaattattttattagaatgtcagactcaaaaggaactaccagtaacatgcctgaacatgctatatatgatttatgcttgacccgtgacacctgctgtcactggatccagagtgtgaacaagggaaaaggaagtggatgtgggcagggacagcaccagccctggctggccagacctcaggcccacagacgtggtccccataaccaccaggatccctacaatatacacattcctaattcaggctcaactctcctttacccaagagtaaatgcctcaggactcaatctgaatcactgtccgtctcggcttctttcacatccatgctgaatttgtactcctggtcacatcccatgtaagcatcactcatgaagtatagagtgtagttgtgggcaccagtggctggagccacaaagtccaacttcaccttggccttctgctgcaggatcagcctcttgatggagatgaggctattggacttggtgtctccaatcaccacccaccagccctcttcacgtttctgcgggaagagaggcgcaatgacagggcctgtgacttcctcctctcgctccagctgcaccagcaccaccgctggcccgccactgcggatgctgtccttatccaccacctcctaagatagttcgatattagggtagcagttacaaaagcgagccacatctgtaatctggctgtcagtcagctgaagaatttgtgttccgttcttcatcctccatctccatgatgtcgaaaacactcttcactcccttgtctgtgcaacgtttgatatgctc

SEQ ID NO: 190975 - DNA, 1475 bp, Homo Sapiens; identical to SEQ ID NO: 183591

SEQ ID NO: 190976 - DNA, 2152 bp, Homo Sapiens; identical to SEQ ID NO: 180033
  misc_feature (364)..(376): n is a, c, g, or t

SEQ ID NO: 190977 - DNA, 1816 bp, Homo Sapiens; identical to SEQ ID NO: 183593
  misc_feature (1045)..(1075): n is a, c, g, or t
  misc_feature (1254)..(1268): n is a, c, g, or t
  misc_feature (1355)..(1404): n is a, c, g, or t

SEQ ID NO: 190978 - DNA, 879 bp, Homo Sapiens; identical to SEQ ID NO: 183594
  misc_feature (80)..(94): n is a, c, g, or t
  misc_feature (181)..(230): n is a, c, g, or t
  misc_feature (644)..(719): n is a, c, g, or t

SEQ ID NO: 190979 - DNA, 1275 bp, Homo Sapiens; identical to SEQ ID NO: 183595
  misc_feature (261)..(297): n is a, c, g, or t
  misc_feature (476)..(490): n is a, c, g, or t
  misc_feature (577)..(626): n is a, c, g, or t
  misc_feature (1040)..(1115): n is a, c, g, or t

SEQ ID NO: 190980 - DNA, 815 bp, Homo Sapiens; identical to SEQ ID NO: 183596
  misc_feature (118)..(166): n is a, c, g, or t
  misc_feature (578)..(655): n is a, c, g, or t

SEQ ID NO: 190981 - DNA, 632 bp, Homo Sapiens; identical to SEQ ID NO: 183597

SEQ ID NO: 190982 - DNA, 3125 bp, Homo Sapiens; identical to SEQ ID NO: 183601

SEQ ID NO: 190983 - DNA, 1432 bp, Homo Sapiens
ttggagacacactgtgacggctgcctgaagctagtgagtcgcggcgccgcgcactggtggttgggtcagtgccgcgcgccgatcggtcgttaccgcgaggcgctggtggccttcaggctggacggcgcgggtcagccctggttcgccggcttctgggtctttgaacagccgcgatgtcgatcttcacccccaccaaccagatccgcctaaccaatgtggccgtggtacggatgaagcgtgccgggaagcgcttcgaaatcgcctgctacaaaaacaaggtcgtcggctggcggagcggcgtggaaaaagacctcgatgaagttctgcagacccactcagtgtttgtaaatgtttctaaaggtcaggttgccaaaaaggaagatctcatcagtgcgtttggaacagatgaccaaactgaaatctgtaagcagattttgactaaaggagaagttcaagtatcagataaagaaagacacacacaactggagcagatgtttagggacattgcaactattgtggcagacaaatgtgtgaatcctgaaacaaagagaccatacaccgtgatccttattgagagagccatgaaggacatccactattcggtgaaaaccaacaagagtacaaaacagcaggctttggaagtgataaagcagttaaaagagaaaatgaagatagaacgtgctcacatgaggcttcggttcatccttccagtcaatgaaggcaagaagctgaaagaaaagctcaagccactgatcaaggtcatagaaagtgaagattatggccaacagttagaaatcgtatgtctgattgacccgggctgcttccgagaaattgatgagctaataaaaaaggaaactaaaggcaaaggttctttggaagtactcaatctgaaagatgtagaagaaggagatgagaaatttgaatgacacccatcaatctcttcacctctaaaacactaaagtgtttccgtttccgacggcactgtttcatgtctgtggtctgccaaatacttgcttaaactatttgacattttctatctttgtgttaacagtggacacagcaaggctttcctacataagtataataatgtgggaatgatttggttttaattataaactggggtctaaatcctaaagcaaaattgaaactccaagatgcaaagtccagagtggcattttgctactctgtctcatgccttgatagctttccaaaatgaaagttacttgaggcagctcttgtgggtgaaaagttatttgtacagtagagtaagattattaggggtatgtctatacaacaaaagggggggtctttcctaaaaaagaaaacatatgatgcttcatttctacttaatggaacttgtgttctgagggtcattatggtatcgtaatgtaaagcttggatgatgttcctgattatctgagaaaacagatat

SEQ ID NO: 190984 - DNA, 1921 bp, Homo Sapiens; identical to SEQ ID NO: 183605
  misc_feature (249)..(265): n is a, c, g, or t

SEQ ID NO: 190985 - DNA, 1176 bp, Homo Sapiens; identical to SEQ ID NO: 183606
  misc_feature (1037)..(1078): n is a, c, g, or t

SEQ ID NO: 190986 - DNA, 1415 bp, Homo Sapiens; identical to SEQ ID NO: 183608
  misc_feature (123)..(218): n is a, c, g, or t
  misc_feature (1268)..(1278): n is a, c, g, or t

SEQ ID NO: 190987 - DNA, 1387 bp, Homo Sapiens
  misc_feature (1307)..(1315): n is a, c, g, or t
ctttgtacaaaaaagttgggacatttttatactaaaacaaacaccaaaatattttagaataaattcttagaaagttttgagaggaatttttagagaggacatttcctccttcctgatttggatattccctcaaatccctcctcttactccatgctgaaggagaagtactctcagatgcattatgttaatggagagaaaaagcacagtattgtagagacaccaatattagctaatgtattttggagtgttttccattttacagtttatattccagcactcaaaactcagggtcaagttttaacaaaagaggtatgtagtcacagtaaatactaagatggcatttctatctcagagggccaaagtgaatcacaccagtttctgaaggtcctaaaaatagctcagatgtcctaatgaacatgcacctacatttaataggagtacaataaaactgttgtcagcttttgttttacagagaacgctagatattaagaattttgaaatggatcatttctacttgctgtgcattttaaccaataatctgatgaatatagaaaaaaatgatccaaaatatggatatgattggatgtatgtaacacatacatggagtatggaggaaattttctgaaaaatacatttagattagtttagtttgaaggagaggtgggctgatggctgagttgtatgttactaacttggccctgactggttgtgcaaccattgcttcatttctttgcaaaatgtagttaagatatactttattctaatgaaggccttttaaatttgtccactgcattcttggtatttcactacttcaagtcagtcagaacttcgtagaccgacctgaagtttctttttgaatacttgtttctttagcactttgaagatagaaaaaccactttttaagtactaagtcatcatttgccttgaaagtttcctctgcattgggtttgaagtagtttagttatgtctttttctctgtatgtaagtagtataatttgttactttcaaatacccgtactttgaatgtaggtttttttgttgttgttatctataaaaattgagggaaatggttatgcaaaaaaatattttgctttggaccatatttcttaagcataaaaaaaatgctcagttttgcttgcattccttgagaatgtatttatctgaagatcaaaacaaacaatccagatgtataagtactaggcagaagccaattttaaaatttccttgaataatccatgaaaggaataattcaaatacagataaacagagttggcagtatattatagtgataattttgtattttcacnnnnnnnnngttaaactcttcttttctttttattataatgaccagcttttggtatttcattgttaccaagttctattttta

SEQ ID NO: 190988 - DNA, 1053 bp, Homo Sapiens; identical to SEQ ID NO: 183609
  misc_feature (879)..(888): n is a, c, g, or t

SEQ ID NO: 190989 - DNA, 1053 bp, Homo Sapiens; identical to SEQ ID NO: 180040
  misc_feature (324)..(370): n is a, c, g, or t
  misc_feature (970)..(991): n is a, c, g, or t

SEQ ID NO: 190990 - DNA, 791 bp, Homo Sapiens
ttggcacgcctcacccatctacttataacttattaaggaggacactggaatagatgatctcaaaggcccctccagggtaactttcttcagctctatttaagccagtttttccattcaggctgtgaagcttcatggaggtatcgatatcctagtctccaatgctgctgtcaaccctttctttggaagcctaatggatgtcaccgaggaggtgtgggacaagctctggatggacaaggaaaaagaggaaagcatgaaagaaaccctgggataagaaggttaggcgagccagaggattgtgctggcatcgtgtctttcctgtgctctgaagatgccagctacatcactggggaaacagtggtggtgggtggaggaaccccgtcccgcctctgaggaccgggagacagcccacaggccagagttgggctctagctcctggtgctgttcccgcattcacccactggcctttcccacctctgctcaccttactgttcacctcatcaaatcagttctgccctgtgaaaagatccagccttccctgccgtcaaggtggcgtcttactcgggatttctgctgttgttgtggccttgggtaaaggcctcccctgagaacacaggacaggcctgctgacaaggctgagtctaccttggcaaagaccaagatattttttcccgggccactggggaatctgaggggtgatgggagagaaggaacctggagtggaaggagcagagttgcaaattaacaacttgcaaatgaggtgcaaataaaatgcagatgattgcgcggctttg

SEQ ID NO: 190991 - DNA, 1045 bp, Homo Sapiens
ttggtgatccatgcacaaggcggggctgctaggcctctgtgcccgggcttggaattcggtgcggatggccagctccgggatgacccgccgggacccgctcgcaaataaggtggccctggtaacggcctccaccgacgggatcggcttcgccatcgcccggcgtttggcccaggacggggcccatgtggtcgtcagcagccggaagcagcagaatgtggaccaggcggtggccacgctgcagggggaggggctgagcgtgacgggcaccgtgtgccatgtggggaaggcggaggaccgggagcggctggtggccacggctgtgaagcttcatggaggtatcgatatcctagtctccaatgctgctgtcaaccctttctttggaagcataatggatgtcactgaggaggtgtgggacaagactctggacattaatgtgaaggccccagccctgatgacaaaggcagtggtgccagaaatggagaaacgaggaggcggctcagtggtgatcgtgtcttccatagcagccttcagtccatctcctggcttcagtccttacaatgtcagtaaaacagccttgctgggcctgaccaagaccctggccatagagctggccccaaggaacattagggtgaactgcctagcacctggacttatcaagactagcttcagcaggatgctctggatggacaaggaaaaagaggaaagcatgaaagaaaccctgcggataagaaggttaggcgagccagaggattgtgctggcatcgtgtctttcctgtgctctgaagatgccagctacatcactggggaaacagtggtggtgggtggaggaaccccgtcccgcctctgaggaccgggagacagcccacaggccaaagttgggctctagctcctggtgctgttcctgcattcacccactggcctttcccacctctgctcaccttactgttcacctcatcaaatcagttctgccctgtgaaaagatccagccttccctgccgtcaaggtggcgtcttactcgggattactgcttgttgttgtggccttg

SEQ ID NO: 190992 - DNA, 1036 bp, Homo Sapiens
ctgattcagcaggaagcatctcagacaccaaccactatgctgtcagcagttgcccggggctaccagggctggtttcatccctgtgctaggctttctgtgaggatgagcagcaccgggatagacaggaagggcgtcctggctaactgggtagccgtggtcacggggtccaccagtgggatcggctttgccatcgcccgacgtctggcccgggacggggcccacgtggtcatcagcagccggaagcagcagaacgtggaccgggccatggccaagctgcagggggaggggctgagtgtggcgggcattgtgtgccacgtggggaaggctgaggaccgggagcagctggtggccaaggccctggagcactgtgggggcgtcgacttcctggtgtgcagcgcaggggtcaaccctctggtagggagcactctggggaccagtgagcagatctgggacaagatcctaagtgtgaacgtgaagtccccagccctgctgctgagccagttgctgccctacatggagaacaggaggggtgctgtcatcctggtctcttccattgcagcttataatccagtagtggcgctgggtgtctacaatgtcagcaagacagcgctgctgggtctcactagaacactggcattggagctggcccccaaggacatccgggtaaactgcgtggttccaggaattatcaaaactgacttcagcaaagtgtttcatgggaatgagtctctctggaagaacttcaaggaacatcatcagctgcagaggattggggagtcagaggactgtgcaggaatcgtgtccttcctgtgctctccagatgccagctacgtcaacggggagaacattgcggtggcaggctactcccactcggctctgagaggagtgggggcggctgcgtagctgtggtcccaggcccaggagcctgagggggtgtctaggtgatcatttggatctggaggcagagtctgccatttctgcccagactaacaatttgggggcttacttcatgctaaggcttgagggaagaagaaaa

SEQ ID NO: 190993 - DNA, 1523 bp, Homo Sapiens; identical to SEQ ID NO: 180041
  misc_feature (42)..(55): n is a, c, g, or t
  misc_feature (363)..(531): n is a, c, g, or t
  misc_feature (658)..(829): n is a, c, g, or t

SEQ ID NO: 190994 - DNA, 2787 bp, Homo Sapiens; identical to SEQ ID NO: 183612

SEQ ID NO: 190995 - DNA, 309 bp, Homo Sapiens
gagcaatgcttttctataaagggcccctttgtacaaaaaagttggcccctttgtgtgcctggaaacagtcaccatatgttccccccagagaatgtgtctatatcctccttctaacagcaccttccccctgcagctactcttcagatctggctctctgtaccctaaaacctagtatctttttctcttctatggaaaatccgaaggtctaaacttgacttttttgaggtcttctcaacttgactacagttgtgctcataattgtccttgcctttccagcttaattattttaaggaacaaatgaaaactctg

SEQ ID NO: 190996 - DNA, 446 bp, Homo Sapiens
ctttgtacaaaaaagttggggacatttgtttagtaaatcccttcagtatttatccctcctttccccacagcagctttctttcctgtcaactagaaaggagcaggatgtaataaatacattttggtgtgactaggccacaccaactcttaatcatctcccattttccttagacatttaaatttcaaggcaggtaccctctgtgtactcagaaatttgaagaagttatttggttttccaaaatgcacactgcgggttattgatttgttctttacaactattgttctcatatttctcacactaaataaatctctatgagagcttcttgacttggccatttatttcttggacactctcatgttcttgttcacccatgcaggcaccccaccaaagtacatatcttccttccagtaataatttttaattacaaaataaacatccactattgg

SEQ ID NO: 190997 - DNA, 593 bp, Homo Sapiens
actttgtacaaaaaagttggctttgctcggcccctactagaactcgggcccaagcctgaggtggcccaacagacccgaaaaatcctgtctgcctgtgagaagaatcccacagatgcctaccagctcaattatgacatgcacaacccctttgacatttgtgctgcatcatatcggcccatctaccgtggaaagccagtagaaaagtgtccactcagtggggcctgctattcccctgagttcaaaggtcaaatctgcagggtcaccacagtgacagagattggcaaagatgtgattggtttaaggatcagtcctctgcagtttcgctaaggccccctttgtgtgcatgggtcagtcaccatatgttccccccagagaatgtgtctatatcctccttctaacagcaccttccccctgcagctactcttcagatctggctctctgtaccctaaaacctagtatctttttctcttctatggaaaatccgaaggtctaaacttgacttttttgaggtcttctcaacttgactacagttgtgctcataattgtccttgcctttccagcttaattattttaaggaacaaatgaaaactctg

SEQ ID NO: 190998 - DNA, 2152 bp, Homo Sapiens; identical to SEQ ID NO: 183614

SEQ ID NO: 190999 - DNA, 950 bp, Homo Sapiens
gagcaatgcttttttataatgccaactttgtacaaaaaagttggtcttgggttttttgtggcttccttcgttattggagccaggcctacaccccagcaaccatgtccaagggacctgcagttggtattgatcttggcaccacctactcttgtgtgggtgttttccagcacggaaaagtcgagataattgccaatgatcagggaaaccgaaccactccaagctatgtcgcctttacggacactgaacggttgatcggtgatgccgcaaagaatcaagttgcaatgaaccccaccaacacagtttttgatgccaaacgtctgattggacgcagatttgatgatgctgttgtccagtctgatatgaaacattggccctttatggtggtgaatgatgctggcaggcccaaggtccaagtagaatacaagggagagaccaaaagcttctatccagaggaggtgtcttctatggttctgacaaagatgaaggaaattgcagaagcctaccttgggaagactgttaccaatgctgtggtcacagtgccagcttactttaatgactctcagcgtcaggctaccaaagatgctggaactattgctggtctcaatgtacttagaattattaatgagccaactgctgctgctattgcttacggcttagacaaaaaggttggagcagaaagaaacgtgctcatctttgacctgggaggtggcacttttgatgtgtcaatcctcactattgaggatggaatctttgaggtcaagtctacagctggagacacccacttgggtggagaagattttgacaaccgaatggtcaaccattttattgctgagtttaagcgcaagcataagaaggacatcagtgagaacaagagagctgtaagacgcctccgtactgcttgtgaacgtgctaagcgtaccctcttcttccagcacccaggccagtattga

SEQ ID NO: 191000 - DNA, 1191 bp, Homo Sapiens
ggacagctgcaccataagcaacagcttcatcagggttgatgctcttattcagttcttttccatggaagaagtctggagaagcttctgaatcttggggatacgagtagaaccaccaaccaggacaatatcatgaatctgtgacttgtctagtttggcatctcgaagggctttctctactgggtccagggtgccacggaacaggtcagcattcagttcttcaaatcgggcacgggtaatggaggtatagaagtcgattccttcatagagagaatcgatctcaatactggcctgggtgctggaagagagggtacgcttagcacgttcacaagcagtacggaggcgtcttacagctctcttgttctcactgatgtccttcttatgcttgcgcttaaactcagcaataaaatggttgaccattcggttgtcaaaatcttctccacccaagtgggtgtctccagctgtagacttgacctcaaagattccatcctcaatagtgaggattgacacatcaaaagtgccacctcccaggtcaaagatgagcacgtttctttctgctccaacctttttgtctaagccgtaagcaatagcagcagcagttggctcattaataattctaagtacattgagaccagcaatagttccagcatctttggtagcctgacgctgagagtcattaaagtaagctggcactgtgaccacagcattggtaacagtcttcccaaggtaggcttctgcaatttccttcatctttgtcagaaccatagaagacacctcctctggatagaagcttttggtctctcccttgtattctacttggaccttgggcctgccagcatcattcaccaccataaagggccaatgtttcatatcagactggacaacagcatcatcaaatctgcgtccaatcagacgtttggcatcaaaaactgtgttggtggggttcattgcaacttgattctttgcggcatcaccgatcaaccgttcagtgtccgtaaaggcgacatagcttggagtggttcggtttccctgatcattggcaattatctcgacttttccgtgctggaaaacacccacacaagagtaggtggtgccaagatcaataccaactgcaggtcccttggacatggttgctggggtgtaggcctggctccaataacgaaggaagccccaacttttttgtacaaagttggc

SEQ ID NO: 191001 - DNA, 1184 bp, Homo Sapiens
gatagagcaatgctttccttataatggccaactttgtacaaaaaagttggcttcacaaaaaggcaatggaaaagaactgaataagagcatcaaccctgatgaagctgttgcttatggtgcagctgtccaggcagccatcttgtctggagacaagtctgagaatgttcaagatttgctgctcttggatgtcactcctctttcccttggtattgaaactgctggtggagtcatgactgtcctcatcaagcgtaataccaccattcctaccaagcagacacagaccttcactacctattctgacaaccagcctggtgtgcttattcaggtttatgaaggcgagcgtgccatgacaaaggataacaacctgcttggcaagtttgaactcacaggcatacctcctgcaccccgaggtgttcctcagattgaagtcacttttgacattgatgccaatggtatactcaatgtctctgctgtggacaagagtacgggaaaagagaacaagattactatcactaatgacaagggccgtttgagcaaggaagacattgaacgtatggtccaggaagctgagaagtacaaagctgaagatgagaagcagagggacaaggtgtcatccaagaattcacttgagtcctatgccttcaacatgaaagcaactgttgaagatgagaaacttcaaggcaagattaacgatgaggacaaacagaagattctggacaagtgtaatgaaattatcaactggcttgataagaatcagactgctgagaaggaagaatttgaacatcaacagaaagagctggagaaagtttgcaaccccatcatcaccaagctgtaccagagtgcaggaggcatgccaggaggaatgcctgggggatttcctggtggtggagctcctccctctggtggtgcttcctcagggcccaccattgaagaggttgattaagccaaccaagtgtagatgtagcattgttccacacatttaaaacatttgaaggacctaaattcgtagcaaattctgtggcagttttaaaaagttaagctgctatagtaagttactgggcattctcaatacttgaatatggaacatatgcacaggggaaggaaataacattgcactttataaacactgtattgtaagtggaaaatgcaatgtcttaaataaaactatttaaaattggcaccat

SEQ ID NO: 191002 - DNA, 908 bp, Homo Sapiens
ttgtacaaaaaagttgggaaggacataccaagtgagagaaggagagcgaagagagctgtaagacgcctccgtactgcttgtgaacgtgctaagcgtaccctctcttccagcacccaggccagtattgagatcgattctctctatgaaggaatcgacttctatacctccattacccgtgcccgatttgaagaactgaatgctgacctgttccgtggcaccctggacccagtagagaaagcccttcgagatgccaaactagacaagtcacagattcatgatattgtcctggttggtggttctactcgtatccccaagattcagaagcttctccaagacttcttcaatggaaaagaactgaataagagcatcaaccctgatgaagctgttgcttatggtgcagctgtccaggcagccatcttgtctggagacaagtctgagaatgttcaagatttgctgctcttggatgtcactcctctttcccttggtattgaaactgctggtggagtcatgactgtcctcatcaagcgtaataccaccattcctaccaagcagacacagaccttcactacctattctgacaaccagcctggtgtgcttattcaggtttatgaaggcgagcgtgccatgacaaaggataacaacctgcttggcaagtttgaactcacaggcatacctcctgcaccccgaggtgttcctcagattgaagtcacttttgacattgatgccaatggtatactcaatgtctctgctgtggacaagagtacgggaaaagagaacaagattactatcactaatgacaagggccgtttgagcaaggaagacattgaacgtatggtccaggaagctgagaagtacaaagctgaagatgagaagcagagggacaaggtgtcatccaagaattcacttga

SEQ ID NO: 191003 - DNA, 1066 bp, Homo Sapiens
aattgatgagcaatgctttgactataaaaagccaactttgtacaaaaaagttggcttctatacctccattacccgtgcccgatttgaagaactgaatgctgacctgttccgtggcaccctggacccagtagagaaagcccttcgagatgccaaactagacaagtcacagattcatgatattgtcctggttggtggttctactcgtatccccaagattcagaagcttctccaagacttcttcaatggaaaagaactgaataagagcatcaaccctgatgaagctgttgcttatggtgcagctgtccaggcagccatcttgtctggagacaagtctgagaatgttcaagatttgctgctcttggatgtcactcctctttcccttggtattgaaactgctggtggagtcatgactgtcctcatcaagcgtaataccaccattcctaccaagcagacacagaccttcactacctattctgacaaccagcctggtgtgcttattcaggtttatgaaggcgagcgtgccatgacaaaggataacaacctgcttggcaagtttgaactcacaggcatacctcctgcaccccgaggtgttcctcagattgaagtcacttttgacattgatgccaatggtatactcaatgtctctgctgtggacaagagtacgggaaaagagaacaagattactatcactaatgacaagggccgtttgagcaaggaagacattgaacgtatggtccaggaagctgagaagtacaaagctgaagatgagaagcagagggacaaggtgtcatccaagaattcacttgagtcctatgccttcaacatgaaagcaactgttgaagatgagaaacttcaaggcaagattaacgatgaggacaaacagaagattctggacaagtgtaatgaaattatcaactggcttgataagaatcagactgctgagaaggaagaatttgaacatcaacagaaagagctggaaaaagtttgcaaccccatcatcacccaacctgtaccagagtgcaggaggcatgccaggaggaatgcctgggggatttcctggtggtgg

SEQ ID NO: 191004 - DNA, 1416 bp, Homo Sapiens
ctttgtacaaaaaagttggcacagtttttgatgccaaacgtctgattggacgcagatttgatgatgctgttgtccagtctgatatgaaacattggccctttatggtggtgaatgatgctggcaggcccaaggtccaagtagaatacaagggagagaccaaaagcttctatccagaggaggtgtcttctatggttctgacaaagatgaaggaaattgcagaagcctaccttgggaagactgttaccaatgctgtggtcacagtgccagcttactttaatgactctcagcgtcaggctaccaaagatgctggaactattgctggtctcaatgtacttagaattattaatgagccaactgctgctgctattgcttacggcttagacaaaaaggttggagcagaaagaaacgtgctcatctttgacctgggaggtggcacttttgatgtgtcaatcctcactattgaggatggaatctttgaggtcaagtctacagctggagacacccacttgggtggagaagattttgacaaccgaatggtcaaccattttattgctgagtttaagcgcaagcataagaaggacatcagtgagaacaagagagctgtaagacgcctccgtactgcttgtgaacgtgctaagcgtaccctctcttccagcacccaggccagtattgagatcgattctctctatgaaggaatcgacttctatacctccattacccgtgcccgatttgaagaactgaatgctgacctgttccgtggcaccctggacccagtagagaaagcccttcgagatgccaaactagacaagtcacagattcatgatattgtcctggttggtggttctactcgtatccccaagattcagaagcttctccaagacttcttcaatggaaaagaactgaataagagcatcaaccctgatgaagctgttgcttatggtgcagctgtccaggcagccatcttgtctggagacaagtctgagaatgttcaagatttgctgctcttggatgtcactcctctttcccttggtattgaaactgctggtggagtcatgactgtcctcatcaagcgtaataccaccattcctaccaagcagacacagaccttcactacctattctgacaaccagcctggtgtgcttattcaggtttatgaaggcgagcgtgccatgacaaaggataacaacctgcttggcaagtttgaactcacaggcatacctcctgcaccccgaggtgttcctcagattgaagtcacttttgacattgatgccaatggtatactcaatgtctctgctgtggacaagagtacgggaaaagagaacaagattactatcactaatgacaagggccgtttgagcaaggaagacattgaacgtatggtccagggaagctgaagaagtacaaagctgaagatga

SEQ ID NO: 191005 - DNA, 867 bp, Homo Sapiens
gaaaagtctagtaacgaggccatcccggcgtcagaagcggtcaggctgggtttgacaagatcagaaccgaaatgactacgaaagtgggaatacaaggaggtgcatttactacacattaacgtcagcgaagctcccacaatctttaaacacacagccattggaaggacgatcttgagcaggaagggtttttactcgttgtgtgtagcgtaactgtcgtaactgtctctgtaggacccgcccgagctccggtcactgtagccaccactctgactccggctgctatagtagtctctggagcctccgtagcccccactcctggactcgaaccggttccccccatagcctcggtcccctcctcctctagagaacccacggccccgtcctcggcccccacggaagaagccccggcccccggcagagccaccacggtacccacgggatcggttgtctgacgacttgcctgcctggtctactcggatctgccgtccatctacagacttcccattcatggccatcatggcatccttagcgtcgtcaatgttctcaaaggtgacaaacccaaatccccgagatctctgggtctccctgtctttcacaaccaccacttcagagatctgtccgtactttgagaagacctgctccagcgactgctcattggtgtcaaaactcagccctccaacaaaaagtttgccttcatctgatgccatggcggcctgtggcagacaccaatgaaatcctcaacaggggtcatctctcaccacctctccccgcttccactgagtcgggcaggtccctgacgcaagcgggaagacagcgcaccacaacgacccgagcctcccaacttttttgtacaaagttggcattaaa

SEQ ID NO: 191006 - DNA, 885 bp, Homo Sapiens
  misc_feature (796)..(804): n is a, c, g, or t
ttggggctcgggtcgttgggtgcgctgtcttcccgcttgcgtcagggacctgcccgactcagtggccgccatggcatcagatgaaggcaaactttttgttggagggctgagttttgacaccaatgagcagtcgctggagcaggtcttctcaaagtacggacagatctctgaagtggtggttgtgaaagacagggagacccagagatctcggggatttgggtttgtcacctttgagaacattgacgacgctaaggatgccatgatggccatgaatgggaagtctgtagatggacggcagatccgagtagaccaggcaggcaagtcgtcagacaaccgatcccgtgggtaccgtggtggctctgccgggggccggggcttcttccgtgggggccgaggacggggccgtgggttctctagaggaggaggggaccgaggctatggggggaaccggttcgagtccaggagtgggggctacggaggctccagagactactatagcagccggagtcagagtggtggctacagtgaccggagctcgggcgggtcctacagagacagttacgacagttacgctacacacaacgagtaaaaacccttcctgctcaagatcgtccttccaatggctgtgtgtttaaagattgtgggagcttcgctgaacgttaatgtgtagtaaatgcacctccttgtattcccactttcgtagtcatttcggttctgatcttgtcaaacccagcctgaccgcttctgacgccgggatggcctcgttactagacttttctttttaaggaagtgctgnnnnnnnnngagggttttcaaaacattttgaaaagcatttacttttttgaccacgagccatgagttttcaaaaaaatcgggggttgtgtg

SEQ ID NO: 191007 - DNA, 1808 bp, Homo Sapiens; identical to SEQ ID NO: 180042
  misc_feature (452)..(462): n is a, c, g, or t
  misc_feature (544)..(590): n is a, c, g, or t
  misc_feature (1602)..(1645): n is a, c, g, or t

SEQ ID NO: 191008 - DNA, 1524 bp, Homo Sapiens
  misc_feature (1176)..(1184): n is a, c, g, or t
  misc_feature (1267)..(1314): n is a, c, g, or t
ttggtgggggctcgggtcgttgtggtgcgctgtcttcccgcttgcgtcagggacctgcccgactcagtggccgccatggcatcagatgaaggcaaactttttgttggagggctgagttttgacaccaatgagcagtcgctggagcaggtcttctcaaagtacggacagatctctgaagtggtggttgtgaaagacagggagacccagagatctcggggatttgggtttgtcacctttgagaacattgacgacgctaaggatgccatgatggccatgaatgggaagtctgtagatggacggcagatccgagtagaccaggcaggcaagtcgtcagacaaccgatcccgtgggtaccgtggtggctctgccgggggccggggcttcttccgtgggggccgaggacggggccgtgggttctctagaggaggaggggaccgaggctatggggggaaccggttcgagtccaggagtgggggctacggaggctccagagactactatagcagccggagtcagagtggtggctacagtgaccggagctcgggcgggtcctacagagacagttacgacagttacggtaagtcacactccgagggcgccacgctgctgtggcctgcggtgggagctcggttcaccttggtgccctctccaagcactttaggctggacactcagaccttgtcactgtgcttgcccagaagaggcgcatctgtcctctcagagccatttctatcgcaggacgcaaaagccaaatgagactgaccaaaaaggcaagggagagcgagggcccgctgggcagtcagctaggtgcatgtgtggccgcaggccagcctccctcggctgtggggggtggttgctccccggccgcaggccgcgccctggtctggcctctggggtgaagctgcctcttgttgcttcggtgcctttacactgtgcctgcttcttgtcctcagctacacacaacgagtaaaaacccttcctgctcaagatcgtccttccaatggctgtgtgtttaaagattgtgggagcttcgctgaacgttaatgtgtagtaaatgcacctccttgtattcccactttcgtagtcatttcggttctgatcttgtcaaacccagcctgaccgcttctgacgccgggatggcctcgttactagacttttctttttaaggaagtgctgnnnnnnnnngagggttttcaaaacattttgaaaagcatttacttttttgaccacgagccatgagttttcaaaaaaatcgggggttgtgtggnnnnnnnnnnnnnnnnnnnnnnnnnnnnnnnnnnnnnnnnnnnnnnnnagtggggttggccccatgaagtgggtgccccactcacttctctgagatcgaacggactgtgaatccgctctttgtcggaagctgagcaagctgtggctttttttccaactccgtgtgacgtttctgagtgtagtgtggtaggaccccggcgggtgtggcagcaactgccctggagccccagcccctgcgtccatctgtgctgtgcgcccc

SEQ ID NO: 191009 - DNA, 891 bp, Homo Sapiens
  misc_feature (823)..(832): n is a, c, g, or t
actttgtacaaaaaagttggcgcgttaggaggctcgggtcgttgtggtgcgctgtcttcccgcttgcgtcagggacctgcccgactcagtggccgccatggcatcagatgaaggcaaactttttgttggagggctgagttttgacaccaatgagcagtcgctggagcaggtcttctcaaagtacggacagatctctgaagtggtggttgtgaaagacagggagacccagagatctcggggatttgggtttgtcacctttgagaacattgacgacgctaaggatgccatgatggccatgaatgggaagtctgtagatggacggcagatccgagtagaccaggcaggcaagtcgtcagacaaccgatcccgtgggtaccgtggtggctctgccgggggccggggcttcttccgtgggggccgaggacggggccgtgggttctctagaggaggaggggaccgaggctatggggggaaccggttcgagtccaggagtgggggctacggaggctccagagactactatagcagccggagtcagagtggtggctacagtgaccggagctcgggcgggtcctacagagacagttacgacagttacgctacacacaacgagtaaaaacccttcctgctcaagatcgtccttccaatggctgtgtgtttaaagattgtgggagcttcgctgaacgttaatgtgtagtaaatgcacctccttgtattcccactttcgtagtcatttcggttctgatcttgtcaaacccagcctgaccgcttctgacgccgggatggcctcgttactagacttttctttttaaggaagtgctgnnnnnnnnnngagggttttcaaaacattttgaaaagcatttacttttttgaccacgagccatgagtttt

SEQ ID NO: 191010 - DNA, 1564 bp, Homo Sapiens; identical to SEQ ID NO: 183617

SEQ ID NO: 191011 - DNA, 944 bp, Homo Sapiens; identical to SEQ ID NO: 183618

SEQ ID NO: 191012 - DNA, 712 bp, Homo Sapiens
ttggagcggggagccggggcagacgtccgtagcgccccctcccgaggaggtcgagccgggcagtggggtccgcatcgtggtggagtactgtgaaccctgcggcttcgaggcgacctacctggagctggccagtgctgtgaaggagcagtatccgggcatcgagatcgagtcgcgcctcgggggcacaggtgcctttgagatagagataaatggacagctggtgttctccaagctggagaatgggggctttccctatgagaaagatctcattgaggccatccgaagagccagtaatggagaaaccctagaaaatatcaccaacagccgtcctccctgcgtcatcctgtgactgcacaggactctgggttcctgctctgttctggggtccaaaccttggtctccctttggtcctgctgggagctccccctgcctctttcccctacttagctccttagcaaagagaccctggcctccactttgccctttgggtacaaagaaggaatagaagattccgtggccttgggggcaggagagagacactctccatgaacacttctccagccacctcatacccccttcccagggtaagtgcccacgaaagcccagtccactcttcgcctcggtaatacctgtctgatgccacagattttatttattctcccctaacccagggcaatgtcagctattggcagtaaagtggcgctacaaacaa

SEQ ID NO: 191013 - DNA, 2527 bp, Homo Sapiens; identical to SEQ ID NO: 183619
  misc_feature (2409)..(2429): n is a, c, g, or t

SEQ ID NO: 191014 - DNA, 1851 bp, Homo Sapiens; identical to SEQ ID NO: 183620
  misc_feature (149)..(163): n is a, c, g, or t
  misc_feature (302)..(591): n is a, c, g, or t
  misc_feature (595)..(606): n is a, c, g, or t

SEQ ID NO: 191015 - DNA, 721 bp, Homo Sapiens; identical to SEQ ID NO: 183622
  misc_feature (588)..(599): n is a, c, g, or t

SEQ ID NO: 191016 - DNA, 2608 bp, Homo Sapiens; identical to SEQ ID NO: 183623
  misc_feature (2489)..(2517): n is a, c, g, or t

SEQ ID NO: 191017 - DNA, 1721 bp, Homo Sapiens; identical to SEQ ID NO: 183625

SEQ ID NO: 191018 - DNA, 978 bp, Homo Sapiens; identical to SEQ ID NO: 180046

SEQ ID NO: 191019 - DNA, 2634 bp, Homo Sapiens; identical to SEQ ID NO: 183626
  misc_feature (2564)..(2593): n is a, c, g, or t

SEQ ID NO: 191020 - DNA, 2679 bp, Homo Sapiens; identical to SEQ ID NO: 183629
  misc_feature (94)..(102): n is a, c, g, or t

SEQ ID NO: 191021 - DNA, 1025 bp, Homo Sapiens; identical to SEQ ID NO: 183630

SEQ ID NO: 191022 - DNA, 1915 bp, Homo Sapiens; identical to SEQ ID NO: 183631
  misc_feature (90)..(140): n is a, c, g, or t
  misc_feature (1555)..(1585): n is a, c, g, or t
  misc_feature (1841)..(1853): n is a, c, g, or t

SEQ ID NO: 191023 - DNA, 1162 bp, Homo Sapiens; identical to SEQ ID NO: 183632
  misc_feature (88)..(100): n is a, c, g, or t

SEQ ID NO: 191024 - DNA, 944 bp, Homo Sapiens
cagcacatgggtgtagtcacaaaggcattgatgaaggtggccccccccatgttccataatctttctcgttttgttcatgacttgcagggaccccagctccacatcttgatcatcggtaagcacaagaataatgttgggtcggatgttttttcgttctgctgtatccgtcctctgaacctcggggatctgacagtcgaacagaggcttcccagcaattctgtgcccaggacagccaaaaccagagcacagcaagaatacttcattgtatttggtccaatgttgcaaaactgacaaaatgtctccgtctcctgatttctggagttcttgaattaggtatcctggttgaataatcaatctctattctcagaggtattcagaacatctgcagatagggtcctttgaagattttctgcaattattctgccttgaagaacctgcatgtcatttgccaagtttatcttctttagatgatggtgggtggccgtcagcacctctccattccaattatgctctcttcaagagtatgggaagaatttactggtcacactgaagaaggatgaacttattgtagactaaataatgaccaggtaagaaattacttcctttgtgttagtctctgagtgagttccttgttcaagagaagtgaagaatccaaaagccgccttcaaaatcttctctagagaaaaagctctgggaacagggaggaggcagaggagcagagataaggtggcagcgggacttccttcctcctccgaagggggagagtcatgttcctcatctgccctgacctccgaggagcgccggcagccgggaaggcctggcctctgatcctcgctgccctcgctcctggcctctgcgcctggggtttcctagttgccgatcaagccgccccggcccgacaccggccccaagattcattagccaacttttttgtacaaagttgg

SEQ ID NO: 191025 - DNA, 961 bp, Homo Sapiens; identical to SEQ ID NO: 183633

SEQ ID NO: 191026 - DNA, 1512 bp, Homo Sapiens
ttggatttatcccagaagtataaaagaataaagaaacctgaaggaaagccagatcagaagtttgatcaaaagcaagagcttggacgtgtgatacatctcagcaatttgccgcattctggctattctgatagtgctgttctcaagcttgctgagccttatgggaaaataaagaattacatattgatgaggatgaaaagtcaggcttttattgagatggagacaagagaagatgcaatggcaatggttgaccattgtttgaaaaaagccctttggtttcaggggagatgtgtgaaggttgacctgtctgagaaatataaaaaactggttctgaggattccaaacagaggcattgatttactgaaaaaagataaatcccgaaaaagatcttactctccagatggcaaagaatctccaagtgataagaaatccaaaactgatggttcccagaagactgagagttcaaccgaaggtaaagaacaagaagagaagtccggtgaagatggtgagaaagacacaaaggatgaccagacagagcaggaacctaatatgcttcttgaatctgaagatgagctacttgtagatgaagaagaagcagcagcactgctagaaagtggcagttcagtgggagacgagaccgatcttgctaatttaggtgatgtggcttctgatgggaaaaaggaaccatcagataaagctgtgaaaaaagatggaagtgcttcagcagcagcaaagaaaaagcttaaaaaggtggacaagatcgaggaacttgatcaagaaaacgaagcagcgttggaaaatggaattaaaaatgaggaaaacacagaaccaggtgctgaatcttctgagaacgctgatgatcccaacaaagatacaagtgaaaacgcagatggtcaaagtgatgagaacaaggacgactatacaatcccagatgagtatagaattggaccatatcagcccaatgttcctgttggtatagactatgtgatacctaaaacagggttttactgtaagctgtgttcactcttttatacaaatgaagaagttgcaaagaatactcattgcagcagccttcctcattatcagaaattaaagaaatttctgaataaattggcagaagaacgcagacagaagaaggaaacttaagatgtgcaaggagatttaatgatttcaaagaaaataatggttctttgtttttaatgttaaccttttttaaatacaatactgatagttagaagaaaactattgtactcttttgttttagtggagaaataatagatgtctgttcatgtgttaagtgttatagcaaaaaaaatacacatatggttaagttaatgaatagtttttgttttatcagaatggcaacagacagaagtactttgtagagattgacttcctaagctacttaagacaacttgcaccactaagaaaaaaatgtagaaccatttggaaaaatgaaatttagtagttccaagtttcaaagaaatgtcaacattttattccattcaataaaga

SEQ ID NO: 191027 - DNA, 1583 bp, Homo Sapiens; identical to SEQ ID NO: 183637

SEQ ID NO: 191028 - DNA, 1278 bp, Homo Sapiens
ctttgtacaaaaaagttggtgtggcttctgcctgggaaaaaggaaccatcagataaagctgtgaaaaaagatggaagtgcttcagcagcagcaaagaaaaagcttaaaaagggggacaagatcgaggaacttgatcaagaaaacgaagcagcgttggaaaatggaattaaaaatgaggaaaacacagaaccaggtgctgaatcttctgagaacgctgatgatcccaacaaagatacaagtgaaaacgcagatggtcaaagtgatgagaacaaggacgactatacaatcccagatgagtatagaattggaccatatcagcccaatgttcctgttggtatagactatgtgatacctaaaacagggttttactgtaagctgtgttcactcttttatacaaatgaagaagttgcaaagaatactcattgcagcagccttcctcattatcagaaattaaagaaatttctgaataaattggcagaagaacgcagacagaagaaggaaacttaagatgtgcaaggagatttaatgatttcaaagaaaataatggttctttgtttttaatgttaaccttttttaaatacaatactgatagttagaagaaaactattgtactcttttgttttagtggagaaataatagatgtctgttcatgtgttaagtgttatagcaaaaaaaatacacatatggttaagttaatgaatagtttttgttttatcagaatggcaacagacagaagtactttgtagagattgacttcctaagctacttaagacaacttgcaccactaagaaaaaaatgtagaaccatttggaaaaatgaaatttagtagttccaagtttcaaagaaatgtcaacattttattccattcaataaagaacaaaaccaatagtgtttttattactttcatctgaaacattccatgttttaatctgagccttgcagactttcatttggagtttgaacccgttttggttgcatttcatttttggagaacttaattaacgtgagattggcaattgaaatgcaggtgcagttttctgttaatgtcatgctgttgtttagtaataagaaatattaagtaattggctttagattttgtaatttttttccctgagttcctgctagatttcgtattctagtagtcaatgtattttcagtgaaatgcaaaaatattcccattatctttgaccagtattaaattttgagatcttactgcttgtcacttgaatcccgtgattgtcatacatctctggtataagcaacatttgatttttgaag

SEQ ID NO: 191029 - DNA, 1618 bp, Homo Sapiens; identical to SEQ ID NO: 183638
  misc_feature (1470)..(1478): n is a, c, g, or t

SEQ ID NO: 191030 - DNA, 931 bp, Homo Sapiens
ttggcttttttcgtaaaatttcttgcaagttacacgcttttgttttgcttttctgtgttgtttttctgtattatatttctttttttaagaatacagttaggtgagacctcaaacatcaattaggtaaaagcaaaatatggttcggtttttgttttttatcttaggctgtattggacttctcaaaaacatgttgtttcatttaaattatgttgacaggtgaaattgtgaatactaaataaaatcttcagtttaatttgtaagaatgtatgtttgtatttctaggtatagactatgtgatacctaaaacagggttttactgtaagctgtgttcactcttttatacaaatgaagaagttgcaaagaatactcattgcagcagccttcctcattatcagaaattaaagaaatttctgaataaattggcagaagaacgcagacagaagaaggaaacttaagatgtgcaaggagatttaatgatttcaaagaaaataatggttctttgtttttaatgttaaccttttttaaatacaatactgatagttagaagaaaactattgtactcttttgttttagtggagaaataatagatgtctgttcatgtgttaagtgttatagcaaaaaaaatacacatatggttaagttaatgaatagtttttgttttatcagaatggcaacagacagaagtactttgtagagattgacttcctaagctacttaagacaacttgcaccactaagaaaaaaatgtagaaccatttggaaaatgaaatttagtagttccaagtttcaaagaaatgtcaacattttattccattcataaagaacaaaaccaatagtgttttattactttcatctgaaacattccatgttttatctgagccttgcagactttcatttggagtttgaaccgttttggttgcatttcatttttg

SEQ ID NO: 191031 - DNA, 893 bp, Homo Sapiens; identical to SEQ ID NO: 180048
  misc_feature (194)..(202): n is a, c, g, or t
  misc_feature (343)..(464): n is a, c, g, or t

SEQ ID NO: 191032 - DNA, 1825 bp, Homo Sapiens; identical to SEQ ID NO: 183640
  misc_feature (1409)..(1431): n is a, c, g, or t

SEQ ID NO: 191033 - DNA, 1682 bp, Homo Sapiens; identical to SEQ ID NO: 183641
  misc_feature (680)..(702): n is a, c, g, or t
  misc_feature (1525)..(1564): n is a, c, g, or t

SEQ ID NO: 191034 - DNA, 1202 bp, Homo Sapiens; identical to SEQ ID NO: 183642
  misc_feature (110)..(132): n is a, c, g, or t

SEQ ID NO: 191035 - DNA, 1573 bp, Homo Sapiens
tggctccaaagacactctaaaagaaaagaattattttatgcgtgatagtggagcaaggctgccaccgacgcccaggatgcgaaccagtgctgcactagctgtgaggataatgccccagccaccagctactgtgtggagtgctcggagcctctgtgtgagacctgtgtagaggcgcaccagcgggtgaagtacaccaaggaccatactgtgcgctctactgggccagccaagtctcgggatggtgaacgtactgtctattgcaacgtacacaagcatgaaccccttgtgctgttttgtgagagctgtgatactctcacctgccgagactgccagctcaatgcccacaaggaccaccagtaccagttcttagaggatgcagtgaggaaccagcgcaagctcctggcctcactggtgaagcgccttggggacaaacatgcaacattgcagaagagcaccaaggaggttcgcagctcaatccgccaggtgtctgacgtacagaagcgtgtgcaagtggatgtcaagatggccatcctgcagatcatgaaggagctgaataagcggggccgtgtgctggtcaatgatgcccagaaggtgactgaggggcagcaggagcgcctggagcggcagcactggaccatgaccaagatccagaagcaccaggagcacattctgcgctttgcctcttgggctctggagagtgacaacaacacagcccttttgctttctaagaagttgatctacttccagctgcaccgggccctcaagatgattgtggatcccgtggagccacatggcgagatgaagtttcagtgggacctcaatgcctggaccaagagtgccgaggcctttggcaagattgtggcagagcgtcctggcactaactcaacaggccctgcacccatggcccctccaagagccccagggcccctgagcaagcagggctctggcagcagccagcccatggaggtgcaggaaggctatggctttgggtcaggagatgatccctactcaagtgcagagccccatgtgtcaggtgtgaaacggtcccgctcaggtgagggcgaggtgagcggccttatgcgcaaggtgccacgagtgagccttgaacgcctggacctggacctcacagctgacagccagccacccgtcttcaaggtcttcccaggcagtaccactgaggactacaaccttattgttattgaacgtggcgctgccgctgcagctaccggccagccagggactgcgcctgcaggaacccctggtgccccacccctggctggcatggccattgtcaaggaggaggagacggaggctgccattggagcccctcctactgccactgagggccctgagaccaaacctgtgcttatggctcttgcggagggtcctggtgctgagggtccccgcctggcctcacctagtggcagcaccagctcaaggctggaggtggtggctcctgagggtacctcagccccagtggtggcccgggaaccctggatgacagtgccaccatttgccgtgtctgccagaagccaggcgatctggttatgtgcaaccagtgtgagttttgttt

SEQ ID NO: 191036 - DNA, 2592 bp, Homo Sapiens; identical to SEQ ID NO: 183647

SEQ ID NO: 191037 - DNA, 4958 bp, Homo Sapiens; identical to SEQ ID NO: 183649
  misc_feature (101)..(111): n is a, c, g, or t
  misc_feature (198)..(206): n is a, c, g, or t
  misc_feature (4841)..(4849): n is a, c, g, or t

SEQ ID NO: 191038 - DNA, 1007 bp, Homo Sapiens; identical to SEQ ID NO: 183650

SEQ ID NO: 191039 - DNA, 987 bp, Homo Sapiens; identical to SEQ ID NO: 183651

SEQ ID NO: 191040 - DNA, 1550 bp, Homo Sapiens; identical to SEQ ID NO: 183653
  misc_feature (570)..(607): n is a, c, g, or t
  misc_feature (810)..(819): n is a, c, g, or t
  misc_feature (1132)..(1140): n is a, c, g, or t

SEQ ID NO: 191041 - DNA, 1176 bp, Homo Sapiens; identical to SEQ ID NO: 183654
  misc_feature (135)..(190): n is a, c, g, or t
  misc_feature (962)..(1003): n is a, c, g, or t

SEQ ID NO: 191042 - DNA, 1495 bp, Homo Sapiens; identical to SEQ ID NO: 180050

SEQ ID NO: 191043 - DNA, 841 bp, Homo Sapiens; identical to SEQ ID NO: 183655

SEQ ID NO: 191044 - DNA, 2990 bp, Homo Sapiens; identical to SEQ ID NO: 183657
  misc_feature (502)..(526): n is a, c, g, or t
  misc_feature (1890)..(1920): n is a, c, g, or t
  misc_feature (2715)..(2729): n is a, c, g, or t

SEQ ID NO: 191045 - DNA, 2513 bp, Homo Sapiens; identical to SEQ ID NO: 180051
  misc_feature (134)..(155): n is a, c, g, or t

SEQ ID NO: 191046 - DNA, 901 bp, Homo Sapiens; identical to SEQ ID NO: 183659

SEQ ID NO: 191047 - DNA, 1183 bp, Homo Sapiens
caggcagacaggtacagctgagtagggctctgcctgaggtgtctggcatcaggaggctgctgatccccaacaggcatgacaggctccagggagcaatgggacatctgcccaaaggatcaaagtccaacttggccagatcccaagcttcgcctgcatcatgtccctggctctgcaacgggtacccccaactccggggacgagccatggcctcaagcagcagctggctacgctgccgaaaccaggacacatctgcatcacacagaaagctgcgccaccctggtgtgacaggccctacttggtcaccctagggtaagctggagaagaactccagatgtgccctggagaggcccccacctctcaggggccacctcacagggtgccccccaccaccccattctttgagtttggcttgagattttaggaagcataatttcaggtgaggaagagaacaaagtctggtcccagcccactctggcaaggattgttccccaccttgtcagcatcagaggaagccacatatacaggcaggacacacacagcacacatggggcgtaaggaaccgtgcctggacacacacagcacacatggggcgtaaggaaccgcgcctgcacaccactcacgcacacacacaacataaccaagtggcagccagagaggccagggaatgctcagagggccgccttcggggcatccatgtaggccgggttgtaaggaggctggctggcggggtagggcgcggctgctcctccagccagggtctcgtggtaggccggtgggcccatgggctgggctgggtaaggtggtgggtactgcattgggtagggtgctgctggcatccctggctgaggcggcatggtgtggtagccctggtagcttggtccagggtagctgggcggcacacttggaggctgaggataaggggcatgcaccacagtggtggatgtggtggtggtgacaaccggacgtggtcggcggcacgtcttgtaaaggcagcagcaggagcaggtgaagcagatgatgatagtgacgacagacagcacaaagatggtcaggccaacggccaaggtcgctccgaaccccatgttagcctctgccttcacccagaggcctcctgtacccctgggctttcccctcttcccatcgtgggccactcagtttcaatttcctccccttttggagccaa

SEQ ID NO: 191048 - DNA, 1040 bp, Homo Sapiens
actttgtacaaaaaagttgggatgaagatcaatagagcaagaaaaagaaattgcagaactaaagaagcagctaaacctcctttctcaagacaaaggggtgagggatgacggaaaggatgggggcgtgggatgaaagtggacttaacttttaaggtagttaactggaatgtaaatttttaatctttattagggtatagttggtacaatgcttcgttgtatttagtaagcctttacaagacttgttaaagatgtcagagtgccccaagctgccgttccttcccttcctgccccacaagctccttttcctgaatttcctacctaaatattaaccatatgcctagtctctgaaactaaaaacttggacctcatcctcaattattttctcctttcaactctgttgaccctctgtctggtcttcctctagaaggttctaccgcagaaattgatgtgtgctccctgccctcgtcactgcccaagcccgggcctgcacatactcactggactgttccagttttgacagctgccagtcttcctgcccctttcacactgcagctgaagttcattacctgaaggacgcctcatcatttcattccttggctccaaaccttctgctgcctctaagataaaagctcaacttcttaacagtgtacagtgtgcaacttccaacctttttatctgttctctccaccttcagtttagcgtcattccaaaaccacacccttgcaaagctttgtactccgcaccccagatgatctccaggcagctcagatctctttcctgcctttgccctgcactgttccccggtacttcctcctttattgtagcactcagctccccagccaatctgtacatccctcaaaggcagcgatctgatgaattggtttttgaatcccagaaagggtctgccatggagttggcagtcatcacggtagatggcgtatgattttgctgaattttaaataaaatgaaaaccataaattacatgatgcttttattgacacttgacaactggcctaaataaaaagactctgactctaaaa

SEQ ID NO: 191049 - DNA, 1362 bp, Homo Sapiens; identical to SEQ ID NO: 183662

SEQ ID NO: 191050 - DNA, 1610 bp, Homo Sapiens; identical to SEQ ID NO: 183663

SEQ ID NO: 191051 - DNA, 1363 bp, Homo Sapiens; identical to SEQ ID NO: 183664

SEQ ID NO: 191052 - DNA, 638 bp, Homo Sapiens
actttgtacaaaaaagttgggaaaaagaaattgcagaactaaagaagcagctaaacctcctttctcaagacaaaggggtgagggatgacggaaaggatgggggcgtgggatgaaagtggacttaacttttaaggtagttaactggaatgtaaatttttaatctttattagggtatagttggtacaatgcttcgttgtatttagtaagcctttacaagacttgttaaagatgtcagagtgccccaagctgccgttccttcccttcctgccccacaagctccttttcctgaatttcctacctaaatattaaccatatgcctagtctctgaaactaaaaacttggacctcatcctcaattattttctcctttcaactctgttgaccctctgtctggtcttcctctagaaggttctaccgcagaaattgatgtgtgctccctgccctcgtcactgcccaagcccgggcctgcacatactcactggactgttccagttttgacagctgccagtcttcctgcccctttcacactgcagctgaagttcattacctgaaggacgcctcatcatttcattccttggctccaaaccttctgctgcctctaagataaaagctcaacttcataacagtgtacagtgtgca

SEQ ID NO: 191053 - DNA, 1181 bp, Homo Sapiens
actttgtacaaaaaagttgggacgagtttaccctcattgagactacatcacaacagagctattactcacttaatgaggtctgctaaagagagagttcgtcaggatccttgtgaggatatttctcgtatccagaaaatcagatcaagggaagtagccttggaagcacaaacttcacgttacttaaatgaatttgaagaacttgccatcttaggaaaaggtggatacggaagagtatacaaggtcaggaataaattagatggtcagtattatgcaataaaaaaaatcctgattaagggtgcaactaaaacagtttgcatgaaggtcctacgggaagtgaaggtgctggcaggtcttcagcaccccaatattgttggctatcacaccgcgtggatagaacatgttcatgtgattcagccacgagcagacagagctgccattgagttgccatctctggaagtgctctccgaccaggaagaggacagagagcaatgtggtgttaaaaatgatgaaagtagcagctcatccattatctttgctgagcccaccccagaaaaagaaaaacgctttggagaatctgacactgaaaatcagaataacaagtcggtgaagtacaccaccaatttagtcataagagaatctggtgaacttgagtcgaccctggagctccaggaaaatggcttggctggtttgtctgccagttcaattgtggaacagcagctgccactcaggcgtaattcccacctagaggagagtttcacatccaccgaagaatcttccgaagaaaatgtcaactttttgggtcagacagaggcacagtaccacctgatgctgcacatccagatgcagctgtgtgagctctcgctgtgggattggatagtcgagagaaacaagcggggccgggagtatgtggacgagtctgcctgtccttatgttatggccaatgttgcaacaaaaatttttcagaattggtagaaggtgtgttttacatacataacatgggaattgtgcaccgagatctgaagccaagaaatatttttcttcatggccctgatcagcaagtaaaaataggagactttggtctggcctgcacagacatcctacagagaacacagactggaccaacagaaacgggagagaacaccaacacatacgtccagagtgggtacttgtctgtacgcttc

SEQ ID NO: 191054 - DNA, 995 bp, Homo Sapiens; identical to SEQ ID NO: 183665

SEQ ID NO: 191055 - DNA, 3278 bp, Homo Sapiens; identical to SEQ ID NO: 183667
  misc_feature (2997)..(3025): n is a, c, g, or t

SEQ ID NO: 191056 - DNA, 1712 bp, Homo Sapiens; identical to SEQ ID NO: 180052
  misc_feature (1284)..(1293): n is a, c, g, or t

SEQ ID NO: 191057 - DNA, 1814 bp, Homo Sapiens; identical to SEQ ID NO: 183668
  misc_feature (263)..(291): n is a, c, g, or t

SEQ ID NO: 191058 - DNA, 925 bp, Homo Sapiens; identical to SEQ ID NO: 183669

SEQ ID NO: 191059 - DNA, 3812 bp, Homo Sapiens; identical to SEQ ID NO: 183670
  misc_feature (3151)..(3215): n is a, c, g, or t

SEQ ID NO: 191060 - DNA, 1398 bp, Homo Sapiens; identical to SEQ ID NO: 183671
  misc_feature (1079)..(1133): n is a, c, g, or t

SEQ ID NO: 191061 - DNA, 2908 bp, Homo Sapiens; identical to SEQ ID NO: 180054
  misc_feature (1586)..(1594): n is a, c, g, or t
  misc_feature (1618)..(1645): n is a, c, g, or t
  misc_feature (1873)..(1881): n is a, c, g, or t

SEQ ID NO: 191062 - DNA, 1303 bp, Homo Sapiens
  misc_feature (1146)..(1199): n is a, c, g, or t
ttcaagttttatttgcctctgcatggtcttttacagtcggtttctacaggaactgagcttgatccaaacaatcaataaaaatgtaattccaaccttaatattcataccaggaaatagcatagcacttcatgatcctagagtgatgaaagcaagaccagggcatctgtttcacagtcacctgtgaccagaccagccaacatgattactaaaagccaagataaaaccaaaagcaaacttgctaaaaaatcctgaattccatgaggttaactctgaaatcctccaaacaaaatgctagaattgtccactagtgttaagacgagaaaactgaggaaaactcagctgtcttactatctggtaagagtcttcccttcatctcaagccctcaaaaatgcaaacttggttccagctttacaacataccatatccttctatcggttaaaggtttctaacctaaaaaccttctctcctttcttctcacctatttagtgcatactcaaaggctttggttggaagtcactaggtaccactaggtacaatgctttagggctctctcaaagcccacaatggtggagttctgtgaaagaaaacttaagtttctttctctttacccctctcccctcactcagctcaaagttaaacagctgatgcaaaactacagagaagcaagataacaaaatactgttatcaatctatggagaaatcagccagccatgatgaaaaaatgagtcctgccgactatctgccagcttcatgctcagaacccttaaaaacacagaatctaaattaaaatacatgaagctttcacaatccggttaaaggaaaaaggtaactgtaaataactggttaaagtgtgctcattcgttcagaaattagatacaaacatgcaagaattaaagactctgatttaataaaatcagtagtaacaggtcttgagattaaacaactgacctgagggcaaatgggaccaatcagtccctgaaccctacctgacatgtcaaatccaacatttcacatgctgacctaatattgaggttaatttccagaagtaactgcacttttcaacagattaagtcctacaaaattaggctctcgtaccccaaatggtcatggcctacgcctaggtgggaggcactttaaaaataatannnnnnnnnnnnnnnnnnnnnnnnnnnnnnnnnnnnnnnnnnnnnnnnnnnnnntccacttttcactggtttacattattcaaagtgccattctgaaccaacaccctttcatttatagaggaaaaaaatttacaaaaacccaacttttttgtacaaag

SEQ ID NO: 191063 - DNA, 1014 bp, Homo Sapiens; identical to SEQ ID NO: 180055
  misc_feature (736)..(763): n is a, c, g, or t

SEQ ID NO: 191064 - DNA, 981 bp, Homo Sapiens; identical to SEQ ID NO: 183672

SEQ ID NO: 191065 - DNA, 1017 bp, Homo Sapiens; identical to SEQ ID NO: 183673

SEQ ID NO: 191066 - DNA, 1044 bp, Homo Sapiens
ttgggaccggtctcaccgaatgcatcctgtcgggcatcatgtctgtgaacgggaagaaggtgctgcacatggaccggaacccctactacgggggcgagagctcctccatcacacccctggaggagctgtataagcgttttcagttgctggaggggccccctgagtcgatgggccgaggccgagactggaatgttgacctgattcccaaattcctcatggctaacgggcagctggtaaagatgctactgtatacagaggtgactcgctacctggacttcaaggtggtggagggcagctttgtctacaaggggggcaagatctacaaagtgccgtccactgagactgaggccttggcttccaatctgatgggcatgtttgagaaacggcgcttccgcaagttcctggtgtttgtggcaaacttcgatgagaatgaccccaagacctttgagggcgttgacccccagactaccagcatgcgtgacgtctaccggaagtttgatctgggccaggatgtcatcgatttcactggccatgccctggcgctctaccgcactgatgactacctggaccagccctgccttgagaccgtcaaccgcatcaagttgtacagtgagtccctggcccggtatggcaagagcccatatttatacccgctctacggcttgggcgagctgccccagggttttgcaagattgagtgccatctatggggggacatatatgctgaacaaacctgtggatgacatcatcatggagaacggcaaggtggtgggcgtgaagtctgagggagaggtggcccgctgcaagcagctgatctgtgaccccagctacatcccggaccgtgtgcggaagctggccaggttatccgcatcatctgtatccttagccaccccatcaagaacaccaacgacgccaactcctgccaaataatcatcccccagaaccaggtcaacaggaagtcagacatctacgtgtgcatgatctcctatgcacacaacgtggcggcccagggcaagtacatagctattgccagcactactgtgga

SEQ ID NO: 191067 - DNA, 1007 bp, Homo Sapiens
ccaactttgtacaaaaaagttggatcatcatggacaacggcaaggtggtgggcgtgaagtctgagggagaggtggcccgctgcaagcagctgatctgtgaccccagctacatcccggaccgtgtgcggaaggctggccaggttatccgcatcatctgtatccttagccaccccatcaagaacaccaacgacgccaactcctgccaaataatcatcccccagaaccaggtcaacaggaagtcagacatctacgtgtgcatgatctcctatgcacacaacgtggcggcccagggcaagtacatagctattgccagcactactgtggagaccacggaccctgaaaaggaggtggagccggctctggagctgttggagcccattgaccagaagtttgtggctatcagtgacttgtatgagcccattgatgatggttgtgagagccaggtgttctgttcctgctcctacgatgccaccacacactttgagacaacctgcaacgacatcaaagacatctacaaacgcatggctggcacggcctttgactttgagaacatgaagcgcaaacagaacgacgtctttggagaagctgagcagtgattgtggccgcccccagcccctgctgccccagcctgtgtctgttctcctcgagggctccagcatcctctgcttcccccaccacgttcccatcacccacctcattgatccactgaccaaatccttaaccctagcgatggcttgggagatggggggttggatagcatcctctttcttggcccttccttatcctaggaaaagagggttcctctccttgtgtgtgtctcttccccccacccctaattcttctgctctgtttgggaagacgtggaggaaaaggtgacttctgcccccaccgctcttacccccactgtagtggcctttggagatgcccccacctcccccccaccaactctcgcgtgttggagagaaggggccctcccagcacaaagttgcattcctcccccctaattt

SEQ ID NO: 191068 - DNA, 684 bp, Homo Sapiens
acccagcttcccctcactcatcagtgcggtagagcgccagggcatggccagtgaaatcgatgacatcctggcccagatcaaacttccggtagacgtcacgcatgctggtagtctgggggtcaacgccctcaaaggtcttggggtcattctcatcgaagtttgccacaaacaccaggaacttgcggaagcgccgtttctcaaacatgcccatcagattggaagccaaggcctcagtctcagtggacggcactttgtagatcttgccccccttgtagacaaagctgccctccaccaccttgaagtccaggtagcgagtcacctctgtatacagtagcatctttaccagctgcccgttagccatgaggaatttgggaatcaggtcaacattccagtctcggcctcggcccatcgactcagggggcccctccagcaactgaaaacgcttatacagctcctccaggggtgtgatggaggagctctcgcccccgtagtaggggttccggtccatgtgcagcaccttcttcccgttcacagacatgatgcccgacaggatgcattcggtgagaccggtccccagcacgatcacatcgtattcctcgtccatggtcaggcctcggtgccagcgcccgctcggctcctcctcccccttcaccgcagcagtcgccgccgccaccgccgccccaa

SEQ ID NO: 191069 - DNA, 1099 bp, Homo Sapiens; identical to SEQ ID NO: 183674

SEQ ID NO: 191070 - DNA, 994 bp, Homo Sapiens
ctttgtacaaaaaagttggcaggagcccagggctgggctctggctgtttccaggtgttctgttcctgctcctacgatgccaccacacactttgagacaacctgcaacgacatcaaagacatctacaaacgcatggctggcacggcctttgactttgagaacatgaagcgcaaacagaacgacgtctttggagaagctgagcagtgattgtggccgcccccagcccctgctgccccagcctgtgtctgttctcctcgagggctccagcatcctctgcttcccccaccacgttcccatcacccacctcattgatccactgaccaaatccttaaccctagcgatggcttgggagatggggggttggatagcatcctctttcttggcccttccttatcctaggaaaagagggttcctctccttgtgtgtgtctcttccccccacccctaattcttctgctctgtttgggaagacgtggaggaaaaggtgacttctgcccccaccgctcttacccccactgtagtggcctttggagatgcccccacctcccccccaccaactctcgcgtgttggagagaaggggccctcccagcacaaagttgcattcctcccccctaatttattctaatttattaactttgacccaccctttctgagcctgcagccttcccgtgtggcctgagggctgtcgagtgagctgccccagcccctcccagcccttgcccagcctgggggagtggggaaggcttgggcatggccccgttggaggttgatttgctgttttgtttcttgtctttgtgttctgtggtacttgctgagagaaaagaaaagtgagccaagcagaaggaggtgggaaaacggacccaaaccccagtgtgccctgccccatgcctttcctttagtggtgggaaacccttatcttgcaaagtgaatgtgtccccttccccacctctagtgtatttcacagaaaacaaaacctcccaataaaacggttgaaa

SEQ ID NO: 191071 - DNA, 1047 bp, Homo Sapiens; identical to SEQ ID NO: 183676

SEQ ID NO: 191072 - DNA, 1150 bp, Homo Sapiens; identical to SEQ ID NO: 183677
  misc_feature (175)..(203): n is a, c, g, or t
  misc_feature (915)..(987): n is a, c, g, or t

SEQ ID NO: 191073 - DNA, 2963 bp, Homo Sapiens; identical to SEQ ID NO: 183678

SEQ ID NO: 191074 - DNA, 1361 bp, Homo Sapiens; identical to SEQ ID NO: 183679
  misc_feature (406)..(434): n is a, c, g, or t
  misc_feature (1188)..(1217): n is a, c, g, or t

SEQ ID NO: 191075 - DNA, 1491 bp, Homo Sapiens; identical to SEQ ID NO: 183681
  misc_feature (1281)..(1289): n is a, c, g, or t

SEQ ID NO: 191076 - DNA, 1010 bp, Homo Sapiens; identical to SEQ ID NO: 183684

SEQ ID NO: 191077 - DNA, 1066 bp, Homo Sapiens; identical to SEQ ID NO: 183685

SEQ ID NO: 191078 - DNA, 1203 bp, Homo Sapiens; identical to SEQ ID NO: 183686

SEQ ID NO: 191079 - DNA, 1380 bp, Homo Sapiens
tttgtacaaaaaagttggtgctgggcacccctgcaggctatgttgctgccagattctataagtcctttggaggtgagaagtggaaaacaaatgttttattaacatcatttctttgtcctgggattgtatttgctgacttctttataatgaatctgatcctctggggagaaggatcttcagcagctattccttttgggacactggttgccatattggccctttggttctgcatatctgtgcctctgacgtttattggtgcatactttggttttaagaagaatgccattgaacacccagttcgaaccaatcagattccacgtcagattcctgaacagtcgttctacacgaagcccttgcctggtattatcatgggagggattttgccctttggctgcatctttatacaacttttcttcattctgaatagtatttggtcacaccagatgtattacatgtttggcttcctatttctggtgtttatcattttggttattacctgttctgaagcaactatacttctttgctatttccacctatgtgcagaggattatcattggcaatggcgttcattccttacgagtggctttactgcagtttatttcttaatctatgcagtacactacttcttttcaaaactgcagatcacgggaacagcaagcacaattctgtactttggttataccatgataatggttttgatcttctttctttttacaggaacaattggcttctttgcatgcttttggtttgttaccaaaatatacagtgtggtgaaggttgactgaagaagtccagtgtgtccagttaaaacagaaataaattaaactcttcatcaacaaagacctgtttttgtgactgccttgagttttatcagaattattggcctagtaatccttcagaaacaccgtaattctaaataaacctcttcccatacacctttcccccataagatgtgtcttcaacactataaagcatttgtattgtgatttgattaagtatatatttggttgttctcaatgaagagcaaatttaaatattatgtgcatttgtaaatacagtagctataaaattttccatacttctaatggcagaatagaggaggccatattaaataatactgatgaaaggcaggacactgcattgtaaataggattttctaggctcggtaggcagaaagaattatttttctttgaaggaaataactttttatcatgggaattttgaaggatgattcctatgatgtgttcaccaggggaatgtggcttttaaagaaaatcttctattggttgtaactgttcatatcttcttacttttctgtgttgacttcattattcccatggtattggccttttaaactatgtgcctctgagtctttcaatt

SEQ ID NO: 191080 - DNA, 815 bp, Homo Sapiens
ttgtacaaaaaagttggctacttcttttcaacactgcagatcacgggaacagcaagcacaattctgtactttggttataccatgataatggttttgatcttctttctttttacaggaacaattggcttctttgcatgcttttggtttgttaccaaaatatacagtgtggtgaaggttgactgaagaagtccagtgtgtccagttaaaacagaaataaattaaactcttcatcaacaaagacctgtttttgtgactgccttgagttttatcagaattattggcctagtaatccttcagaaacaccgtaattctaaataaacctcttcccatacacctttcccccataagatgtgtcttcaacactataaagcatttgtattgtgatttgattaagtatatatttggttgttctcaatgaagagcaaatttaaatattatgtgcatttgtaaatacagtagctataaaattttccatacttctaatggcagaatagaggaggccatattaaataatactgatgaaaggcaggacactgcattgtaaataggattttctaggctcggtaggcagaaagaattatttttctttgaaggaaataactttttatcatggtaattttgaaggatgattcctatgatgtgttcaccaggggaatgtggcttttaaagaaaatcttctattggttgtaactgttcatatcttcttacttttctgtgttgacttcattattcccatggtattggccttttaaactatgtgcctctgagtctttcatttataaatttgttatcttaataaatattataaaaatgtc

SEQ ID NO: 191081 - DNA, 719 bp, Homo Sapiens
tttgtacaaaaaagttggcaattggcttctttcgcatgcttttggtttgttaccaaaatatacagtgtggtgaaggttgactgaagaagtccagtgtgtccagttaaaacagaaataaattaaactcttcatcaacaaagacctgtttttgtgactgccttgagttttatcagaattattggcctagtaatccttcagaaacaccgtaattctaaataaacctcttcccatacacctttcccccataagatgtgtcttcaacactataaagcatttgtattgtgatttgattaagtatatatttggttgttctcaatgaagagcaaatttaaatattatgtgcatttgtaaatacagtagctataaaattttccatacttctaatggcagaatagaggaggccatattaaataatactgatgaaaggcaggacactgcattgtaaataggattttctaggctcggtaggcagaaagaattatttttctttgaaggaaataactttttatcatggtaattttgaaggatgattcctatgatgtgttcaccaggggaatgtggcttttaaagaaaatcttctattggttgtaactgttcatatcttcttacttttctgtgttgacttcattattcccatggtattggccttttaaactatgtgcctctgagtctttcaatttataaattttgttatcttaataaaatattataaaaatgtc

SEQ ID NO: 191082 - DNA, 961 bp, Homo Sapiens; identical to SEQ ID NO: 183689

SEQ ID NO: 191083 - DNA, 1360 bp, Homo Sapiens; identical to SEQ ID NO: 183690
  misc_feature (1209)..(1236): n is a, c, g, or t

SEQ ID NO: 191084 - DNA, 2185 bp, Homo Sapiens; identical to SEQ ID NO: 183692

SEQ ID NO: 191085 - DNA, 672 bp, Homo Sapiens
ttgtacaaaaaagttggaatatatatatattgaaaatcaaaggaggcaaaattttgacagggaaggaagtaactgcaaaacactaggctttagtaggtacttatataaaatctagtccagttctctcatttaaaaaaatgaagacactgaagtacagacttaaatagctcagatagctaattaggaaatttcaagttggccaataatagcattctctctgacatttaaaaataatttctattcaaaatacatgcataattgattttacacctcattactggtggataatttatgtgatgtggattgctggtgtccagcatgacccataaacaggtcagaagaatgatggaatgttttagaataaactcctgcttatagtatactacacagttcaaaagatgtttaaaatgcttttgtatttactgccatgtaattgaaatatatagattattgtaacctttcaacctgaaaatcaagcagtatgagagtttagttatttgtatgtgtcactagtgtctaatgaagcttttaaaatctacaatttcttctttaaaaatatttattaatgtgaatggaatataacaattcagcttaattccccaaccttattctgtgtgtagacattgtatttccacaattttgaatggctgtgtttaacctcctaaataaatg

SEQ ID NO: 191086 - DNA, 1255 bp, Homo Sapiens
  misc_feature (361)..(381): n is a, c, g, or t
gtgttgactttgtagaaattatgttctttcatagtatcttcttctacccgttgcagacgataaattatttgtgccaattcgagaattgctgttaggctgttatcctcccttccttggggctaagaattacaagactcatggcactggcgtaaagttgttgtttatctaatcactgatgaaatattttcacacttgaaaatccccaaatgctttacaatgaatgaagtgttaatttggtgaccaggtggtagccattagccatgttgcaaaattctagacagtaaaacctgtgttttagaaacagaggggaaatttaaataatggagtcctggttagcctttcagggattagggatttgggnnnnnnnnnnnnnnnnnnnnnaatactagaatatctcagtttttataaaaggtaagtttaaaatgtttattgtgccattattttaactggcatcttgaaagaacagtaggttttctccatgataaactgattccagtaagaattttcagtacataccaagtacctggaaagttcttcagataagttaatagatccaaggagatacatgcctcagtgagataaactgacctttttactagctaaactatttagccagagcaatactctgtagaactgtgcttttctaaagtaaagattatctgtttctcaattttatgtgcataatacttttcctggtgctagctttgataggcaaaatattttgaaatgttggtcccataatgattgtgctagttcataagctttgttgttatgagtgtaatcataaaaatatttccaagcagtttttgacctttattctacatttctgggcatttgtaatatggtattctactggtatatatttttaaagtttgcgtttagattatggtaaagaaatttcaagcatatttcttctaataaagtattaagacagtgtttcagaatatcaaggcacacctccttagttgttttagattagaactctagaaacaattttgtgaacattgaaagtattttgagttaagcctaagctgattaatcacacaatacatacttttcctgcattttctttcagtgacatttgagaattgggtgacattttaaaatgtgttttataccatttagtttttgcaaacaagttctaaagttttggagaaaaagtgatgtggtcaagagttgaagtctcatatatctttagtagcactcccatgaattatttccgtgacagtaacaagtgtgtgttccatgtctgatt

SEQ ID NO: 191087 - DNA, 1286 bp, Homo Sapiens; identical to SEQ ID NO: 183695
  misc_feature (951)..(990): n is a, c, g, or t
  misc_feature (1119)..(1133): n is a, c, g, or t

SEQ ID NO: 191088 - DNA, 1435 bp, Homo Sapiens; identical to SEQ ID NO: 180062

SEQ ID NO: 191089 - DNA, 992 bp, Homo Sapiens
ttggttggggcggctcggactgagcaggactttccttatcccagttgattgtgcagaatacactgcctgtcgcttgtcttctattcaccatggcttcttctgatatccaggtgaaagaactggagaagcgtgcctcaggccaggcttttgagctgattctcagccctcggtcaaaagaatctgttccagaattccccctttcccctccaaagaagaaggatctttccctggaggaaattcagaagaaattagaagctgcagaagaaagacgcaagtcccatgaagctgaggtcttgaagcagctggctgagaaacgagagcacgagaaagaagtgcttcagaaggcaatagaagagaacaacaacttcagtaaaatggcagaagagaaactgacccacaaaatggaagctaataaagagaaccgagaggcacaaatggctgccaaactggaacgtttgcgagagaaggataagcacattgaagaagtgcggaagaacaaagaatccaaagaccctgctgacgagactgaagctgactaatttgttctgagaactgactttctccccatccccttcctaaatatccaaagactgtactggccagtgtcattttattttttccctcctgacaaatattttagaagctaatgtaggactgtataggtagatccagatccagactgtaagatgttgttttaggggctaaaggggagaaactgaaagtgttttactctttttctaaagtgttggtctttctaatgtagctatttttcttgttgcatcttttctacttcagtacacttggtgtactgggttaatggctagtactgtattggctctgtgaaaacatatttgtgaaaagagtatgtagtggcttcttttgaactgttagatgctgaatatctgttcacttttcaatcccaattctgtcccaatcttaccagatgctactggacttgaatggttaataaaactgcacagtgctgttggtgg

SEQ ID NO: 191090 - DNA, 982 bp, Homo Sapiens
ccttaaaaaagccaactttgtacaaaaaagttggctgcctgtcccttgtcttctattcaccatggcttcttctgatatccaggtgaaagaactggagaagcgtgcctcaggccaggcttttgagctgattctcagccctcggtcaaaagaatctgttccagaattccccctttcccctccaaagaagaaggatctttccctggaggaaattcagaagaaattagaagctgcagaagaaagacgcaagtcccatgaagctgaggtcttgaagcagctggctgagaaacgagagcacgagaaagaagtgcttcagaaggcaatagaagagaacaacaacttcagtaaaatggcagaagagaaactgacccacaaaatggaagctaataaagagaaccgagaggcacaaatggctgccaaactggaacgtttgcgagagaaggataagcacattgaagaagtgcggaagaacaaagaatccaaagaccctgctgacgagactgaagctgactaatttgttctgagaactgactttctccccatccccttcctaaatatccaaagactgtactggccagtgtcattttattttttccctcctgacaaatattttagaagctaatgtaggactgtataggtagatccagatccagactgtaagatgttgttttaggggctaaaggggagaaactgaaagtgttttactctttttctaaagtgttggtctttctaatgtagctatttttcttgttgcatcttttctacttcagtacacttggtgtactgggttaatggctagtactgtattggctctgtgaaaacatatttgtgaaaagagtatgtagtggcttcttttgaactgttagatgctgaatatctgttcacttttcaatcccaattctgtcccaatcttaccagatgctactggacttgaatggttaataaactgcaacagtgctgttggtggcagtgactttctttttga

SEQ ID NO: 191091 - DNA, 1827 bp, Homo Sapiens; identical to SEQ ID NO: 183698
  misc_feature (52)..(91): n is a, c, g, or t
  misc_feature (1601)..(1610): n is a, c, g, or t

SEQ ID NO: 191092 - DNA, 989 bp, Homo Sapiens
  misc_feature (84)..(104): n is a, c, g, or t
ttggaaacttgtgtattgagtcttaactgtatttcagtattttccagccttatgtgttacattattccaatgatacccaacagnnnnnnnnnnnnnnnnnnnnnaacaaaatttcacagttctgtaatgtaggcacttttattttcattgtgatttatatataaggtaatgtagggttatatttgggagtgactgcaagcatttttccatctgtgtgcaactaactgactctgttattgatcccttctcctgccctttcccaggtaatttaaattggtcatggtagatttttttcatagatttgaaaaacttttaggttgttaccaagtatgaagtataaatctggggaagaggttttatttacattttagggtgggtaagaaagccaccttgttacaaattttttaatttccaaaataatctatattaaatgagggtttctgatctgtactttgtgtttagctacctttttatatttaaaaaattaaaaatgaaaattacgttcttacaagcttaaagcttgatttgatctttgtttaaatgccaaaatgtacttaaatgagttacttagaatgccataaaattgcagtttcatgtatgtatataatcatgctcatgtatatttagttacgtataatgctttctgagtgagttttactcttaaatcatttggttaaatcatttggcttgctgtttactcccttctgtagtttttaattaaaaactttaaagataagtctacattaaacaatgatcacatctaaagctttatctttgtgtaatctaagtatatgtgagaaatcagaattggcataatttgtcttagttgatattctaggctttaaaagtcattattcctgggcttggtaagtgaatttatgagatttactgctctagaaagtatagatggccaaaggaccgttttgtattgcttcctgattacaagtctgataataccatgtgtgctaatatactctttttgttataga

SEQ ID NO: 191093 - DNA, 2380 bp, Homo Sapiens; identical to SEQ ID NO: 183700

SEQ ID NO: 191094 - DNA, 1245 bp, Homo Sapiens; identical to SEQ ID NO: 180063
  misc_feature (762)..(817): n is a, c, g, or t
  misc_feature (874)..(910): n is a, c, g, or t

SEQ ID NO: 191095 - DNA, 772 bp, Homo Sapiens; identical to SEQ ID NO: 183701
  misc_feature (108)..(121): n is a, c, g, or t

SEQ ID NO: 191096 - DNA, 1081 bp, Homo Sapiens; identical to SEQ ID NO: 183702

SEQ ID NO: 191097 - DNA, 1503 bp, Homo Sapiens; identical to SEQ ID NO: 183703
  misc_feature (272)..(321): n is a, c, g, or t

SEQ ID NO: 191098 - DNA, 1548 bp, Homo Sapiens; identical to SEQ ID NO: 183704
  misc_feature (746)..(754): n is a, c, g, or t
  misc_feature (1049)..(1063): n is a, c, g, or t

SEQ ID NO: 191099 - DNA, 1248 bp, Homo Sapiens; identical to SEQ ID NO: 183705
  misc_feature (280)..(305): n is a, c, g, or t
  misc_feature (787)..(848): n is a, c, g, or t

SEQ ID NO: 191100 - DNA, 1837 bp, Homo Sapiens; identical to SEQ ID NO: 183706
  misc_feature (1610)..(1673): n is a, c, g, or t

SEQ ID NO: 191101 - DNA, 1548 bp, Homo Sapiens; identical to SEQ ID NO: 183707
  misc_feature (512)..(520): n is a, c, g, or t
  misc_feature (912)..(973): n is a, c, g, or t
  misc_feature (1384)..(1396): n is a, c, g, or t

SEQ ID NO: 191102 - DNA, 1037 bp, Homo Sapiens
ttggggctcgctcgcgcggcagcggtggccgaggcctcttggttctgcggcacgtgacggtcgggccgcctccgcctctctctttactgcggcgcggggcaaggtgtgcgggcgggaaggggcacgggcacccccgcggtccccgggaggctagagatcatggaagggaagtggttgctgtgtatgttactggtgcttggaactgctattgttgaggctcatgatggacatgatgatgatgtgattgatattgaggatgaccttgacgatgtcattgaagaggtagaagactcaaaaccagataccactgctcctccttcatctcccaaggttacttacaaagctccagttccaacaggggaagtatattttgctgattcttttgacagaggaactctgtcagggtggattttatccaaagccaagaaagacgataccgatgatgaaattgccaaatatgatggaaagtgggaggtagaggaaatgaaggagtcaaagcttccaggtgataaaggacttgtgttgatgtctcgggccaagcatcatgccatctctgctaaactgaacaagcccttcctgtttgacaccaagcctctcattgttcagtatgaggttaatttccaaaatggaatagaatgtggtggtgcctatgtgaaactgctttctaaaacaccagaactcaacctggatcagttccatgacaagaccccttatacgattatgtttggtccagataaatgtggagaggactataaactgcacttcatcttccgacacaaaaaccccaaaacgggtatctatgaagaaaaacatgctaagaggccagatgcagatctgaagacctattttactgataagaaaacacatctttacacactaatcttgaatccagataatagttttgaaatactggttgaccaatctgtggtgaatagtggaaatctgctcaatgacatgactcctcctgtaaatccttcacgtgaaattgaggacccagaagaccggaagcccgaggattggggatgaaagaccaaaat

SEQ ID NO: 191103 - DNA, 1043 bp, Homo Sapiens; identical to SEQ ID NO: 183708
  misc_feature (958)..(983): n is a, c, g, or t

SEQ ID NO: 191104 - DNA, 1272 bp, Homo Sapiens
  misc_feature (789)..(797): n is a, c, g, or t
  misc_feature (1092)..(1106): n is a, c, g, or t
gccaactttgtacaaaaaagttggctgaatagaagcccaaattcatataaaagttgcgtttaagttgtattaaaaatagatatataagaaaaaattctttcacttgatgtttgttagaccagaaagtgtgtgtgttctgtagctcagttcccagacagctttttaggtagtggaggaggtggcttcatgtggcacttgggcatttatattccacttgggagggtcaggctgtggccttctggagcaggtggcttgttaaggaacgctagcagggcatggcacgtgagctccggaatagatgtcttcatcacttcttccactgtgtgttgacactgttttccttacctatttcctcagatccccagctttctcctctgctatgcattttcttcacagtgcagcttgcagtccgttgctgaaaatgattataagccctgcataatgttaagctttattgtgattacgtgtatgtttcttctttcttttaagcagacccatacctttccagggtcaaagtacagaatagaatacattgatacaaagtacagaaaaatactttgatttttatccatttcttttactctgtgtaaagactttagaagtctaattcacaggcaaaccaatacagaattgactgcagttgaacagactagaagtatttgtgggaggagtgacatgaagcatgagttatctgattttttttgtagctgctatatattttaagccttcatttgcaattcatgtaacagttgtgtcataaattacacaataaagcagtcctgttcaaannnnnnnnnaacgtggcttgtagaatttttaaaaaagtgatcttaggtttgttttttcatgcgggatgcagatgggtgctatcagagcctctcccacaccactatagtgtaataatgttattattactctacactgaaacgtattcagagttagatattattttagcttcagttgttctttagaggctttcaaatgtaccgatgatactgtttcttgcactgaatatataaacactccacagtgtttatattgggaagatattgggaaggaaatatatttgtaaaagatgaaggctgtatctannnnnnnnnnnnnnnaaagtttgttcacttaaattcttttgaggatgggatgtatttttcttgctgttcagtgctttttccttttcatctgttgttctgtggtcacagtgaccttagctacatagcaaactttcccaaatgtattgattacaaataaacagttgttacttagcaagacctg

SEQ ID NO: 191105 - DNA, 2017 bp, Homo Sapiens; identical to SEQ ID NO: 183709
  misc_feature (893)..(904): n is a, c, g, or t
  misc_feature (1959)..(1968): n is a, c, g, or t

SEQ ID NO: 191106 - DNA, 2356 bp, Homo Sapiens; identical to SEQ ID NO: 183710
  misc_feature (430)..(509): n is a, c, g, or t
  misc_feature (901)..(912): n is a, c, g, or t
  misc_feature (1967)..(1975): n is a, c, g, or t
  misc_feature (2271)..(2285): n is a, c, g, or t

SEQ ID NO: 191107 - DNA, 1111 bp, Homo Sapiens; identical to SEQ ID NO: 183711
  misc_feature (260)..(315): n is a, c, g, or t
  misc_feature (774)..(835): n is a, c, g, or t

SEQ ID NO: 191108 - DNA, 607 bp, Homo Sapiens
  misc_feature (233)..(247): n is a, c, g, or t
ctttgtacaaaaaagttgggatattgggctggaaatatcttcccaatataaacactgtggagtgtttatatattcagtgcaagaaacagtatcatcggtacgtttgaaagcctctaaggaacaactgaagctaaaataatatggaactcggaatatataaacactccacagtgtttatattgggaagatattgggaaggaaatatatttgtaaaagatgaaggctgtatctannnnnnnnnnnnnnnaaactggttcacttaaattcttttgaggatgggatgtatttttcttgctgttcagtgctttttccttttcatctgttgttctgtggtcacagtgaccttagctacatagcagactttcccaaatgtattgattacaaataaacagttgttacttagcaagacctgaaaatatgtctgcaggtttctccttgaagcaaatgtgtgggatcattgcatttccagaaatctgcctccttcaccctccgttgacagtatatgtcatgcctcactttcttctagctgagctttaaatcattagagcttaaattgtcagatcgttcattgcctttccagggttatttagtaaagtttgttgaaaac

SEQ ID NO: 191109 - DNA, 728 bp, Homo Sapiens
  misc_feature (79)..(93): n is a, c, g, or t
ttggaaacactccacagtgtttatattgggaagatattgggaaggaaatatatttgtaaaagatgaaggctgtatctannnnnnnnnnnnnnnaaagtttgttcacttaaattcttttgaggatgggatgtatttttcttgctgttcagtgctttttccttttcatctgttgttctgtggtcacagtgaccttagctacatagcagactttcccaaatgtattgattacaaataaacagttgttacttagcaagacctgaaaatatgtctgcaggtttctccttgaagcaaatgtgtgggatcattgcatttccagaaatctgcctccttcaccctccgttgacagtatatgtcatgcctcactttcttctagctgagctttaaatcattagagcttaaattgtcagatcgttcattgcctttccagggttatttagtaaagtttgttgaaaacaaaaacgccttttcttggttcttttttcagttattttgaaggtccagcatcctgattaaatgtctgacacattaatgaatgaccagcagcagctttcagctcttaaaaagacacttatattttgattttacatgctggttacctgttccattgttgtcaaatgcccactctccatcagatgtgttcctccattttcttatccacaaagtactcctcacttttcaatttgtcatgttactaaatggtgttacattaaagccctgtgttaagtgtc

SEQ ID NO: 191110 - DNA, 1135 bp, Homo Sapiens; identical to SEQ ID NO: 183712
  misc_feature (364)..(375): n is a, c, g, or t
  misc_feature (778)..(841): n is a, c, g, or t

SEQ ID NO: 191111 - DNA, 1048 bp, Homo Sapiens
  misc_feature (90)..(151): n is a, c, g, or t
  misc_feature (562)..(574): n is a, c, g, or t
ttgggttcctggttatcctcttctgctgttctggaaagaaacagaccagtggtatggagtataagaaaactgatgcacctcaaccggatnnnnnnnnnnnnnnnnnnnnnnnnnnnnnnnnnnnnnnnnnnnnnnnnnnnnnnnnnnnnnnagaagagaaacttgaagagaaacagaaaagtgatgctgaagaagatggtggcactgtcagtcaagaggaggaagacagaaaacctaaagcagaggaggatgaaattttgaacagatcaccaagaaacagaaagccacgaagagagtgaaacaatcttaagagcttgatctgtgatttcttctccctcctcccctgcaagagtggtcctaggagaggacctggcacaccttaggttgacattcagaaaacttcaagacatcaccatcagcaggctccagttgaacactagtctgtgtaactttaaacatctagcagtaaatacttgcagttgtgatataaaggaccctgtttctgtagaaaagaaaacatttaacataatggttgtgaaatgtaacatgaagcaaactaacnnnnnnnnnnnnnaacatctttgtttttaaaatagaatgatagaactttgccagtctttaagatcttggcttaatttaatgtattaatctgtttgtgcaaacataataccaccatttaaaaatgttagggagatgagttgcagtttttataatagattttttttaaagtttggtattgtaaaacattcacacctctgtccctcaaaattgataattacgtttaaagtgcagtcatttgtggttagaatcttgttttgtttgcttccattattgagttcctcctaaggaaattgaggagagggactgaatagaagcccaatttcatataaaagttgcgtttaagttgtattaaaaatagatatataagaaaaaattctttcacttgatgtttgttagaccagaaagtgtgtgtgttctgtagctcagttcccagacagctttttaggtagtggaggaggtggcttcatgtggcacttgggcatttata

SEQ ID NO: 191112 - DNA, 1656 bp, Homo Sapiens; identical to SEQ ID NO: 183713
  misc_feature (370)..(381): n is a, c, g, or t
  misc_feature (793)..(853): n is a, c, g, or t

SEQ ID NO: 191113 - DNA, 2425 bp, Homo Sapiens; identical to SEQ ID NO: 183715

SEQ ID NO: 191114 - DNA, 1291 bp, Homo Sapiens; identical to SEQ ID NO: 180064

SEQ ID NO: 191115 - DNA, 977 bp, Homo Sapiens
actttgtacaaaaaagttggctttacaaaagccgaaaacctcgacaatccaatccagacagtttcccttggccagtccctgttcttccatttccccccactgctcagagacggcgagaactatgttgtgcttctggactccacactccccagatcccagtatgactacatcttgcctcaagtttctttcaccgcagtgggctaccataaacacatcaccttgatttttaatcccacgaggaagctgcctgaacaggacatcgcacaaggatcctacattgccctgccattgacgctgctggttctgctggccggttacaaccatgacaagctcattcctttgctgctgcagttgacaagccggctacagggagtccgcgcgctcggccaggcagcctctgacaatagcggcccagaagatgcaaagagacaagccaagaaacagaagacaaggcggacttgaggaggaaggggacagttgcagtctcacttgggacaggccacagccaggggtccggccactacccgcccgtgggataaaagccaaaagcatgcgtcagctaacttcagcctgtgctgctgggcccgcaccccatgtcccttgtcactgtggcatcctgcacccatcctcacccctccgtagagcccctcgtgcaatgcaatgaatggaccctcctgtcactctgctgaacagaatttattttctgagtcaaatataatttattattatttttgtcaaagaagtatttaagctgtgctgtggtgtgagaatgtcattcttgatcttcagccttcgtttgcaagaagagttccagttgacgtggtgtttggttccatggcggggtaccctagggattcatctgttttcttcacttccctttgcatctgaaatcctgctggaaaccacagcaacctgtatccactattaggaggtaaaaatcaaaaaaatggcccatttcattttgtgttgtagctcaa

SEQ ID NO: 191116 - DNA, 1209 bp, Homo Sapiens; identical to SEQ ID NO: 183716

SEQ ID NO: 191117 - DNA, 1096 bp, Homo Sapiens; identical to SEQ ID NO: 183717

SEQ ID NO: 191118 - DNA, 970 bp, Homo Sapiens; identical to SEQ ID NO: 183718

SEQ ID NO: 191119 - DNA, 971 bp, Homo Sapiens; identical to SEQ ID NO: 183719

SEQ ID NO: 191120 - DNA, 1172 bp, Homo Sapiens; identical to SEQ ID NO: 183720
  misc_feature (249)..(376): n is a, c, g, or t

SEQ ID NO: 191121 - DNA, 1148 bp, Homo Sapiens; identical to SEQ ID NO: 183721

SEQ ID NO: 191122 - DNA, 1123 bp, Homo Sapiens; identical to SEQ ID NO: 180066

SEQ ID NO: 191123 - DNA, 1217 bp, Homo Sapiens; identical to SEQ ID NO: 183724
  misc_feature (889)..(922): n is a, c, g, or t

SEQ ID NO: 191124 - DNA, 1338 bp, Homo Sapiens; identical to SEQ ID NO: 183725
  misc_feature (950)..(983): n is a, c, g, or t

SEQ ID NO: 191125 - DNA, 874 bp, Homo Sapiens
  misc_feature (212)..(245): n is a, c, g, or t
ttggctcaccaacacccaatatgactgctaaaagaaccaacccaggacagagccacaatcttcctctatttcattgtaatttatatatttcacttgtattcatttgtaaaactttgtattagtgtaacatactccccacagtctacttttacaaacgcctgtaaagactggcatcttcacaggatgtcagtgtttaaatttagtaaacttcnnnnnnnnnnnnnnnnnnnnnnnnnnnnnnnnnnaaggaatgaggaaacaaaccaccctctgggggtagtttacagactgagtgacagtactcagtatatctgagataaactctataatgttttggataaaaataacattccaatcactattgtatatatgtgcatgtattttttaaattaaagatgtctagttgctttttataagaccaagaaggagaaaatccgacaacctggaaagatttttgttttcactgcttgtatgatgtttcccattcatacacctataaatctctaacaagaggccctttgaactgccttgtgttctgtgagaaacaaatatttacttagagtggaaggactgattgagaatgttccaatccaaatgaatgcatcacaacttacaatgctgctcattgttgtgagtactatgagattcaaatttttctaacatatggaaagccttttgtcctccaaagatgagtactagggatcatgtgtttaaaaaaagaaaggctacgatgactgggcaagaagaaagatgggaaactgaataaagcagttgatcagcatcattggaacatggggacgagtgacggcaggaggaccacgaggaaataccctcaaaactaacttgtttacaacaaaataaagtattcactacc

SEQ ID NO: 191126 - DNA, 1687 bp, Homo Sapiens; identical to SEQ ID NO: 183726
  misc_feature (1231)..(1264): n is a, c, g, or t

SEQ ID NO: 191127 - DNA, 2016 bp, Homo Sapiens; identical to SEQ ID NO: 183729

SEQ ID NO: 191128 - DNA, 962 bp, Homo Sapiens
ttgggaaggttctgggcggggctggactgttctaagtgagttcgggtgggggagcttcacgaggggaggctgctctgtgaaggaaccgcctttctctccgcgtgtctcacccttttctccccatatctgtttggacatgagctgagggcacggtcgcgggcggtcagccctgttcgcagctacggcgaggaggggcgcgattgctccttgttgccgctccgcttagtggccgcgtccattccgcgcggtgtcccgattttaggggtagggagaagtgtcagcttcaggcatcgcgaggcgtggcggccccatggccccgctgggaggcgccccgcggctggtactgctgttcagcggcaagaggaaatccgggaaggacttcgtgaccgaggcgctgcagagcagacttggagctgatgtctgtgctgtcctccggctctctggtccactcaaggaacagtatgctcaggagcatggcttgaacttccagagactcctggacaccagcacctacaaggaggcctttcggaaggacatgatccgctggggagaggagaaacgccaggctgacccaggcttcttttgcaggaagattgtggagggcatctcccagcccatctggctggtgagtgacacacggagagtgtctgacatccagtggtttcgggaggcctatggggccgtgacgcagacggtccgcgttgtagcgttggagcagagccgacagcagcggggctgggtgttcacgccaggggtggacgatgctgagtcagaatgtggcctggacaacttcggggactttgactgggtcatcgagaaccatggagttgaacagcgcctggaggagcagttggagaacctgatagaatttatccgctccagactttagtcactaggttctaggagtgagctggggcctgctgaggtgggggtggggctgactctgcaaaatgggggtgtcc

SEQ ID NO: 191129 - DNA, 1658 bp, Homo Sapiens; identical to SEQ ID NO: 183731
  misc_feature (1431)..(1439): n is a, c, g, or t

SEQ ID NO: 191130 - DNA, 689 bp, Homo Sapiens
  misc_feature (98)..(106): n is a, c, g, or t
ttggcttgttggatctctgcagggcttgtgaccaatgaagtcatatttgttgatggttgacaaagcttgcttcactccatcagagaatgactatcaannnnnnnnnaactgtcctatcacgtcctctcctgtcacccattttgaagagtggcagaacttgaagttcaacttcctctgtaaatatccaagtataaagcccaggaacttctagaataacccagatgcgctttaattttttttaatatgttttgatcacagaacttctagaataacccagatgctctttcatattcttttaatacatcttgatcacagctgggggaaaaaaagctttttaattctataccttcctagtagataagtgaagagcagggaaagagacctttaaatattttgctataaaaaaatttgtgataagtttctatcaaaatggggagattgcagaaaaggcttcccttggctcccaaggaggtgtagcaggtgtgagcaatattagtgccatgtgcctttcacacagggtttgcatttatcagtctgttttccgatgatgtgtacatgaaagagtacaccatgtgaagagaagagagaatgattgaaaatgttttagtatagaactcttcttgcagtgggttgctattttctagattttactttttagggaacaaaataaaatcctttgttaaaactgg

SEQ ID NO: 191131 - DNA, 1159 bp, Homo Sapiens
  misc_feature (1020)..(1028): n is a, c, g, or t
actttgtacaaaaaagttgggtggctcccaactttgaggccaataccaccgtcggccgcatccgtttccacgactttctgggagactcatggggcattctcttctcccaccctcgggactttaccccagtgtgcaccacagagcttggcagagctgcaaagctggcaccagaatttgccaagaggaatgttaagttgattgccctttcaatagacagtgttgaggaccatcttgcctggagcaaggatatcaatgcttacaattgtgaagagcccacagaaaagttaccttttcccatcatcgatgataggaatcgggagcttgccatcctgttgggcatgctggatccagcagagaaggatgaaaagggcatgcctgtgacagctcgtgtggtgtttgtttttggtcctgataagaagctgaagctgtctatcctctacccagctaccactggcaggaactttgatgagattctcagggtagtcatctctctccagctgacagcagaaaaaagggttgccaccccagttgattggaaggatggggatagtgtgatggtccttccaaccatccctgaagaagaagccaaaaaacttttcccgaaaggagtcttcaccaaagagctcccatctggcaagaaatacctccgctacacaccccagccttaagtctcttggagaagctggtgctgtgagccagaggatgtcagctgccaattgtgttttcctgcagcaattccataaacacatcctggtgtcatcacagccaaggtttttaggttgctataccaatggcttattaaatgaaaatggcactaaaagtttcttgagattctttatactctctgccttcagcaatcaattccattcatacatcagcactctgctggttctgtttgaaatatgttctgtatttaaaactcaaatcttgttggatctctgcagggcttgtgaccaatgaagtcatatttgttgatggttgacaaagcttgcttcactccatcagagaatgactatcaannnnnnnnnaactgtcctatcacgtccctctcctgtcacccattttgaagagtggcaaacttgaagttcaacttcctctgtaatatccaagtataaagcccagaaacttctagaaaaaccccgatgcgcttaattttttt

SEQ ID NO: 191132 - DNA, 1266 bp, Homo Sapiens
  misc_feature (842)..(862): n is a, c, g, or t
tgtttcaccaccttcttgatgtcatcatatttggcaggtttttatagacggcaggtcaggtccaccactgacacgttggcagtggggacacggaaggccatgccagtgagcttcccgttcagctcagggatgaccttgtccacatccttggcagcgccagtagaggcagggatgatgttttggagaaccccgcggccatcacgccacagtttcccggaggggccatccacagttttctgggtggcagtgatggcatggactgtggtctgcaaaaggagtgaggccctgcagcgtactccccacatcacccctttacctccctccccaccttgaaaggaaattatgggaaagccagtccccagaacccccaaccccagggttgcacgcagccccggcagggaggagccagtcttggatgagaaaggtgggagcctcagtcccattccccagctctcataccatgagtccttccacgataccaaagttgtcatggatgacctggccaggggtgctaagcagttggtggtgcaggaggcattgctgatgatcttgaggctgttgtcatacttctcatggttcacacccatgacgaacatgggggcatcagcagagggggcagagatgatgacccttttggctcccccctgcaaatgagcctacagcagagaagcagacagttatgaacccgggtcctgcctttgcagggctgagtcagcttcccctcccgcgggccctcctgcactcaccccagccttctccatggtggtgaagacgccagtggactccacgacgtactcagcgccagcatcgccccacttgattttggagggatctcgcctatnnnnnnnnnnnnnnnnnnnnnacaggaccatattgagggacacaaggttaccatatacccaagggagccacaccatcctagttgcctccccaaagcacatttcttccattctgtcttccactcactcctggaagatggtgatgggatttccattgatgacaagcttcccgttctcagccttgacggtgccatggaatttgccatgggtggaatcatattggaacatgtaaaccatgtagttgaggtcaatgaaggggtcattgatggcaacaatatccactttaccagagttaaaagcagccctggtgaccaggcgcccaatacgaccaaatccgttgactccgaccttcaccttccccatggtgtctgagcgatgtggctcggctggcgacgcaaaagaagatgcggctgactgtcgaacccaa

SEQ ID NO: 191133 - DNA, 967 bp, Homo Sapiens
acaaattgatgagcaatgcttttcctataaaagccaactttgtacaaaaaagttggcttttgcgtccccagccgagccacatcgctcagacaccatggggaaggtgaaggtcggagtcaacggatttggtcgtattgggcgcctggtcaccagggctgcttttaactctggtaaagtggatattgttgccatcaatgaccccttcattgacctcaactacatggtttacatgttccaatatgattccacccatggcaaattccatggcaccgtcaaggctgagaacgggaagcttgtcatcaatggaaatcccatcaccatcttccaggagcgagatccctccaaaatcaagtggggcgatgctggcgctgagtacgtcgtggagtccactggcgtcttcaccaccatggagaaggctggggctcatttgcaggggggagccaaaagggtcatcatctctgccccctctgctgatgcccccatgttcgtcatgggtgtgaaccatgagaagtatgacaacagcctcaagatcatcagcaatgcctcctgcaccaccaactgcttagcacccctggccaaggtcatccatgacaactttggtatcgtggaaggactcatgaccacagtccatgccatcactgccacccagaagactgtggatggcccctccgggaaactgtggcgtgatggccgcggggctctccagaacatcatccctgcctctactggcgctgccaaggctgtgggcaaggtcatccctgagctgaacgggaagctcactggcatggccttccgtgtccccactgccaacgtgtcagtggtggacctgacctgccgtctagaaaaacctgccaaatatgatgacatcaaaaagtggtgaagcaggcgtcggagggccccctcaagggcatcctgggctacactgagcaccaggtggtctcctctgacttcaacagcgacacccact

SEQ ID NO: 191134 - DNA, 767 bp, Homo Sapiens
actttgtacaaaaaagttgggaccccttcatctcgacctcaactacatggtttacatgttccaatatgattccacccatggcaaattccatggcaccgtcaaggctgagaacgggaagcttgtcatcaatggaaatcccatcaccatcttccaggagcgagatccctccaaaatcaagtggggcgatgctggcgctgagtacgtcgtggagtccactggcgtcttcaccaccatggagaaggctggggctcatttgcaggggggagccaaaagggtcatcatctctgccccctctgctgatgcccccatgttcgtcatgggtgtgaaccatgcacaaaaatgacaacagcctcaagatcatcagcaatgcctcctgcaccaccaactgcttagcacccctggccaaggtcatccatgacaactttggtatcgtggaaggactcatgaccacagtccatgccatcactgccacccagaagactgtggatggcccctccgggaaactgtggcgtgatggccgcggggctctccagaacatcatccctgcctctactggcgctgccaaggctgtgggcaaggtcatccctgagctgaacgggaagctcactggcatggccttccgtgtccccactgccaacgtgtcagtggtggacctgacctgccgtctagaaaaacctgccaaatatgatgacatcaagaaggtggtgaagcaacgtcggagggccccctcaagggcatccctgggctacactgagcaccaggtggtc

SEQ ID NO: 191135 - DNA, 980 bp, Homo Sapiens
cagagtactctccaatgtgttatagttatccttaaagctcttcaattcaaggaagtgcttggcacgtttactcttctgactggaggggaggtatgtcacctggatggttgttggggagacctcaggggactgagttaggtctttggctgctgactggtgatgtcgctgagagctcccaattcgtgctttaaccgcagtggccagctcactcagggcctcctgatagcgtaggtactcattctggccaaagacccctgtcccatagcgggctgtttcatagccatccaaaagggtatcaatgagtgctttgcgtacacccttgaaaggcgtactagtgtttcgcagatccagcaggtaggagcggaaattcttgcccattaaggaacggggatgccggccttcagaatgaaatgggatctcagaggtacgaatggcatccagagctttcatcctatacagatagttgtagcaactttgatttccctgggtttccagttgtagtagtctagcatcatcatctgcaaggagctggggctcatacttgatatcctgaaccctggagagtcgaatatcaatctcctctttcaagtccttgggggcattgtgtcccacagggacatgaggtccccttcgagatttcattgcaaagcgcatgatttgcctcttcacaaaaataaatagcagtacaaacaccaggctcccgtaggccatcaccagcacgacattcaccccggagagccagttactgccggacgccatggcctccctacctcgcgcagaattgttcgggtttaccccgctgtcctggctggtcagcccaggctccgccgaagcgacggcgcctgggtcccctggagctccccggccatttccttacgggggaagaccaagccagacccggcctgaaaacatggcggacaggcaggagagctgggaaaggagaacgacgccttccagcttccccctgacacgtgacccaa

SEQ ID NO: 191136 - DNA, 926 bp, Homo Sapiens; identical to SEQ ID NO: 183734

SEQ ID NO: 191137 - DNA, 2106 bp, Homo Sapiens; identical to SEQ ID NO: 183735
  misc_feature (214)..(222): n is a, c, g, or t
  misc_feature (439)..(447): n is a, c, g, or t

SEQ ID NO: 191138 - DNA, 1396 bp, Homo Sapiens; identical to SEQ ID NO: 183736

SEQ ID NO: 191139 - DNA, 823 bp, Homo Sapiens; identical to SEQ ID NO: 183738

SEQ ID NO: 191140 - DNA, 1122 bp, Homo Sapiens
aacaacagacagtgaagaatgtcaaatataagctacaggctaatctctgtggaagcactggattccgaaggaaagcagcagcggacaccctcatctgtatacactaagctctctagaagacgctggaataaaatgcctttaacgtccttggtgacaggacttttatggagacacacaggtatccagccgtggaaacactggacttcaagaaactggtcctttcacatcattttgcgagggtctctcacgtgcttcagtggccattacagttccctattccaccccatttctcagcaacttcctgaaagctcatttaaaaagggaatactgccttttttttctttaaataaaagccaggacagtgaatgaggctgaagagttgacttacacaacataaccggaacgacagcctgcatataagtctattattgaaaatcgacatttcccatttattatatattgagagcatgtgtcagacaatacaatggaagtggggtttctgattaatttaaaaaagaaaactacatcaaatatctgcaatagatcattttttttcatttaaggtttatatatcatatattgttatattaccatttttcacccatttaaaagaatggaaattgcagttctacagtagtactttatatagtcctacagtccaggaggtcaggatgtcagacgcagcccctggcagcggctgctgcttggcagtcgatcggaatcgtgggatcttccggcccacctgcatccctccgccagggctgccgcgctccctgccacctaaatctgcatctgctccaggtatttgtaggtggggttctcatagccatggttctgcatcttgttcaggtgacgctcttctggggtgagcattggatcaacctccacgatcccgtggctgatggtgccatactgcctcttcctcagcatcaccaggctgatgacgatgaccgtggcaatggccactgcgatgaccagcaggccaatgagagcactgctactcagactgaagtcctcccgcagtgggcccacggattcccgctcttcctcgaggcctccaactctctcggcattgaaaatcatttccttaacgatccagagtcccaacttttttgtacaaag

SEQ ID NO: 191141 - DNA, 1050 bp, Homo Sapiens; identical to SEQ ID NO: 183739

SEQ ID NO: 191142 - DNA, 1344 bp, Homo Sapiens; identical to SEQ ID NO: 183740
  misc_feature (1102)..(1144): n is a, c, g, or t

SEQ ID NO: 191143 - DNA, 1603 bp, Homo Sapiens; identical to SEQ ID NO: 183741
  misc_feature (70)..(120): n is a, c, g, or t

SEQ ID NO: 191144 - DNA, 1332 bp, Homo Sapiens
atgcttttttcctaattgaaaaactttgtacaaaaaagttgggaggttgatccaatgctcaccccagaagagcgtcacctgaacaagatgcagaaccatggctatgagaaccccacctacaaatacctggagcagatgcagatttaggtggcagggagcgcggcagccctggcggagggatgcaggtgggccggaagatcccacgattccgatcgactgccaagcagcagccgctgccaggggctgcgtctgacatcctgacctcctggactgtaggactatataaagtactactgtagaactgcaatttccattcttttaaatgggtgaaaaatggtaatataacaatatatgatatataaaccttaaatgaaaaaaatgatctattgcagatatttgatgtagttttcttttttaaattaatcagaaaccccacttccattgtattgtctgacacatgctctcaatatataataaatgggaaatgtcgattttcaataatagacttatatgcaggctgtcgttccggttatgttgtgtaagtcaactcttcagcctcattcactgtcctggcttttatttaaagaaaaaaaaggcagtattccctttttaaatgagctttcaggaagttgctgagaaatggggtggaatagggaactgtaatggccactgaagcacgtgagagaccctcgcaaaatgatgtgaaaggaccagtttcttgaagtccagtgtttccacggctggatacctgtgtgtctccataaaagtcctgtcaccaaggacgttaaaggcattttattccagcgtcttctagagagcttagtgtatacagatgagggtgtccgctgctgctttccttcggaatccagtgcttccacagagattagcctgtagcttatatttgacattcttcactgtctgttgtttacctaccgtagctttttaccgttcacttccccttccaactatgtccagatgtgcaggctcctcctctctggactttctccaaaggcactgaccctcggcctctactttgtcccctcacctccaccccctcctgtcaccggccttgtgacattcactcagagaagaccacaccaaggaggcggccgctggcccaggagagaacacggggaggtttgtttgtgtgaaaggaaagtagtccaggctgtccctgaaactgagtctgtggacactgtggaaagctttgaacaattgtgttttcgtcacaggagtctttgtaatgcttgtacagttgatgtcgatgctcactgcttctgctttttctttctttttattttaaatctgaaggttctggtaacctgtggtgta

SEQ ID NO: 191145 - DNA, 919 bp, Homo Sapiens
  misc_feature (706)..(757): n is a, c, g, or t
ttggctaagcgaggagtccgagtgtgtgagcttgagagccgcgcgctagagcgacccggcgagggatggcggccaccgggaccgcggccgccgcagccacgggcaggctcctgcttctgctgctggtggggctcacggcgcctgccttggcgctggccggctacatcgaggctcttgcagccaatgccggaacaggatttgctgttgctgagcctcaaatcgcaatgttttgtgggaagttaaatatgcatgtgaacattcagactgggaaatgggaacctgatccaacaggcaccaagagctgctttgaaacaaaagaagaagttcttcagtactgtcaggagatgtatccagagctacagatcacaaatgtgatggaggcaaaccagcgggttagtattgacaactggtgccggagggacaaaaagcaatgcaagagtcgctttgttacacctttcaagtgtctcgtgggtgaatttgtaagtgatgtcctgctagttccagaaaagtgccagtttttccacaaagagcggatggaggtgtgtgagaatcaccagcactggcacacggtagtcaaagaggcatgtctgactcagggaatgaccttatatagctacggcatgctgctcccatgtggggtagaccagttccatggcactgaatatgtgtgctgccctcagacaaagattattggatctgtgtcaannnnnnnnnnnnnnnnnnnnnnnnnnnnnnnnnnnnnnnnnnnnnnnnnnnnagactatgatgtttataaaagtgaatttcctactgaagcagatctggaagacttcacagaagcagctgtggatgagatgatgaggatgaggaagaacgggaggaagtggtggaggaccgagattactactatgacaccttcaaaggagatgactacaatgag

SEQ ID NO: 191146 - DNA, 941 bp, Homo Sapiens
  misc_feature (728)..(770): n is a, c, g, or t
ttgggatgcttctgggtcgcggggtgctaagcgaggagtccgagtgtgtgagcttgagagccgcgcgctagagcgacccggcgagggatggcggccaccgggaccgcggccgccgcagccacgggcaggctcctgcttctgctgctggtggggctcacggcgcctgccttggcgctggccggctacatcgaggctcttgcagccaatgccggaacaggatttgctgttgctgagcctcaaatcgcaatgttttgtgggaagttaaatatgcatgtgaacattcagactgggaaatgggaacctgatccaacaggcaccaagagctgctttgaaacaaaagaagaagttcttcagtactgtcaggagatgtatccagagctacagatcacaaatgtgatggaggcaaaccagcgggttagtattgacaactggtgccggagggacaaaaagcaatgcaagagtcgctttgttacacctttcaagtgtctcgtgggtgaatttgtaagtgatgtcctgctagttccagaaaagtgccagtttttccacaaagagcggatggaggtgtgtgagaatcaccagcactggcacacggtagtcaaagaggcatgtctgactcagggaatgaccttatatagctacggcatgctgctcccatgtggggtagaccagttccatggcactgaatatgtgtgctgccctcagacaaagattattggatctgtgtcaannnnnnnnnnnnnnnnnnnnnnnnnnnnnnnnnnnnnnnnnnntgaagaggaagactatgatgtttataaaagtgaatttcctactgaagcagatctggaagacttcacagaagcagctgtggatgatgatgatgaggatgaggaagacgggaggaagtggtggaggaccgagattactactatgacaccttcaaaggagatgactacaatgag

SEQ ID NO: 191147 - DNA, 973 bp, Homo Sapiens
ctttgtacaaaaaagttggggctaggttaagaccctaatagaaatgttttttctaatctctggtgagtctggaagtgtcacattcacagtccacccttgggagtggcttggtggagctggggacaaggttttgtttactacatagtgcacatgataaatggccttaaactgtgattctttctggtaggataagttataataaactgaccctaaagaatgcaatggcttttaaactgcagttactgtgttcttaatgaagcaatacccaaagctctgttcttttggagcacttgaggggagcttgaatgaaaggtgcagataagagcagtaccttgatcttatgctttctgagtgtcctgccttgttgccatctgcatggatgagtgaatgcttctatgcacgaggagactcaagccaactcagagtctgctttttccaacgctcttcccaggtttcttttgcaaagcttggtcatttggcccaggtcttcctggaaagtggagtacatgtcactgactagggtggcgtggtgtctttacccttaacattaagtcttgttacctcagtgatgtgaagccaatggttggaattataaaaagcatccttgctggttcttcacaggacactggaacccaccctgtcaattcagctagcatgtccacacagtcttgatgatccctctctgtaacaggcagctaacattaagagaagggggaaagagaagaagagagcaatagcttatgggagagctgagatcttacttcgttgacccatatttttcccctgaccaagttacctgtaaactggaatttgcaaggggatgctgtgatgataacccctttctattgctgtaatgttcatataacctgggaaactgagagaaggggaagtgtaaataaaagcttaaacattttataatagtgttaaaatgtcactctctcttacccggtttccctttttgcctgaatgagaa

SEQ ID NO: 191148 - DNA, 2217 bp, Homo Sapiens; identical to SEQ ID NO: 180071
  misc_feature (318)..(381): n is a, c, g, or t

SEQ ID NO: 191149 - DNA, 775 bp, Homo Sapiens; identical to SEQ ID NO: 183744

SEQ ID NO: 191150 - DNA, 873 bp, Homo Sapiens
  misc_feature (122)..(139): n is a, c, g, or t
  misc_feature (152)..(205): n is a, c, g, or t
ttggattctgtgtaactagttaaatctagaagcttcatcgggttcaggtgttttgtttgcaagaatacttgataggtgatgttgcgtactgccatcaggaagtacataatgtctggttgtcnnnnnnnnnnnnnnnnnngagacagaatctnnnnnnnnnnnnnnnnnnnnnnnnnnnnnnnnnnnnnnnnnnnnnnnnnnnnnnttgttttagcgctgggtttcccaaggtgggagagacagacccagcctggagctggcccctggcctgtgtgctgacttcttggggtcctcaaaccactgtatttttctgttgagcctgtacttggggagagatcagtagcatttgaggaagtaagagaaaagaatcatggtacctcagggtttctttccctttactcgctggcagccattgtctgtgggcacctcatgtttttccacactctactgggccgtggaggtaacgatcacccaggccagtctcctctgcctgggatgcgccctctgagaggaggcctagcagggcaggctccctctgggcatccctggatgcagcctctggacacatgcctcctttaaagtgtccgggtgcagctcaggttgagtggaggtagaaaggagaaacagacatgtttaccacgcgttttccaaagctcctgatctttcccaagattgtaactgaaaactgctgtctcttgttttgttcgttttgggggtggtggtgctggctgggccatgctttgtgaagtgatgtgtgtctctgatttaacggattcactgttttctctgctaattgagagagcgttatttacattatttatttgttttgacacaagtgctttcagtgttttatcctagctaatggcttctaaa

SEQ ID NO: 191151 - DNA, 791 bp, Homo Sapiens
gcccactttgtacaaaaaagttgggttttaatggcctttgtgtaaattttaatggcttttccattgtttttgcttctcttaaaaagtttaagaagaatatgacctcattaaatgtgctgttttatttggaccagtcacacaaaatgtctctctagagttgactttaaagttgtttacagaaatttaaactcaattccagagattgaagttgtccaaacagctcatgggcttagtgtccaaacccctgcccagccttccctttccaagttggtgccacctccaggtagccattggtggttttcctattactgatgtggctgtggaatgataaggtcctagaggggccctggcatttcaggaagcggacctggtattccctgacaaacattgcttaggaaagagggccggagaataagaagccagcacctcatcagtcagccctgcaatgtgagacttccgtagctgttgagagtcactgcaggtgttctttcatcccgtctgattttaacccatggttgagacgttccaagttagatctgctgctcttaggtgtggggctgtccacattagggaacttgcctcaaaaacagtccacagtggcaataccggacttctgttcaagctttttaaagtgctgagccttacaaacccctgaaggaaggtgaccctttaagagaggatcatctttttttatatttattttcaccaaatagggtgatgagggttggtttttgttccctcaacccatttgggtaaaataacggatctaattagaaactgttttaaggagg

SEQ ID NO: 191152 - DNA, 1092 bp, Homo Sapiens
ttgtacaaaaaagttggctttagaatatcccattaatatttaagtcctgtctttacatccttttggaaaacttgtattaccatgagtttggaaaaaggacaacgaaaggcttttcatgtaaagataagatctttagctatctctaaccctgtccttttttcactgcattttttctagttttgcttcattgcttatcattaggatagggtaagtgaagtttgctatgctgctagcatcctaagatgatacctttgttgaaagaattgtgaatagcatgattcatttctagcagaggctgagtttaggacagcagcttccattgagaagtctttctgtgtcgtgaatagcattttaatgacctcttggctcacataagcaaacaacatagggacgtatctgctatgaaaatccacaaatttttcagatagtgccctaaaaacaattttatatgcctcactggttgttattcttaggttattcccacacttgactttatcattgtttactactagtaaaaagcagcattgccaaataatccctaattttccactaaaaatataatgaaatgatgttaagctttttgaaaagtttaggttaaacctactgttgttagattaatgtatttgttgcttccctttatctggaatgtggcattagcttttttattttaaccctctttaattcttattcaattccatgacttaaggttggagagctaaacactgggatttttggataacagactgacagttttgcataattataatcggcattgtacatagaaaggatatggctaccttttgttaaatctgcactttctaaatatcaaaaaagggaaatgaagtataaatcaatttttgtataatctgtttgaaacatgagttttatttgcttaatattagggctttgccccttttctgtaagtctcttgggatcctgtgtagaagctgttctcattaaacaccaaacagttaagtccattctctggtactagctacaaattcggtttcatattctacttaacaatttaaataaactgaaatatttctagatggtctacttctgttcatataaaaacaaaacttgatttcc

SEQ ID NO: 191153 - DNA, 2904 bp, Homo Sapiens; identical to SEQ ID NO: 183747

SEQ ID NO: 191154 - DNA, 1595 bp, Homo Sapiens
actttgtacaaaaaagttggctggtctgctcacacttgctggcttgcgcatcaggactggctttatctcctgactcacggtgcaaaggtgcactctgcgaacgttaagtccgtccccagcgcttggaatcctacggcccccacagccggatcccctcagccttccaggtcctcaactcccgcggacgctgaacaatggcctccatggggctacaggtaatgggcatcgcgctggccgtcctgggctggctggccgtcatgctgtgctgcgcgctgcccatgtggcgcgtgacggccttcatcggcagcaacattgtcacctcgcagaccatctgggagggcctatggatgaactgcgtggtgcagagcaccggccagatgcagtgcaaggtgtacgactcgctgctggcactgccgcaggacctgcaggcggcccgcgccctcgtcatcatcagcatcatcgtggctgctctgggcgtgctgctgtccgtggtggggggcaagtgtaccaactgcctggaggatgaaagcgccaaggccaagaccatgatcgtggcgggcgtggtgttcctgttggccggccttatggtgatagtgccggtgtcctggacggcccacaacatcatccaagacttctacaatccgctggtggcctccgggcagaagcgggagatgggtgcctcgctctacgtcggctgggccgcctccggcctgctgctccttggcggggggctgctttgctgcaactgtccaccccgcacagacaagccttactccgccaagtattctgctgcccgctctgctgctgccagcaactacgtgtaaggtgccacggctccactctgttcctctctgctttgttcttccctggactgagctcagcgcaggctgtgaccccaggagggccctgccacgggccactggctgctggggactggggactgggcagagactgagccaggcaggaaggcagcagccttcagcctctctggcccactcggacaacttcccaaggccgcctcctgctagcaagaacagagtccaccctcctctggatattggggagggacggaagtgacagggtgtggtggtggagtggggagctggcttctgctggccaggatggcttaaccctgactttgggatctgcctgcatcggtgttggccactgtccccatttacattttccccactctgtctgcctgcatctcctctgttgcgggtaggccttgatatcacctctgggactgtgccttgctcaccgaaacccgcgcccaggagtatggctgaggccttgcccacccacctgcctgggaagtgcagagtggatggacgggtttagaggggaggggcgaaggtgctgtaaacaggtttgggcagtggtgggggagggggccagagaggcggctcagttgcccagctctgtggcctcggactctctgcctcacccgcttcagcccagggcccctggagactgatcccctctgagtcctctgccccttccaaggacactaaatgagcctgggagggtgggcagggaggaggggacagcttcacctttggaagtcctggggtttttccttcttccttctttgt

SEQ ID NO: 191155 - DNA, 945 bp, Homo Sapiens
ttggtggcagctgtcggctggaaggaactggtctgctcacacttgctggcttgcgcatcaggactggctttatctcctgactcacggtgcaaaggtgcactctgcgaacgttaagtccgtccccagcgcttggaatcctacggcccccacagccggatcccctcagccttccaggtcctcaactcccgcggacgctgaacaatggcctccatggggctacaggtaatgggcatcgcgctggccgtcctgggctggctggccgtcatgctgtgctgcgcgctgcccatgtggcgcgtgacggccttcatcggcagcaacattgtcacctcgcagaccatctgggagggcctatggatgaactgcgtggtgcagagcaccggccagatgcagtgcaaggtgtacgactcgctgctggcactgccgcaggacctgcaggcggcccgcgccctcgtcatcatcagcatcatcgtggctgctctgggcgtgctgctgtccgtggtggggggcaagtgtaccaactgcctggaggatgaaagcgccaaggccaagaccatgatcgtggcgggcgtggtgttcctgttggccggccttatggtgatagtgccggtgtcctggacggcccacaacatcatccaagacttctacaatccgctggtggcctccgggcagaagcgggagatgggtgcctcgctctacgtcggctgggccgcctccggcctgctgctccttggcggggggctgctttgctgcaactgtccaccccgcacagacaagccttactccgccaagtattctgctgcccgctctgctgctgccagcaactacgtgtaagtgccacggctccactctgttcctctctgctttgttcttccctggactgagctcaacgcaggctgtgaccccaggagggccctgccacgggccactggctgctggggactgggg

SEQ ID NO: 191156 - DNA, 1035 bp, Homo Sapiens; identical to SEQ ID NO: 180074

SEQ ID NO: 191157 - DNA, 862 bp, Homo Sapiens
tttgtacaaaaaagttggccacagcctggccctggaccatgatttgcctgggaatagctgcccctgtccaggtccagccccagccaagacctgcatcatggaggcctccacagacttcctaccaggcctgaacttcagcaactgcagccgacgggccctggagaaagccctcctggatggaatgggcagctgcctcttcgaacggctgcctagcctaccccctatggctgctttctgcggaaatatgtttgtggagccgggcgagcagtgtgactgtggcttcctggatgactgcgtcgatccctgctgtgattctttgacctgccagctgaggccaggtgcacagtgtgcatctgacggaccctgttgtcaaaattgccagctgcgcccgtctggctggcagtgtcgtcctaccagaggggattgtgacttgcctgaattctgcccaggagacagctcccagtgtccccctgatgtcagcctaggggatggcgagccctgcgctggcgggcaagctgtgtgcatgcacgggcgttgtgcctcctatgcccagcagtgccagtcactttggggacctggagcccagcccgctgcgccactttgcctccagaccgctaatactcggggaaatgcttttgggagctgtgggcgcaaccccagtggcagttatgtgtcctgcacccctagagatgccatttgtgggcagctccagtgccagacaggtaggacccagcctctgctgggctccatccgggatctactctgggagacaataaatgtgaatgggactgaactgaactgcagctgggtgcacctgggacctgggcagtgatgtgggccaacccctcctgactctgcctgg

SEQ ID NO: 191158 - DNA, 504 bp, Homo Sapiens
tttgtacaaaaaagttggcccctagagatgccatttgaagggcagctccagtgccagacaggtaggacccagcctctgctgggctccatccgggatctactctgggagacaatagatgtgaatgggactgagctgaactgcagctgggtgcacctggacctgggcagtgatgtggcccagcccctcctgactctgcctggcacagcctgtggccctggcctggtgtgtatagaccatcgatgccagcgtgtggatctcctgggggcacaggaatgtcgaagcaaatgccatggacatggggtctgtgacagcaacaggcactgctactgtgaggagggctgggcaccccctgactgcaccactcagctcaaagcaaccagctccctgaccacagggctgctcctcagcctcctggtcttattggtcctggtgatgcttggtgccagctactggtaccgtgcccgcctgcaccagcgactctgccagctcaagggacccacctgc

SEQ ID NO: 191159 - DNA, 956 bp, Homo Sapiens
gagcaatgcttttcctataatagccaactttgtacaaaaaagttggcttgcaagatggcgggtgaaaaagttgagaagccagatactaaagagaagaaacccgaagccaagaaggttgatgctggtggcaaggtgaaaaagggtaacctcaaagctaaaaagcccaagaaggggaagccccattgcagccgcaaccctgtccttgtcagaggaattggcaggtattcccgatctgccatgtattccagaaaggccatgtacaagaggaagtactcagccgctaaatccaaggttgaaaagaaaaagaaggagaaggttctcgcaactgttacaaaaccagttggtggtgacaagaacggcggtacccgggtggttaaacttcgcaaaatgcctagatattatcctactgaagatgtgcctcgaaagctgttgagccacggcaaaaaacccttcagtcagcacgtgagaaaactgcgagccagcattacccccgggaccattctgatcatcctcactggacgccacaggggcaagagggtggttttcctgaagcagctggctagtggcttattacttgtgactggacctctggtcctcaatcgagttcctctacgaagaacacaccagaaatttgtcattgccacttcaaccaaaatcgatatcagcaatgtaaaaatcccaaaacatcttactgatgcttacttcaagaagaagaagctgcggaagcccagacaccaggaaggtgagatcttcgacacagaaaaagagaaatatgagattacggagcagcgcaagattgatcagaaagctgtggactcacaaattttaccaaaaatcaaagctattcctcagctccagggctacctgcgatctgtgtttgctctgacgaatggaatttatcctcacaaattggtgttctaaatgtcttaagaacctaattaaatagctgactacaa

SEQ ID NO: 191160 - DNA, 1353 bp, Homo Sapiens
  misc_feature (790)..(798): n is a, c, g, or t
  misc_feature (1234)..(1243): n is a, c, g, or t
ataaaagccaactttgtacaaaaaagttggccctgtccttgtcagaggaattggcaggtattcccgatctgccatgtattccagaaaggccatgtacaagaggaagtactcagccgctaaatccaaggttgaaaagaaaaagaaggagaaggttctcgcaactgttacaaaaccagttggtggtgacaagaacggcggtacccgggtggttaaacttcgcaaaatgcctagatattatcctactgaagatgtgcctcgaaagctgttgagccacggcaaaaaacccttcagtcagcacgtgagaaaactgcgagccagcattacccccgggaccattctgatcatcctcactggacgccacaggggcaagagggtggttttcctgaagcagctggctagtggcttattacttgtgactggacctctggtcctcaatcgagttcctctacgaagaacacaccagaaatttgtcattgccacttcaaccaaaatcgatatcagcaatgtaaaaatcccaaaacatcttactgatgcttactttaaaagaagctgcggaagcctaaacaccaggaaggtgagatcttcgacacagaaaaagagaaatagattacagagcagcgcaagatttatcagaaagctgtggactcacaagttttagcaaaaatcaaagctattcctcagctccagggctacctgtgatctgtgtctgccctaacgaatggaatttatcctcacaaattggtgttctgaatttcttaagaacctaataacattttgtttgtgtctcttnnnnnnnnngtggaaactcatatgtccatttgatgaatggataaacaaaatgtggtatatccatataatggaacactactcaacaataaaaaggaatgatgtactgacacatggcaccacatggataaactgcaaaagcattatgctaagtgaaagaaatcagtcacaaaagactacacattttatgactctatttatatgaaatgtccagaagaggcaaatttatagaaacagaaagtacattagcagatgactagggctggggagtcaggagaaatttgtgagtggctgctaatgggtattcttttttggagtgagaaaagtgctctaaattgattgtggtgatggttgcccaattctgtgaacatactaagtcactgaattgtacgctttatatggatgaattgtgtggtgtgtgaactataactcaaaaaagctgttaagnnnnnnnnnntaggacaggcgtggtggctcatgcttgtaatcctagcactttgggagataattggtaaaatgtgaatgagatctatagattagttaataatatcaacattaatttccgga

SEQ ID NO: 191161 - DNA, 702 bp, Homo Sapiens
ctttgtacaaaaaagttggctcagccgctcctatcaaaggttgaaaagaaaaagaaggagaaggttctcgcaactgttacaaaaccagttggtggtgacaagaacggcggtacccgggtggttaaacttcgcaaaatgcctagatattatcctactgaagatgtgcctcgaaagctgttgagccacggcaaaaaacccttcagtcagcacgtgagaaaactgcgagccagcattacccccgggaccattctgatcatcctcactggacgccacaggggcaagagggtggttttcctgaagcagctggctagtggcttattacttgtgactggacctctggtcctcaatcgagttcctctacgaagaacacaccagaaatttgtcattgccacttcaaccaaaatcgatatcagcaatgtaaaaatcccaaaacatcttactgatgcttacttcaagaagaagaagctgcggaagcccagacaccaggaaggtgagatcttcgacacagaaaaagagaaatatgagattacggagcagcgcaagattgatcagaaagctgtggactcacaaattttaccaaaaatcaaagctattcctcagctccagggctacctgcgatctgtgtttgctctgacgaatggaatttatcctcacaaattggtgttctaaatgtcttaagaacctaattaaatagctgactac

SEQ ID NO: 191162 - DNA, 2313 bp, Homo Sapiens; identical to SEQ ID NO: 183754

SEQ ID NO: 191163 - DNA, 1522 bp, Homo Sapiens; identical to SEQ ID NO: 183755
  misc_feature (170)..(220): n is a, c, g, or t

SEQ ID NO: 191164 - DNA, 1287 bp, Homo Sapiens
ttggccatccccaccctggaactgcactttcttaaccctttagaagttaaagtctgacacggctgctgcagctgtgcgccaaatgaatccacatatccgggtgacaagccaccagaaccgtgtgggtcctgacacggagcgcatctatgatgacgattttttccaaaacctagatggcgtggccaatgccctggacaacgtggatgcccgcatgtacatggaccgccgctgtgtctactaccggaagccactgctggagtcaggcacactgggcaccaaaggcaatgtgcaggtggtgatccccttcctgacagagtcgtacagttccagccaggacccacctgagaagtccatccccatctgtaccctgaagaacttccctaatgccatcgagcacaccctgcagtgggctcgggatgagtttgaaggcctcttcaagcagccagcagaaaatgtcaaccagtacctcacagaccccaagtttgtggagcgaacactgcggctggcaggcactcagcccttggaggtgctggaggctgtgcagcgcagcctggtgctgcagcgaccacagacctgggctgactgcgtgacctgggcctgccaccactggcacacccagtactcgaacaacatccggcagctgctgcacaacttccctcctgaccagctcacaagctcaggagcgccgttctggtctgggcccaaacgctgtccacacccgctcacctttgatgtcaacaatcccctgcatctggactatgtgatggctgctgccaacctgtttgcccagacctacgggctgacaggctctcaggaccgagctgctgtggccacattcctgcagtctgtgcaggtccccgaattcacccccaagtctggcgtcaagatccatgtttctgaccaggagctgcagagcgccaatgcctctgttgatgacagtcgtctagaggagctcaaagccactctgcccagcccagacaagctccctggattcaagatgtaccccattgactttgagaagatgatgacagcaactttcatatggatttcatcgtggctgcatccaacctccgggcagaaaactatgacattccttctgcagaccggcacaagagcaagctgattgcagggaagatcatcccagccattgccacgaccacagcagccgtggttggccttgtgtgtctggagctgtacaaggttgtgcaggggcaccgacagcttgactcctacaagaatggtttcctcaacttgggccctgctttctttggtttctctgaacccctt

SEQ ID NO: 191165 - DNA, 1583 bp, Homo Sapiens
ttggttaccttccttatatctcccccgtcttcctctccatagatctcctcccatttccccttccatggtccccatcttccttctgaaatgtctactccttcatgttcctttatgtatgtcttccaatctttccttccatagctctcatcaccttcatatatttcttccatctttctcctcccacctgcctcgccctctgtatatacccccactctcccccttttatatcttctccatctccccccatatctttcctctatgtccacatctgtgtattccccccaacttcccctccatatatcttttttactccccttttcctccctgtatcctctgtgttccccccatcttgctctacatcattcttcccaagatctttacgtctcccatcttgatctctccatctccactttctcctaacattttcatttccgttccttagtgtctctagagagatcattcttgatagcctcagctctttctctgtgtttttcaggtttgtattctgctctgctctacctctcctccttgccccttttctctcccaggatgtctctcctttccaaatcctttttgtacctgaataccttttgccccaccctgggctctcatttccatctcagaccttagcctgggatctaaagggctgacagtgtccctttcttcatgcagatgacagtcgtctagaggagctcaaagccactctgcccagcccagacaagctccctggattcaagatgtaccccattgactttgagaaggatgatgacagcaactttcatatggatttcatcgtggctgcatccaacctccgggcagaaaactatgacattccttctgcagaccggcacaagagcaagctgattgcagggaagatcatcccagccattgccacgaccacagcagccgtggttggccttgtgtgtctggagctgtacaaggttgtgcaggggcaccgacagcttgactcctacaagaatggtttcctcaacttggccctgcctttctttggtttctctgaaccccttgccgcaccacgtcaccagtactataaccaagagtggacattgtgggatcgctttgaggtacaagggctgcagcctaatggtgaggagatgaccctcaaacagttcctcgactattttaagacagagcacaaattagagatcaccatgctgtcccagggcgtgtccatgctctattccttcttcatgccagctgccaagctcaaggaacggttggatcagccgatgacagagattgtgagccgtgtgtcgaagcgaaagctgggccgccacgtgcgggcgctggtgcttgagctgtgctgtaacgacgagagcggcgaggatgtcgaggttccctatgtccgatacaccatccgctgaccccgtctgctcctctaggctggccccttgtccacccctctccacaccccttccagcccagggttcccatttggcttctggcagtggcccaactagccaagtctggtgttccctcatcatccccctacctgaacccctcttgccactgccttctaccttgtttgaaacctgaatcctaataaagaattaataactccc

SEQ ID NO: 191166 - DNA, 1344 bp, Homo Sapiens; identical to SEQ ID NO: 180079
  misc_feature (685)..(901): n is a, c, g, or t
  misc_feature (918)..(1001): n is a, c, g, or t

SEQ ID NO: 191167 - DNA, 1801 bp, Homo Sapiens; identical to SEQ ID NO: 183759

SEQ ID NO: 191168 - DNA, 2002 bp, Homo Sapiens; identical to SEQ ID NO: 183760

SEQ ID NO: 191169 - DNA, 1396 bp, Homo Sapiens
ttggcaagctttggatcagtaatgggggcctagcagacatcttcacggtctttgccaagacaccagttacagatccagccacaggagccgtgaaggagaagatcacagcttttgtggtggagaggggcttcgggggcattacccatgggccccctgagaagaagatgggcatcaaggcttcaaacacagcagaggtgttctttgatggagtacgggtgccatcggagaacgtgctgggtgaggttgggagtggcttcaaggttgccatgcacatcctcaacaatggaaggtttggcatggctgcggccctggcaggtaccatgagaggcatcattgctaaggcggtagatcatgccactaatcgtacccagtttggggagaaaattcacaactttgggctgatccaggagaagctggcacggatggttatgctgcagtatgtaactgagtccatggcttacatggtgagtgctaacatggaccagggagccacggacttccagatagaggccgccatcagcaaaatctttggctcggaggcagcctggaaggtgacagatgaatgcatccaaatcatggggggtatgggcttcatgaaggaacctggagtagagcgtgtgctccgagatcttcgcatcttccggatctttgaggggacaaatgacattcttcggctgtttgtggctctgcagggctgtatggacaaaggaaaggagctctctgggcttggcagtgctctaaagaatccctttgggaatgctggcctcctgctaggagaggcaggcaaacagctgaggcggcgggcagggctgggcagcggcctgagtctcagcggacttgtccacccggagttgagtcggagtggcgagctggcagtacgggctctggagcagtttgccactgtggtggaggccaagctgataaaacacaagaaggggattgtcaatgaacagtttctgctgcagcggctggcagacggggccatcgacctctatgccatggtggtggttctctcgagggcctcaagatccctgagtgagggccaccccacggcccagcatgagaaaatgctctgtgacacctggtgtatcgaggctgcagctcggatccgagagggcatggccgccctgcagtctgacccctggcagcaagagctctaccgcaacttcaaaagcatctccaaggccttggtggagcggggtggtgtggtcaccagcaacccacttggcttctgaatactcccggccagggcctgtcccagttatgtgccttccctcaagccaaagccgaagcccctttccttaagccctggtttgtcccgaaagggcctagtgttcccagcactgtgcctgctctcagagcacttactgcctcgcaaataataaaaatttctagc

SEQ ID NO: 191170 - DNA, 1411 bp, Homo Sapiens
ccttttaaagccaactttgtacaaaaaagttggtgctcttcccggtcatggaggcgccagccgccggcttgtttctgctcctgttgcttgggacttgggccccggcgccgggcagcgcctcctccgaggcaccgccgctgatcaatgaggacgtgaagcgcacagtggacctaagcagccacctggctaaggtgacggccgaggtggtcctggcgcacctgggcggcggctccacgtcccgagctacctctttcctgctggctttggagcctgagctcgaggcccggctggcgcacctgggcgtgcaggtaaagggagaagatgaggaagagaacaatttggaagtacgtgaaaccaaaattaagggtaaaagtgggagattcttcacagtcaagctcccagttgctcttgatcctggggccaagatttcagtcattgtggaaacagtctacacccatgtgcttcatccgtatccaacccagatcacccagtcagagaaacagtttgtggtgtttgaggggaaccattatttctactctccctatccaacgaagacacaaaccatgcgtgtgaagcttgcctctcgaaatgtggagagctacaccaagctggggaaccccacgcgctctgaggacctactggattatgggcctttcagagatgtgcctgcctatagtcaggatacttttaaagtacattatgagaacaacagccctttcctgaccatcaccagcatgacccgagtcattgaagtctctcactggggtaatattgctgtggaagaaaatgtggacttaaagcacacaggagctgtgcttaaggggcctttctcacgctatgattaccagagacagccagatagtggaatatcctccatccgttcttttaagaccatccttcctgctgctgcccaggatgtttattaccgggatgagattggcaatgtttctaccagccacctccttattttggatgactctgtagagatggaaatccggcctcgcttccctctctttggcgggtggaagacccattacatcgttggctacaacctcccaagctatgagtacctctataatttgggtgaccagtatgcactgaagatgaggtttgtggaccatgtgtttgatgaacaagtgatagattctctgactgtgaagatcatcctgcctgaaggagccaagaacattgaaattgatagtctctatgaaatcagccgtgctccagatgagctgcactacacctatctggatacatttggccgctctgtgattgttgcctacaagaaaaatctggtagaacagcacattcaggacattgtggtccactacacgttcaacaaggtgctcatgctgcagagcccctgctggtggtggcggccttctacatcctgttcttcaccgttatcatc

SEQ ID NO: 191171 - DNA, 1542 bp, Homo Sapiens
gctttttctataatgccaactttgtacaaaaaagttggcgaagacacaaaccatgcgtgtgaagcttgcctctcgaaatgtggagagctacaccaagctggggaaccccacgcgctctgaggacctactggattatgggcctttcagagatgtgcctgcctatagtcaggatacttttaaagtacattatgagaacaacagccctttcctgaccatcaccagcatgacccgagtcattgaagtctctcactggggtaatattgctgtggaagaaaatgtggacttaaagcacacaggagctgtgcttaaggggcctttctcacgctatgattaccagagacagccagatagtggaatatcctccatccgttcttttaagaccatccttcctgctgctgcccaggatgtttattaccgggatgagattggcaatgtttctaccagccacctccttattttggatgactctgtagagatggaaatccggcctcgcttccctctctttggcgggtggaagacccattacatcgttggctacaacctcccaagctatgagtacctctataatttgggtgaccagtatgcactgaagatgaggtttgtggaccatgtgtttgatgaacaagtgatagattctctgactgtgaagatcatcctgcctgaaggagccaagaacattgaaattgatagtccctatgaaatcagccgtgccccagatgagctgcactacacctatctggacacatttggccgccctgtgattgttgcctacaagaaaaatctggtagaacagcacattcaggacattgtggtccactacacgttcaacaaggtgctcatgctgcaggagcccctgctggtggtggcggccttctacatcctgttcttcaccgttatcatctatgttcggctggacttctccatcaccaaggatccagccgcagaagccaggatgaaggtagcctgcatcacagagcaggtcttgaccctggtcaacaagagaataggcctttaccgtcactttgacgagaccgtcaataggtacaagcaatcccgggacatctccaccctcaacagtggcaagaagagcctggagactgaacacaaggccttgaccagtgagattgcactgctgcagtccaggctgaagacagagggctctgatctgtgcgacagagtgagcgaaatgcagaagctggatgcacaggtcaaggagctggtgctgaagtcggcggtggaggctgagcgcctggtggctggcaagctcaagaaagacacgtacattgagaatgagaagctcatctcaggaaagcgccaggagctggtcaccaagatcgaccacatcctggatgccctgtagcccctgcccgcatcctccagggggcccagggtgcctgcactttgctgtggcaggcagattgggtggtagtgggaggttgtgcatggaggccagtgaaagctgacatctgtaaaaggccttcaaggaagagaaaccaggccctgcgtcaggcagtgtgagtttgccgtttgtccttaactttc

SEQ ID NO: 191172 - DNA, 1692 bp, Homo Sapiens; identical to SEQ ID NO: 183761
  misc_feature (925)..(937): n is a, c, g, or t

SEQ ID NO: 191173 - DNA, 2352 bp, Homo Sapiens; identical to SEQ ID NO: 183762
  misc_feature (50)..(62): n is a, c, g, or t
  misc_feature (1290)..(1301): n is a, c, g, or t
  misc_feature (1400)..(1409): n is a, c, g, or t
  misc_feature (2006)..(2020): n is a, c, g, or t

SEQ ID NO: 191174 - DNA, 2558 bp, Homo Sapiens; identical to SEQ ID NO: 183763

SEQ ID NO: 191175 - DNA, 675 bp, Homo Sapiens
tgtacaaaaaagttgggtataatctctccagccctgcagattttcacctgacttgttcagccccatgcgtagactcccgctgcaggcctctggcctgtggctcactgcatgcagcccctggcgtgcaatactagtgctccacggcgcgatgtgcttctagcccttgcactgcacctaggctcagggttcaaacggccagcccgaaaagcctgcctgccttctttctggaaacagcacgtccccggccgtgtgcctgcccctttctctactgagctagtccccaaaccaaaggcaagccccctcgggcctcgggggatggggccggccacacccctgactccgccctggctctgccccatacccctgccgtggggccgacctgggggatgcagacatccggctccgtattcctgcctatcggggccaggatgcaaaaacaatttttgcgtaaaagatgtcacactgatctgctggagtggggtggacacatgaattcagttttatcatgaacactcacgactggctgcttgttaattcagggataatggtggcattcttacaaactgctcgggaaataaaatgacgggaacacttttagggagcccaggaagttaccagggacattggtgtcgccggcccaggcaacagcaacgtacgcttttcaaagatcattga

SEQ ID NO: 191176 - DNA, 1536 bp, Homo Sapiens; identical to SEQ ID NO: 183764
  misc_feature (1174)..(1215): n is a, c, g, or t

SEQ ID NO: 191177 - DNA, 861 bp, Homo Sapiens
  misc_feature (103)..(151): n is a, c, g, or t
tacaaaaaagttggcccaaatcacacaactcttctctattatgtttaatcaattgcaagcaaatagatttttctttgtaacaatttgttctgcagaaggctgnnnnnnnnnnnnnnnnnnnnnnnnnnnnnnnnnnnnnnnnnnnnnnnnngtctggagaaatcacttagactctgtgtgcctcttctacattgcattctgctctgctatgttacctgctaggctggcttctttggactccctatatgattgatgatgtgaaaacctaaattacttgcagcatagtattacttctttgatgttctcattagcataatgttatttttgaaaaggaaagatactatcacataagttttcctcatctgttgtgatatacaccaatggataaactaacggaaactgctttttgacattaaaagacaggagaaattatatttaactaagtaaaagttaagtcagaattacttgggtgatgtgattcaatttagttaaaggatgatatagagaaaatacattatttagcattatttcttcagctataatgaattgctatagaaatcaggcagatctttctaatgtgtattgattggtcttttcagctactctgaacagattactaaggccatctcctcatctctaagggagaaaaatagtctgtagatgaataatgtaaggtaaagagttgcatgtcagtctttgtaattatttacactttaactttctccagaactcagacatgatttcaacatggtgttagatttgtgcattttattttcctgaccaccctcattccagcccaatgtatggttatccactctgtgtggccaaaccaatcatgccttttcacgggcccttttaatt

SEQ ID NO: 191178 - DNA, 1218 bp, Homo Sapiens
  misc_feature (198)..(224): n is a, c, g, or t
ttgggagatatttgaaggctggagaccaattattttatagcttgtttcttggtttgtttttagttgatgcttttttcatgtttagttttagtttatgaacttttggcaggaataacacaaaagtaatatgctcttggtgtgatttttaaaaacttaatttttaacctgggtttttttctttgtgtttgttattactannnnnnnnnnnnnnnnnnnnnnnnnnnttttgggggtagacatccttctttcatgtgcttttccatttatcaaataattcctaagtattttctcttcaaggaagtataggggatacaaagacaaaacatgtttgtgccagcaaagacctaatattaagggaaggtagcataaacaaaaacagttccttctttctcctgtagtgaccctttgtgatttgtaaagtatatatcttaataagatcctcaggggtctccaagttttcaaatgccatattctcatctgttacctcacccctccctcattaaatgctgtgaagtatgactgaaattgttatggactctttcagaagcttagttattaataaatacagagctaaaaatcaacagtaagatgcctgtaatgaattctgccactaagagaaaatgaatacaatctctttcttcacttctgaaataagattagctgtgatcttataggtgtctataaactcaaggtgatggtggtggttgcagaccatgacctgagccactacagaactggaagttccacttctttacctcaaatttctgtattcttgtatttctatattttgctttttttctaaatgacagataatgtataattgatagatagaatatgtgtagaataagtgccacattaacatggaaactatagaaatgtctgcattttacttggtttattttaccctcattttgttggagagaaaaagatacacattggtttcttcctatttttcccagctattgacctgaaaagtggttctggaaaagtgtaccaaggccctgcaaaaggtgctgctgatacaacaatcatactttcagatgaagatttcatggaggtggtcctgggcaagcttgaccctcagaaagcattctttagtggcaggctgatgccagagggaacatcatgctgagccagaaacttcagatgagtcttaaagactacgccagctctgaagggcacactacactattaataaaaatgggatcattaatactc

SEQ ID NO: 191179 - DNA, 1133 bp, Homo Sapiens
ttgggttcgtgtgtgtgtcgttgcaggccttattcatgggctcaccgctgaggttcgacgggcgggtggtactggtcaccggcgcgggggcaggattgggccgagcctatgccctggcttttgcagaaagaggagcgttagttgttgtgaatgatttgggaggggacttcaaaggagttggtaaaggctccttagctgctgataaggttgttgaagaaataagaaggagaggtggaaaagcagtggccaactatgattcagtggaagaaggagagaaggttgtgaagacagccctggatgcttttggaagaatagatgttgtggtcaacaatgctggaattctgagggatcattcctttgctaggataagtgatgaagactgggatataatccacagagttcatttgcggggttcattccaagtgacacgggcagcatgggaacacatgaagaaacagaagtatggaaggattattatgacttcatcagcttcaggaatatatggcaactttggccaggccaattatagtgctgcaaagttgggtcttctgggccttgcaaattctcttgcaattgaaggcaggaaaagcaacattcattgtaacaccattgctcctaatgcgggatcacggatgactcagacagttatgcctgaagatcttgtggaagccctgaagccagagtatgtggcacctcttgtcctttggctttgtcacgagagttgtgaggagaatggtggcttgtttgaggttggagcaggatggattggaaaattacgctgggagcggactcttggagctattgtaagacaaaagaatcacccaatgactcctgaggcagtcaaggctaactggaagaagatctgtgactttgagaatgccagcaagcctcagagtatccaagaatcaactggcagtataattgaagttctgagtaaaatagattcagaaggaggagtttcagcaaatcatactagtcgtgcttttgtctacagcaacatcaggatttgctggagctattggccagaaactccctccattttcttatgcttatacggaactggaagctattatgtatgcccttggagtgggagcgtcaatcaaggatccaaaagatttgaaatttatttatga

SEQ ID NO: 191180 - DNA, 1559 bp, Homo Sapiens; identical to SEQ ID NO: 183767
  misc_feature (1310)..(1319): n is a, c, g, or t

SEQ ID NO: 191181 - DNA, 1655 bp, Homo Sapiens; identical to SEQ ID NO: 183768

SEQ ID NO: 191182 - DNA, 996 bp, Homo Sapiens
cctataaaagccaactttgtacaaaaaagttgggttctgcctcactcccgagctctactgactcccaacagagcgcccaagaagaaaatggccataagtggagtccctgtgctaggatttttcatcatagctgtgctgatgagcgctcaggaatcatgggctatcaaagaagaacatgtgatcatccaggccgagttctatctgaatcctgaccaatcaggcgagtttatgtttgactttgatggtgatgagattttccatgtggatatggcaaagaaggagacggtctggcggcttgaagaatttggacgatttgccagctttgaggctcaaggtgcattggccaacatagctgtggacaaagccaacctggaaatcatgacaaagcgctccaactatactccgatcaccaatgtacctccagaggtaactgtgctcacgaacagccctgtggaactgagagagcccaacgtcctcatctgtttcatcgacaagttcaccccaccagtggtcaatgtcacgtggcttcgaaatggaaaacctgtcaccacaggagtgtcagagacagtcttcctgcccagggaagaccaccttttccgcaagttccactatctccccttcctgccctcaactgaggacgtttacgactgcagggtggagcactggggcttggatgagcctcttctcaagcactgggagtttgatgctccaagccctctcccagagactacagagaacgtggtgtgtgccctgggcctgactgtgggtctggtgggcatcattattgggaccatcttcatcatcaagggagtgcgcaaaagcaatgcagcagaacgcagggggcctctgtaaggcacatggaggtgatggtgtttcttagagagaagatcactgaagaaacttctgctttaatgactttacaaagctggcaatattacaatccttgacctcagtgaaagcagtcatcttcagcgttttccagccctatagccaccc

SEQ ID NO: 191183 - DNA, 1073 bp, Homo Sapiens
actttgtacaaataagtggagtccctgtgctaggatttttcatcatagctgtgctgatgagcgctcaggaatcatgggctatcaaagaagaacatgtgatcatccaggccgagttctatctgaatcctgaccaatcaggcgagtttatgtttgactttgatggtgatgagattttccatgtggatatggcaaagaaggagacggtctggcggcttgaagaatttggacgatttgccagctttgaggctcaaggtgcattggccaacatagctgtggacaaagccaacctggaaatcatgacaaagcgctccaactatactccgatcaccaatgtacctccagaggtaactgtgctcacgaacagccctgtggaactgagagagcccaacgtcctcatctgtttcatcgacaagttcaccccaccagtggtcaatgtcacgtggcttcgaaatggaaaacctgtcaccacaggagtgtcagagacagtcttcctgcccagggaagaccaccttttccgcaagttccactatctccccttcctgccctcaactgaggacgtttacgactgcagggtggagcactggggcttggatgagcctcttctcaagcactgggagtttgatgctccaagccctctcccagagactacagagaacgtggtgtgtgccctgggcctgactgtgggtctggtgggcatcattattgggaccatcttcatcatcaagggagtgcgcaaaagcaatgcagcagaacgcagggggcctctgtaaggcacatggaggtgatggtgtttcttagagagaagatcactgaagaaacttctgctttaatgactttacaaagctggcaatattacaatccttgacctcagtgaaagcagtcatcttcagcgttttccagccctatagccaccccaagtgtggttatgcctcctcgattgctccgtactctaacatctagctggcttccctgtctattgccttttcctgtatctattttcctctattcctatcattttattatcaccatgcaatgcctctggaataaaaacatacaggagtctgtctctgcta

SEQ ID NO: 191184 - DNA, 945 bp, Homo Sapiens
ctttgtacaaaaaagttggcaaggtgcattcgcaaaaatagctgtggacaaagccaacctggaaatcatgacaaagcgctccaactatactccgatcaccaatgtacctccagaggtaactgtgctcacgaacagccctgtggaactgagagagcccaacgtcctcatctgtttcatagacaagttcaccccaccagtggtcaatgtcacgtggcttcgaaatggaaaacctgtcaccacaggagtgtcagagacagtcttcctgcccagggaagaccaccttttccgcaagttccactatctccccttcctgccctcaactgaggacgtttacgactgcagggtggagcactggggcttggatgagcctcttctcaagcactgggagtttgatgctccaagccctctcccagagactacagagaacgtggtgtgtgccctgggcctgactgtgggtctggtgggcatcattattgggaccatcttcatcatcaagggagtgcgcaaaagcaatgcagcagaacgcagggggcctctgtaaggcacatggaggtgatggtgtttcttagagagaagatcactgaagaaacttctgctttaatgactttacaaagctggcaatattacaatccttgacctcagtgaaagcagtcatcttcagcgttttccagccctatagccaccccaagtgtggttatgcctcctcgattgctccgtactctaacatctagctggcttccctgtctattgccttttcctgtatctattttcctctatttcctatcattttattatcaccatgcaatgcctctggaataaaacatacaggagtctgtctctgctatggaatgccccatggggcatctcttgtgtacttattgtttaaggtttcctcaaactgtgatttttctgaacacaataaactattttgatgatcttgggtgg

SEQ ID NO: 191185 - DNA, 1784 bp, Homo Sapiens; identical to SEQ ID NO: 183772

SEQ ID NO: 191186 - DNA, 1482 bp, Homo Sapiens; identical to SEQ ID NO: 180081
  misc_feature (357)..(367): n is a, c, g, or t
  misc_feature (420)..(697): n is a, c, g, or t

SEQ ID NO: 191187 - DNA, 1027 bp, Homo Sapiens; identical to SEQ ID NO: 183773

SEQ ID NO: 191188 - DNA, 1502 bp, Homo Sapiens
gagcaatgctttttctataatagccaactttgtacaaaaaagttggcttctgaaatgggtgctggaatttgcctgctaatcaccattcagctctttgttgctggcttaattgtcctacttttggatgaactcctgcaaaaaggatatggccttggctctggtatttctctcttcattgcaactaacatctgtgaaaccatcgtatggaaggcattcagccccactactgtcaacactggccgaggaatggaatttgaaggtgctatcatcgcacttttccatctgctggccacacgcacagacaaggtccgagcccttcgggaggcgttctaccgccagaatcttcccaacctcatgaatctcatcgccaccatctttgtctttgcagtggtcatctatttccagggcttccgagtggacctgccaatcaagtcggcccgctaccgtggccagtacaacacctatcccatcaagctcttctatacgtccaacatccccatcatcctgcagtctgccctggtgtccaacctttatgtcatctcccaaatgctctcagctcgcttcagtggcaacttgctggtcagcctgctgggcacctggtcggacacgtcttctgggggcccagcacgtgcttatccagttggtggcctttgctattacctgtcccctccagaatcttttggctccgtgttagaagacccggtccatgcagttgtatacatagtgttcatgctgggctcctgtgcattcttctccaaaacgtggattgaggtctcaggttcctctgccaaagatgttgcaaagcagctgaaggagcagcagatggtgatgagaggccaccgagagacctccatggtccatgaactcaaccggtacatccccacagccgcggcctttggtgggctgtgcatcggggccctctcggtcctggctgacttcctaggcgccattgggtctggaaccgggatcctgctcgcagtcacaatcatctaccagtactttgagatcttcgttaaggagcaaagcgaggttggcagcatgggggccctgctcttctgagcccgtctcccggacaggttgaggaagctgctccagaagcgcctcggaaggggagctctcatcatggcgcgtgctgctgcggcatatggacttttaataatgtttttgaatttcgtattctttcattccactgtgtaaagtgctagacattttccaatttaaaattttgctttttatcctggcactggcaaaaagaactgtgaaagtgaaattttattcagccgactgccagagaagtgggaatggtataggattgtccccaagtgtccatgtaacttttgttttaacctttgcaccttctcagtgctgtatgcggctgcagccgtctcacctgtttccccacaaagggaatttctcactctggttggaagcacaaacactgaaatgtctacgtttcattttggcagtagggtgtgaagctgggagcagatcatgtatttccc

SEQ ID NO: 191189 - DNA, 1212 bp, Homo Sapiens; identical to SEQ ID NO: 180082

SEQ ID NO: 191190 - DNA, 2004 bp, Homo Sapiens; identical to SEQ ID NO: 183775

SEQ ID NO: 191191 - DNA, 3103 bp, Homo Sapiens; identical to SEQ ID NO: 183777

SEQ ID NO: 191192 - DNA, 961 bp, Homo Sapiens; identical to SEQ ID NO: 183778

SEQ ID NO: 191193 - DNA, 1026 bp, Homo Sapiens; identical to SEQ ID NO: 183779

SEQ ID NO: 191194 - DNA, 930 bp, Homo Sapiens; identical to SEQ ID NO: 183780

SEQ ID NO: 191195 - DNA, 1449 bp, Homo Sapiens; identical to SEQ ID NO: 183781
  misc_feature (867)..(934): n is a, c, g, or t
  misc_feature (1304)..(1336): n is a, c, g, or t

SEQ ID NO: 191196 - DNA, 1431 bp, Homo Sapiens; identical to SEQ ID NO: 183782
  misc_feature (393)..(459): n is a, c, g, or t

SEQ ID NO: 191197 - DNA, 1016 bp, Homo Sapiens; identical to SEQ ID NO: 183783

SEQ ID NO: 191198 - DNA, 1994 bp, Homo Sapiens; identical to SEQ ID NO: 183784

SEQ ID NO: 191199 - DNA, 1158 bp, Homo Sapiens
tgtacaaaaaagttggagcaaagaaacccattcatgtgtatggaatcaactgtttatagtcttttcacactgcagctttgggaaaacttcattccttgatttgtgtttgtcttggccttcctggtgtgcagtactgctgtagaaaagtattaatagcttcatttcatataaacataagtaactcccaaacacttatgtagaggactaaaaatgtatctggtatttaagtaatctgaaccagttctgcaagtgactgtgttttgtattactgtgaaaataagaaaatgtagttaattacaatttaaagagtattccacataacttcttaatttctacattccctcccttactcttcgggggtttcctttcagtaagcaacttttccatgctcttaatgtattcctttttagtaggaatccggaagtattagattgaatggaaaagcacttgccatctctgtctaggggtcacaaattgaaatggctcctgtatcacatacggaggtcttgtgtatctgtggcaacagggagtttccttattcactctttatttgctgctgtttaagttgccaacctcccctcccaataaaaattcacttacacctcctgcctttgtagttctggtattcactttactatgtgatagaagtagcatgttgctgccagaatacaagcattgcttttggcaaattaaagtgcatgtcatttcttaatacactagaaaggggaaataaattaaagtacacaagtccaagtctaaaactttagtacttttccatgcagatttgtgcacatgtgagagggtgtccagtttgtctagtgattgttatttagagagttggaccactattgtgtgttgctaatcattgactgtagtcccaaaaaagccttgtgaaaatgttatgccctatgtaacagcagagtaacataaaataaaagtacattttataaaccatttactatggctttgtaacaattgcatacccatattttaagggacaggtgaatttactactttctaaagtttattgatacttcccttttatgtaaaatgtagtagtgatacctatatttccacattgtgcattgtgacacacttgtctagggatgcctggaagtgtataaaattggactgcatttcttaaagtgttttactata

SEQ ID NO: 191200 - DNA, 1300 bp, Homo Sapiens
ttgggtccctgacctgctgctaggatcgcgacgggaactggagcccgaggtccccgcgcggcccgggcctggcgccctgaggggaagagcggcccggcccgagccatgacggacgggatcctagggaaggcagccacaatggagatccctatccacgggaacggcgaagccaggcagcttcctgaagatgatgggctggagcaggacctccagcaggtgatggtgtcaggacccaacctcaatgaaaccagcattgtgtctggtggctatgggggctctggtgatggactcatccccacagggtctggccgccatccatctcacagcaccactccttctggccctggagatgaggtggctcggggcattgctggagaaaagtttgacatcgtcaagaaatggggcatcaacacctataagtgcacaaagcaactgttatcagaacgatttggtcgaggctcacggactgtggacctggagctagagctgcagattgagttgctgcgtgagacgaagcgcaagtatgagagtgtcctgcagctgggccgggcactgacagcccacctctacagcctgctgcagacccagcatgcactgggtgatgcctttgctgacctcagccagaagtccccagagcttcaggaggaatttggctacaatgcagagacacagaaactactatgcaagaatggggaaacgctgctaggagccgtgaacttctttgtctctagcatcaacacattggtcaccaagaccatggaagacacgctcatgactgtgaaacagtatgaggctgccaggctggaatatgatgcctaccgaacagacttagaggagctgagtctaggcccccgggatgcagggacacgtggtcgacttgagagtgcccaggccactttccaggcccatcgggacaagtatgagaagctgcggggagatgtggccatcaagctcaagttcctggaagaaaacaagatcaaggtgatgcacaagcagctgctgctcttccacaatgctgtgtccgcctactttgctgggaaccagaaacagctggagcagaccctgcagcagttcaacatcaagctgcggcctccaggagctgagaaaccctcctggctagaggagcagtgagctgctcccagcccaacttggctatcaagaaagacattgggaagggcagccccagggtgtgggagattggacatggtacatcctttgtcacttgccctctggcttgggctcctttttctggctggggcctgacaccagttttgcccacattgctatggtgggaagaggg

SEQ ID NO: 191201 - DNA, 1486 bp, Homo Sapiens; identical to SEQ ID NO: 180085

SEQ ID NO: 191202 - DNA, 863 bp, Homo Sapiens
acaaaaaagttggcacaaatccagtgaggtttcttccatcatactgacccttctcctttgactccctgggtagagttcagcccctaccccaaaagcaccatcagagcagagtccttgtgcccctggtctgtgcctgggctcaggctcatagaccctcaagaagggcgcctgagtccagccttagctgaccctgctggacccccagatcaaggtgatgcacaagcagctgctgctcttccacaatgctgtgtccgcctactttgctgggaaccagaaacagctggagcagaccctgcagcagttcaacatcaagctgcggcctccaggagctgagaaaccctcctggctagaggagcagtgagctgctcccagcccaacttggctatcaagaaagacattgggaagggcagccccagggtgtgggagattggacatggtacatcctttgtcacttgccctctggcttgggctcctttttctggctggggcctgacaccagttttgcccacattgctatggtgggaagagggcctggaggcccagaagttgctgccctgtctatcttcctggccacagggcttcattcccagatcttttccttccacttcacagccaacggctatgacaaaaccactctcctggccaatggcatcactcttcaggctggggtgtgctccctgaccaatgacagagcctgaaaatgctctgtcagccaatggcagctcttctcggactctcctgggccaatgatgttgcgtctaataccctttgtctctcctctatgcgtgcccattgcagagaagggactggggaccaaaggggtggggataatggggagcctcattgctgggccttgcatctga

SEQ ID NO: 191203 - DNA, 1392 bp, Homo Sapiens; identical to SEQ ID NO: 180086
  misc_feature (481)..(489): n is a, c, g, or t

SEQ ID NO: 191204 - DNA, 1691 bp, Homo Sapiens; identical to SEQ ID NO: 183785

SEQ ID NO: 191205 - DNA, 2092 bp, Homo Sapiens; identical to SEQ ID NO: 183789
  misc_feature (221)..(239): n is a, c, g, or t

SEQ ID NO: 191206 - DNA, 898 bp, Homo Sapiens; identical to SEQ ID NO: 183794

SEQ ID NO: 191207 - DNA, 898 bp, Homo Sapiens; identical to SEQ ID NO: 183795

SEQ ID NO: 191208 - DNA, 940 bp, Homo Sapiens
ttaaaagccaactttgtacaaaaaagttggtgactaagatggaagcgtttttggggtcgcggtccggactttgggcggggggtccggccccaggacagttttaccgcattccatccactcccgattccttcatggatccggcgtctgcactttacagaggtccaatcacgcggacccagaaccccatggtgaccgggacctcagtcctcggcgttaagttcgagggcggagtggtgattgccgcagacatgctgggatcctacggctccttggctcgtttccgcaacatctctcgcattatgcgagtcaacaacagtaccatgctgggtgcctctggcgactacgctgatttccagtatttgaagcaagttctcggccagatggtgattgatgaggagcttctgggagatggacacagctatagtcctagagctattcattcatggctgaccagggccatgtacagccggcgctcgaagatgaaccctttgtggaacaccatggtcatcggaggctatgctgatggagagagcttcctcggttatgtggacatgcttggtgtagcctatgaagccccttcgctggccactggttatggtgcatacttggctcagcctctgctgcgagaagttctggagaagcagccagtgctaagccagaccgaggcccgcgacttagtagaacgctgcatgcgagtgctgtactaccgagatgcccgttcttacaaccggtttcaaatcgccactgtcaccgaaaaaggtgttgaaatagagggaccattgtctacagagaccaactgggatattgcccacatgatcagtggctttgaatgaaatacagatgcattatccagaactgaagttgccctacttttaactttgaacttggctagttcaaagatagactcttcttttgtaaagtaaataaattcttcaaaatg

SEQ ID NO: 191209 - DNA, 1480 bp, Homo Sapiens; identical to SEQ ID NO: 183796

SEQ ID NO: 191210 - DNA, 1555 bp, Homo Sapiens
  misc_feature (642)..(651): n is a, c, g, or t
  misc_feature (1102)..(1124): n is a, c, g, or t
ttggcaaaagtttgatcactgaatttggcagttattattacctaggtacccccgctgttacacaggtgtttagatacgtgttcctgaatgaagctgcttttgaattttgttatgttgaaatgcaagaaataacaatgatggcagcaattaaggtcacagaaatcattaggtaaaggaaaaccaatgaggagttctgcagttttcttttaataagtaaagtgagacttgggtggtgggaagaaggaaggtgggaagaaggaattagacactctgcctgccactctgcgtgtgtgtgctctcgcgcacgtgctgtctatatggaagccactcccttttctttcctttgaaactggtaaggttaaaataggggagaaatcctacatgttggaatgatagctttttggaaaatttaagaaactctccaggctctccatcttgatttatgcttgagttgttatgtgccatatttgctttgaactctgattatcagaagttttactaaaactttgaaataattcactttcatctgctttctagattttgtacatctcagtccataaagcaaagcttgttgatagtgtagttttctaaacgctgcaaatttgcagcctttaccactacaaagaagtttggatgagggannnnnnnnnnctttgtcaaaatagttcctgtttctgtagaaatttcatttttagattaaactgtgatggatgagctatcataattcaagtatacatttcttttttctatcagatattcattgtcatgcagtagtagtaaaaacatcaaagatgcagcaagcttattaagtattattttctaaaagaaataggaggcattttcatctttattattgtacttttggttatgcaaacactttgataatataaacagttatgtcccctataaatctggtcagcaacctcttttgattttgttgggtaagttaaatagtctgtagtaggtagagtactgggtacaagtggtccaaactaagataagagactaaaataaaatgctaaatcttaaaagaaactgggtttatgcactaaacgttttgtgccttggtctaatattaacatgatgtatgtgtaaactgacnnnnnnnnnnnnnnnnnnnnnnnccagtgttgaatcatgctatatttcccatcatcccaaattgctaaatgttctttccaagaagtctgaatgaattattatatacatttgctatcatacatgacagttgtgtcattattagagatttcagtaattaaaatgggaaacagaagcctaagttatttactttatcaaaaccacgttccttggaaccacattattatgatggtttttgtgctcttgtacgttggatgtcttaagctgagtacagtttaggggatccctttctaatgacaggaagggcactgcttttctcaacactgtgatctgacctgtgacaagtctgtactatccactatgtaaatggcttcacagtcaatttgcaaacaactgaatgtacaaatcttagtgctggtgctgaaatctcttcagaatagttcatcatgatttaaaa

SEQ ID NO: 191211 - DNA, 2918 bp, Homo Sapiens; identical to SEQ ID NO: 183799
  misc_feature (2000)..(2009): n is a, c, g, or t
  misc_feature (2461)..(2482): n is a, c, g, or t

SEQ ID NO: 191212 - DNA, 824 bp, Homo Sapiens
  misc_feature (105)..(114): n is a, c, g, or t
  misc_feature (565)..(588): n is a, c, g, or t
ttggtgtacatctcagtccataaagcaaagcttgttgatagtgtagttttctaaacgctgcaaatttgcagcctttaccactacaaagaagtttggatgagggannnnnnnnnnctttgtcaaaatagttcctgtttctgtagaaatttcatttttagattaaactgtgatggatgagctatcataattcaagtatacatttcttttttctatcagatattcattgtcatgcagtagtagtaaaaacatcaaagatgcagcaagcttattaagtattattttctaaaagaaataggaggcattttcatctttattattgtacttttggttatgcaaacactttgataatataaacagttatgtcccctataaatctggtcagcaacctcttttgattttgttgggtaagttaaatagtctgtagtaggtagagtactgggtacaagtggtccaaactaagataagagactaaaataaaatgctaaatcttaaaagaaactgggtttatgcactaaacgttttgtgccttggtctaatattaacatgatgtatgtgtaaactgacnnnnnnnnnnnnnnnnnnnnnnnnccagtgttgaatcatgctatatttcccatcatcccagattgctaaatgttctttccaaaaagtctgaatgaattattatatacatttgctatcatacatgacagttgtgtcattattagagatttcagtaattaaaatgggaaacagaagcctaagttatttaccttatcaaaaccacgttccttggaaccacattattatgatggtttttgtgctcttgtacgttggatgtctta

SEQ ID NO: 191213 - DNA, 1279 bp, Homo Sapiens; identical to SEQ ID NO: 183800

SEQ ID NO: 191214 - DNA, 1117 bp, Homo Sapiens
  misc_feature (279)..(288): n is a, c, g, or t
  misc_feature (739)..(758): n is a, c, g, or t
ttgggggagaaatcctacatgttggaatgatagctttttggaaaatttaagaaactctccaggctctccatcttgatttatgcttgagttgttatgtgccatatttgctttgaactctgattatcagaagttttactaaaactttgaaataattcactttcatctgctttctagattttgtacatctcagtccataaagcaaagcttgttgatagtgtagttttctaaacgctgcaaatttgcagcctttaccactacaaagaagtttggatgagggannnnnnnnnnctttgtcaaaatagttcctgtttctgtagaaatttcatttttagattaaactgtgatggatgagctatcataattcaagtatacatttcttttttctatcagatattcattgtcatgcagtagtagtaaaaacatcaaagatgcagcaagcttattaagtattattttctaaaagaaataggaggcattttcatctttattattgtacttttggttatgcaaacactttgataatataaacagttatgtcccctataaatctggtcagcaacctcttttgattttgttgggtaagttaaatagtctgtagtaggtagagtactgggtacaagtggtccaaactaagataagagactaaaataaaatgctaaatcttaaaagaaactgggtttatgcactaaacgttttgtgccttggtctaatattaacatgatgtatgtgtaaactgacnnnnnnnnnnnnnnnnnnnnccagtgttgaatcatgctatatttcccatcatcccaaattgctaaatgttctttccaagaagtctgaatgaattattatatacatttgctatcatacatgacagttgtgtcattattagagatttcagtaattaaaatgggaaacagaagcctaagttatttaccttatcaaaaccacgttccttggaaccacattattatgatggtttttgtgctcttgtacgttggatgtcttaagctgagtacagttttagggatccttttctaatgacaggaaggcactgctttcctcaacactgtgatcctgaccctgtgacaaagtctgtactatccactaatgtaaatggcttccacaagtc

SEQ ID NO: 191215 - DNA, 971 bp, Homo Sapiens
  misc_feature (301)..(325): n is a, c, g, or t
tttgtacaaaaaagttggctaaaagaaataggaagaattttcatctttattattgtacttttggttatgcaaacactttgataatataaacagttatgtcccctataaatctggtcagcaacctcttttgattttgttgggtaagttaaatagtctgtagtaggtagagtactgggtacaagtggtccaaactaagataagagactaaaataaaatgctaaatcttaaaagaaactgggtttatgcactaaacgttttgtgccttggtctaatattaacatgatgtatgtgtaaactgacnnnnnnnnnnnnnnnnnnnnnnnnnccagggttgaatcatgctatatttcccatcatcccaaattgctaaatgttctttccaagaagtctgaatgaattattatatacatttgctatcatacatgacagttgtgtcattattaaagatttcagtaattaaaatgggaaacagaagcctaagttatttaccttatcaaaaccacgttccttggaaccacattattatgatggtttttgtgctcttgtacgttggatgtcttaagctgagtacagtttaggggatcctttctaatgacaggaaggcactgctttcctcaacactgtgatctgacctgtgacaagtctgtactatccactatgtaaatggctcacaagtcaattgcaaacaaactgaatgtacaaatcttagtgctggtgctgaaatctcttcagaatagtcatcatgatttaaaagtttgtttaaaaatttgcaagcatcaagtgtcaatcaaaactgaagatgaaacactaatgaatgttgaattctcatgcttttaggtgtacttcctttttagaattttcagttttctgctatttttaccgtaactatttcgtttaaatttgtttcatttaagtttcctacatgctaacttcgtttgtgcgattgaaataaaattgcagtatataaacaa

SEQ ID NO: 191216 - DNA, 927 bp, Homo Sapiens; identical to SEQ ID NO: 183801

SEQ ID NO: 191217 - DNA, 1616 bp, Homo Sapiens
  misc_feature (755)..(764): n is a, c, g, or t
  misc_feature (1215)..(1239): n is a, c, g, or t
tttgtacaaaaaagttggcttttacatcatcgtcttcagctatttgtattttaaccagtaatttcaatggtctgaaacatgattctgagcttcacataatatcttaactgtggaactcaaaagtttgatcactgaatttggcagttattattacctaggtacccccgctgttacacaggtgtttagatacgtgttcctgaatgaagctgcttttgaattttgttatgttgaaatgcaagaaataacaatgatggcagcaattaaggtcacagaaatcattaggtaaaggaaaaccaatgaggagttctgcagttttcttttaataagtaaagtgagacttgggtggtgggaagaaggaaggtgggaagaaggaattagacactctgcctgccactctgcgtgtgtgtgctctcgcgcacgtgctgtctatatggaagccactcccttttctttcctttgaaactggtaaggttaaaataggggagaaatcctacatgttggaatgatagctttttggaaaatttaagaaactctccaggctctccatcttgatttatgcttgagttgttatgtgccatatttgctttgaactctgattatcagaagttttactaaaactttgaaataattcactttcatctgctttctagattttgtacatctcagtccataaagcaaagcttgttgatagtgtagttttctaaacgctgcaaatttgcagcctttaccactacaaagaagtttggatgagggannnnnnnnnnctttgtcaaaatagttcctgtttctgtagaaatttcatttttagattaaactgtgatggatgagctatcataattcaagtatacatttcttttttctatcagatattcattgtcatgcagtagtagtaaaaacatcaaagatgcagcaagcttattaagtattattttctaaaagaaataggaggcattttcatctttattattgtacttttggttatgcaaacactttgataatataaacagttatgtcccctataaatctggtcagcaacctcttttgattttgttgggtaagttaaatagtctgtagtaggtagagtactgggtacaagtggtccaaactaagataagagactaaaataaaatgctaaatcttaaaagaaactgggtttatgcactaaacgttttgtgccttggtctaatattaacatgatgtatgtgtaaactgacnnnnnnnnnnnnnnnnnnnnnnnnnccagtgttgaatcatgctatatttcccatcatcccaaattgctaaatgttctttccaagaagtctgaatgaattattatatacattggctatcatacatgacagttgtgtcattattagagatttcagtaattaaaatggaaaacagaagcctaagttatttaccttatcaaacccacgttccttggaaccacattattatgatggtttttgtgctcttgtacgttggatgtctaaagctgagtacagtttaaggggatccttcctaatgacaggagggcactgctttcctcacactgtgatctgacctgggacaagttctgtaccatccactatgtaaatggctccaagtcaattgcaaacaaactgaatgtacaa

SEQ ID NO: 191218 - DNA, 1224 bp, Homo Sapiens
ttgggtcgtagattgtgttatcatgaaagataaaaccaccaaccagtctcgaggctttgggtttgtcaaatttaaagacccaaactgtgtggggacggtgctggccagcagaccgcacacgctagatggccgaaacatcgaccccaagccatgcacaccccgggggatgcagccggagagaacacggccgaaggaaggatggcagaaaggacccaggagcgataacagtaaatcaaataagatatttgtcggtggaattcctcacaattgtggtgagacagagctcagggaatacttcaagaagttcggagtggtcacggaggtagtcatgatctatgacgccgagaagcagaggccccgaggttttggatttattactttcgaggacgaacaatcagtggaccaggctgtcaacatgcattttcacgacatcatgggcaaaaaagtggaagttaaacgagctgagcctcgggacagcaagagccaagcgccgggacagccaggtgccagccagtgggggagccgggttgtgcccaacgctgccaatggctgggcaggccagcccccgcccacgtggcagcaaggatatggcccgcaaggaatgtgggtgccggcaggacaggcgattggtggctatggaccgccccctgcaggaagaggagcccccccgccacccccaccgttcacctcctacatcgtgtccacccctcctggaggctttccccctccccagggcttccctcagggctacggtgccccgccacagttcagttttggctacgggcctccacctccaccgccagatcagtttgcccctccgggggttcctcctccaccagccactcccggggcagcacctctggctttcccaccgcctccgtctcaggctgccccggacatgagcaagcccccgacagctcagccagacttcccctatggtcagtatgcaggttacgggcaggacttgagtggcttcggacagggcttctcagaccccagccagcagcctccttcctacgggggtccctccgtgccagggtcggggggcccccccgccggcggcagcggctttggacgagggcagaaccacaacgtgcaagggtttcacccctaccgacgctagcccgcggcgccgcgacgtctgcacgggcccagacccaggattccaaacttgtgaacttcgtgacattcacaacttgggcggcaagttgccgactcaacttt

SEQ ID NO: 191219 - DNA, 1772 bp, Homo Sapiens; identical to SEQ ID NO: 180090
  misc_feature (82)..(104): n is a, c, g, or t
  misc_feature (1145)..(1193): n is a, c, g, or t

SEQ ID NO: 191220 - DNA, 1377 bp, Homo Sapiens
  misc_feature (1150)..(1195): n is a, c, g, or t
ttgggcaggtagcaaagtgacgccgagggcctgagtgctccagtagccaccgcatctggagaaccagcggttaccatggaggggatcagtatatacacttcagataactacaccgaggaaatgggctcaggggactatgactccatgaaggaaccctgtttccgtgaagaaaatgctaatttcaataaaatcttcctgcccaccatctactccatcatcttcttaactggcattgtgggcaatggattggtcatcctggtcatgggttaccagaagaaactgagaagcatgacggacaagtacaggctgcacctgtcagtggccgacctcctctttgtcatcacgcttcccttctgggcagttgatgccgtggcaaactggtactttgggaacttcctatgcaaggcagtccatgtcatctacacagtcaacctctacagcagtgtcctcatcctggccttcatcagtctggaccgctacctggccatcgtccacgccaccaacagtcagaggccaaggaagctgttggctgaaaaggtggtctatgttggcgtctggatccctgccctcctgctgactattcccgacttcatctttgccaacgtcagtgaggcagatgacagatatatctgtgaccgcttctaccccaatgacttgtgggtggttgtgttccagtttcagcacatcatggttggccttatcctgcctggtattgtcatcctgtcctgctattgcattatcatctccaagctgtcacactccaagggccaccagaagcgcaaggccctcaagaccacagtcatcctcatcctggctttcttcgcctgttggctgccttactacattgggatcagcatcgactccttcatcctcctggaaatcatcaagcaagggtgtgagtttgagaacactgtgcacaagtggatttccatcaccgaggccctagctttcttccactgttgtctgaaccccatcctctatgctttccttggagccaaatttaaaacctctgcccagcacgcactcacctctgtgagcagagggtccagcctcaagatcctctccaaaggaaagcgaggtggacattcatctgtttccactgagtctgagtcttcaagttttcactccagctaacacagatgtaaaagannnnnnnnnnnnnnnnnnnnnnnnnnnnnnnnnnnnnnnnnnnnnncagatataaaagactgaccaatattgtacagtttttattgcttgttgggatttttgtcttgtgtttctttagtttttgtgaagtttaattgacttatttatataaattttttttggttcatattgatgtgtgtctaggcaggacctgtggccaagttcttagttgctgtatgtctcgtggta

SEQ ID NO: 191221 - DNA, 1863 bp, Homo Sapiens; identical to SEQ ID NO: 180092
  misc_feature (60)..(69): n is a, c, g, or t
  misc_feature (282)..(308): n is a, c, g, or t

SEQ ID NO: 191222 - DNA, 1326 bp, Homo Sapiens; identical to SEQ ID NO: 180093
  misc_feature (418)..(491): n is a, c, g, or t
  misc_feature (696)..(719): n is a, c, g, or t
  misc_feature (821)..(830): n is a, c, g, or t
  misc_feature (1043)..(1069): n is a, c, g, or t

SEQ ID NO: 191223 - DNA, 582 bp, Homo Sapiens
  misc_feature (47)..(70): n is a, c, g, or t
ttggctccattttcctcttgtctacagtgcggctacaaatctgggannnnnnnnnnnnnnnnnnnnnnnncgaactacacttgggctcctttttttgtgctcgacttttccaccctttttccctccctcctgtgctgctgctttttgatctcttcgactaaaatttttttatccggagtgtatttaatcggttctgttctgtcctctccaccacccccacccccctccctccggtgtgtgtgccgctgccgctgttgccgccgccgctgctgctgctgctcgccccgtcgttacaccaacccgaggctctttgtttcccctcttggatctgttgagtttctttgttgaagaagccagcatgggtgcccagttctccaagaccgcagcgaagggagaagccgccgcggagaggcctggggaggcggctgtggcctcgtcgccttccaaagcgaacggacaggagaatggccacgtgaaggtaaacggcgacgcttcgcccgcggccgccgagtcgggcgccaaggaggagctgcaggccaacggcagcgccccggccgccgacaaggaggagcccgcggccgc

SEQ ID NO: 191224 - DNA, 810 bp, Homo Sapiens; identical to SEQ ID NO: 183803
  misc_feature (47)..(70): n is a, c, g, or t
  misc_feature (240)..(284): n is a, c, g, or t

SEQ ID NO: 191225 - DNA, 912 bp, Homo Sapiens
ttgggctgtcagggccctgcggtgtgactcgcgggctcagctggtccggccgtagcacctccgcgccgtcgccatgtcgcggtttttcaccaccggttcggacagcgagtccgagtcgtccttgtccggggaggagctcgtcaccaaacctgtcggaggcaactatggcaaacagccattgttgctgagcgaggatgaagaagataccaagagagttgtccgcagtgccaaggacaagaggtttgaggagctgaccaaccttatccggaccatccgtaatgccatgaagattcgtgatgtcaccaagtgcctggaagagtttgagctcctgggaaaagcatatgggaaggccaaaagcattgtggacaaagaaggtgtcccccggttctatatccgcatcctggctgacctagaggactatcttaatgagctttgggaagataaggaagggaagaagaagatgaacaagaacaatgccaaggctctgagcaccttgcgtcagaagatccgaaaatacaaccgtgatttcgagtcccatatcacaagctacaagcagaaccccgagcagtctgcggatgaagatgctgagaaaaatgaggaggattcagaaggctcttcagatgaggatgaggatgaggacggagtcagtgctgcaactttcttgaagaagaaatcagaagctccttctggggagagtcgcaagttcctcaaaaagatggatgatgaagatgaggactcagaagattccgaagatgatgaagactgggacacaggttccacatcttccgattccgactcagaggaggaagaagggaaacaaaccgcgctggcctcaagatttcttaaaaaggcacccaccacagatgaggacaagaaggcagccgagaagaaacgggaggacaaagctaagaa

SEQ ID NO: 191226 - DNA, 830 bp, Homo Sapiens
  misc_feature (67)..(90): n is a, c, g, or t
ctttgtacaaaaaagttgggatttctccattttcctcttgtctacagtgcggctacaaatctgggannnnnnnnnnnnnnnnnnnnnnnncgaactacacttgggctcctttttttgtgctcgacttttccaccctttttccctccctcctgtgctgctgctttttgatctcttcgactaaaatttttttatccggagtgtatttaatcggttctgttctgtcctctccaccacccccacccccctccctccggtgtgtgtgccgctgccgctgttgccgccgccgctgctgctgctgctcgccccgtcgttacaccaacccgaggctctttgtttcccctcttggatctgttgagtttctttgttgaagaagccagcatgggtgcccagttctccaagaccgcagcgaagggagaagccgccgcggagaggcctggggaggcggctgtggcctcgtcgccttccaaagcgaacggacaggagaatggccacgtgaaggtaaacggcgacgcttcgcccgcggccgccgagtcgggcgccaaggaggagctgcaggccaacggcagcgccccggccgccgacaaggaggagcccgcggccgccgggagcggggcggcgtcgccctccgcggccgagaaaggtgagccggccgccgccgctgccccccgaggccggggccagcccggtagagaaggaggcccccgcggaaggcgaggctgccgagcccggctcgccacgggccgcggagggagaggccgcgtcggccgtctcctcgacttcttcgcccaaggccgaggacagggccacgccctcgcccagcaacgagaccc

SEQ ID NO: 191227 - DNA, 1012 bp, Homo Sapiens
gagcaatgcttttttataatagccaactttgtacaaaaaagttggcaagtgcctggaagagtttgagctcctgggaaaagcatatgggaaggccaaaagcattgtggacaaagaaggtgtcccccggttctatatccgcatcctggctgacctagaggactatcttaatgagctttgggaagataaggaagggaagaagaagatgaacaagaacaatgccaaggctctgagcaccttgcgtcagaagatccgaaaatacaaccgtgatttcgagtcccatatcacaagctacaagcagaaccccgagcagtctgcggatgaagatgctgagaaaaatgaggaggattcagaaggctcttcagatgaggatgaggatgaggacggagtcagtgctgcaactttcttgaagaagaaatcagaagctccttctggggagagtcgcaagttcctcaaaaagatggatgatgaagatgaggactcagaagattccgaagatgatgaagactgggacacaggttccacatcttccgattccgactcagaggaggaagaagggaaacaaaccgcgctggcctcaagatttcttaaaaaggcacccaccacagatgaggacaagaaggcagccgagaagaaacgggaggacaaagctaagaagaagcacgacaggaaatccaagcgcctggatgaggaggaggaggacaatgaaaggcggggagtgggaaagggtccggggcggagtgccgttggttaaggagaagccaaaaatgtttgccaagggaactgagatcacccatgctgttgttatcaagaaactgaatgagatcctacaggcacgaggcaagaagggaactgatcgtgctgcccagattgagctgctgcaactgctggttcagattgcagcggaaaacaacctgggagagggcgtcattgtcaagatcaagttcaatatcatcgcctctctctatgactaaaccccacctggtcaacctacatgaagccagagatgtggggg

SEQ ID NO: 191228 - DNA, 851 bp, Homo Sapiens
ttggcgcggcgctgaggaccgcacggaaacggggaagtcaggtggccgctgccgccgccgcccgcggtttgtcgccagaaggaagatggcggatctggaggagcagttgtctgatgaagagaaggtgcgtatagcagcaaaattcatcattcatgcccctcctggagaatttaatgaggtttttaatgatgttcggttactgcttaataatgacaatcttctcagggaaggagcagcccatgcatttgcacagtataacttggaccagtttactccagtaaaaattgaaggttatgaagatcaggtattgataacagaacatggcgacttgggaaatggaaagtttttggatccaaagaacagaatctgttttaaatttgatcacttaaggaaggaggcaactgatccaagaccctgtgaagtagaaaatgcagttgaatcatggagaacttcagtagaaactgctctgagagcttacgtaaaagaacattacccgaatggagtctgcactgtgtatggcaaaaaaatagatggacagcaaaccattattgcatgcatagaaagccatcagttccaagcaaaaaatttttggaatggtcgttggaggtcagaatggaagtttacaatcactccttcaaccactcaagtggttggcatcttgaaaattcaggttcattattatgaagatggtaatgttcagctagtgagtcataaagatatacaagattcccctaacagtgtctaatgaagtgcaaacagcaaaagaatttataaagattgtagaagctgcacaaaatgaataccagactgccatccagtgagaattatcagacaatgtccgacactacttt

SEQ ID NO: 191229 - DNA, 597 bp, Homo Sapiens; identical to SEQ ID NO: 180094
  misc_feature (437)..(471): n is a, c, g, or t

SEQ ID NO: 191230 - DNA, 942 bp, Homo Sapiens
ctttgtacaaaaaagttggccagaaggaagatggcggatctggaggagcagttgtctgatgaagagaaggtgcgtatagcagcaaaattcatcattcatgcccctcctggagaatttaatgaggttttcaatgatgttcggttactgcttaataatgacaatcttctcagggaaggagcagcccatgcatttgcacagtataacttggaccagtttactccagtaaaaattgaaggttatgaagatcaggtattgataacagaacatggcgacttgggaaatggaaagtttttggatccaaagaacagaatctgttttaaatttgatcacttaaggaaggaggcaactgatccaagaccctgtgaagtagaaaatgcagttgaatcatggagaacttcagtagaaactgctctgagagcttacgtaaaagaacattacccgaatggagtctgcactgtgtatggcaaaaaaatagatggacagcaaaccattattgcatgcatagaaagccatcagttccaagcaaaaaatttttggaatggtcgttggaggtcagaatggaagtttacaatcactccttcaaccactcaagtggttggcatcttgaaaattcaggttcattattatgaagatggtaatgttcagctagtgagtcataaagatatacaagattccctaacagtgtctaatgaagtgcaaacagcaaaagaatttataaagattgtagaagctgcagaaaatgaataccagactgccatcagtgagaattatcagacaatgtcggacactactttcaaagccttacgtcgacagttgccagttacacgcactaagattgattggaacaagatccttagctacaagattggcaaagagatgcagaatgcataagatgaacattgcatgaccggatcattttagtgtctttgcgttaaaaatcat

SEQ ID NO: 191231 - DNA, 1038 bp, Homo Sapiens; identical to SEQ ID NO: 183806

SEQ ID NO: 191232 - DNA, 952 bp, Homo Sapiens; identical to SEQ ID NO: 183807

SEQ ID NO: 191233 - DNA, 933 bp, Homo Sapiens; identical to SEQ ID NO: 183808

SEQ ID NO: 191234 - DNA, 2737 bp, Homo Sapiens; identical to SEQ ID NO: 183809
  misc_feature (2024)..(2083): n is a, c, g, or t

SEQ ID NO: 191235 - DNA, 922 bp, Homo Sapiens; identical to SEQ ID NO: 183810

SEQ ID NO: 191236 - DNA, 624 bp, Homo Sapiens
  misc_feature (527)..(552): n is a, c, g, or t
ctttgtacaaaaaagttggatccatgtgtgccactcaaaatccttacctcttccggagatgtagcaaaacgcatggagtgtgtattgttcccagtgacacttcagagagctggtagttagtagcatgttgagccaggcctgggtctgtgtctcttttctctttctccttagtcttctcatagcattaactaatctattgggttcattattggaattaacctggtgctggatattttcaaattgtatctagtgcagctgattttaacaataactactgtgttcctggcaatagtgtgttctgattagaaatgaccaatattatactaagaaaagatacgactttattttctggtagatagaaataaatagctatatccatgtactgtagtttttcttcaacatcaatgttcattgtaatgttactgatcatgcattgttgaggtggtctgaatgttctgacattaacagttttccatgaaaacgttttattgtgtttttaatttatttattaagatggattctcagannnnnnnnnnnnnnnnnnnnnnnnnnctaccttgaggtcttttgacatgtggaaggtgaatttgaatgaaaaatttaagcattgtttgcttattgttc

SEQ ID NO: 191237 - DNA, 1382 bp, Homo Sapiens; identical to SEQ ID NO: 183812

SEQ ID NO: 191238 - DNA, 3181 bp, Homo Sapiens; identical to SEQ ID NO: 183814
  misc_feature (2928)..(2936): n is a, c, g, or t

SEQ ID NO: 191239 - DNA, 919 bp, Homo Sapiens
ttggggctccgtcgtggaagcaggactgcgccgcgtcttcctcaaggttgagaacaaaaacatgcacctggagtttccccggagccctctgtgtggttgagcttcggtggaatttcggggctcttggctgccagccgcgcttgcctggtagcaacagaaaccagtcctgctcgcctccgtggacatttcattaccatccagaagtgtctcccactgaaggcatccgtggttgtttttaagccacaaaaaagccacacccaagatcacctgacacccaccctgacaagtgtccatgatgctgggccctgagggaggtgaaggctttgtggtcaagctccgtggcctgccctggtcctgctctgttgaggacgtgcagaacttcctctctgactgcacgattcatgatggggccgcaggtgtccatttcatctacactagagagggcaggcagagtggtgaggcttttgttgaacttggatcagaagatgatgtaaaaatggccctgaaaaaagacagggaaagcatgggacaccggtacattgaggtgttcaagtcccacagaaccgagatggattgggtgttgaagcacagtggtcccaacagtgccgacagcgccaacgatggcttcgtgcggcttcgaggactcccatttggatgcacaaaggaagaaattgttcagttcttctcagggttggaaattgtgccaaacgggatcacattgcctgtggaccccgaaggcaagattacaggggaagcgttcgtgcagtttgcctcgcagagttagctgagaaggctctaaggaaacacaaggagaggatagggcacaggtacattgaggtgtttgagagcagcaggaggaagttaggtcatactcagatccccctctgaagttcatgtccgtgcagcggccaagggccct

SEQ ID NO: 191240 - DNA, 915 bp, Homo Sapiens
gcgccgcgtcttcctcaaggtggggttcggggggccaccgaatcgctgtcacgccggcaggttgagaacaaaaacatgcacctggagtttccccggagccctctgcgtggttgagcttcggtggaatttcggggctcttggctgccagccgcgcttgcctggtagcaacagaaaccagtcctgctcgcctccgtggacatttcattaccatccagaagtgtctcccactgaaggcatccgtggttgtttttaagccacaaaaaagccacacccaagatcacctgacacccaccctgacaagtgtccatgatgctgggccctgagggaggtgaaggctttgtggtcaagctccgtggcctgccctggtcctgctctgttgaggacgtgcagaacttcctctctgactgcacgattcatgatggggccgcaggtgtccatttcatctacactagagagggcaggcagagtggtgaggcttttgttgaacttggatcagaagatgatgtaaaaatggccctgaaaaaagacagggaaagcatgggacaccggtacattgaggtgttcaagtcccacagaaccgagatggattgggtgttgaagcacagtggtcccaacagtgccgacagcgccaacgatggcttcgtgcggcttcgaggactcccatttggatgcacaaaggaagaaattgttcagttcttctcagggttggaaattgtgccaaacgggatcacattgcctgtggaccccgaaggcaagattacaggggaagcgttcgtgcagtttgcctcgcaggagttagctgagaaggctctagggaaacacaaggagaggatagggcacaggtacattgaggtgtttaagagcagccaggaggaagttaggtcatactcagatccccctctgaagttcatgtcc

SEQ ID NO: 191241 - DNA, 2216 bp, Homo Sapiens; identical to SEQ ID NO: 183815

SEQ ID NO: 191242 - DNA, 1687 bp, Homo Sapiens; identical to SEQ ID NO: 183817
  misc_feature (124)..(136): n is a, c, g, or t
  misc_feature (1224)..(1285): n is a, c, g, or t

SEQ ID NO: 191243 - DNA, 1127 bp, Homo Sapiens
  misc_feature (124)..(136): n is a, c, g, or t
ttggggcttcgcggttcggtcctcgcacccggcagccgccactggtgctgagctgctaggaagcccctatcgccgagctcgttggagcttgaacccattgtcacccctccgactcaccggcccnnnnnnnnnnnnncatggttgaagcagatcgcccaggaaagctcttcattggtgggcttaatacggaaacaaatgagaaagctcttgaagcagtatttggcaaatatggcgaatagtggaagtactcttgatgaaagaccgtgaaaccaacaaatcaagaggatttgcttttgtcacctttgaaagcccagcagacgctaaggatgcagccagagacatgaatggaaagtcattagatggaaaagccatcaaggtggaacaagccaccaaaccatcatttgaaagtggtagacgtggaccgcctccacctccaagaagtagaggccctccaagaggtcttagaggtggaagaggaggaagtggaggaaccaggggacctccctcacggggaggacacatggatgacggtggatattccatgaattttaacatgagttcttccaggggaccactcccagtaaaaagaggaccaccaccaagaagtgggggtcctcctcctaagagatctgcaccttcaggaccagttcgcagtagcagtggaatgggaggaagagctcctgtatcacgtggaagagatagttatggaggtccacctcgaagggaaccgctgccctctcgtagagatgtttatttgtccccaagagatgatgggtattctactaaagacagctattcaagcagagattacccaagttctcgtgatactagagattatgcaccaccaccacgagattatacttaccgtgattatggtcattccagttcacgtgatgactatccatcaagaggatatagcgatagagatggatatggtcgtgatcgtgactattcagatcatccaagtggaggttcctacagagattcatatgagagttatggttggtgattttgctcattatggtcgtggagtgctgattgattcacagtagataaagctggcagtaagaaatgctaagagttgttgaagcagaagcggctgattgtcaataagtcactacagttgc

SEQ ID NO: 191244 - DNA, 1423 bp, Homo Sapiens; identical to SEQ ID NO: 183819

SEQ ID NO: 191245 - DNA, 929 bp, Homo Sapiens
  misc_feature (42)..(55): n is a, c, g, or t
aaaaagttggatctttataatttccacttcagatgtttatgnnnnnnnnnnnnnngtctccaatgatggtaaaaataaaaactacgcattacttaaaggagtttccctcacatgtaaacactgttaggaagtctggattaagttgaaagtcctgttttaactttttttctctcatataccaaacactctgtatttctcttaaagaagccctttaagagaaagccctaattttatatctgacagtaaagtttgctgcaagtgtatgagttcaaacacatcccttgttttctgtccctaggggaagtcatgtagttttagcttggctccagtgttaatattatattcagtagcagccttagaagagtggtctaagacttgaacctggagcaattttatagcacagaatcctacgaagataggactgtgaacatttgttttctttttcgtgtgtgtcaaactaactggtttttgctttaccaataaaatgtcctcggcagagtaaattttaaacgtgaaaattatagatcttgatattgaatccatcagtgattcaagagatacacctatttgcctaaaacaacctaagatgtattggttatggaatcatgtgttggataggttcttaagacctgtttcctcaaatcttgacacagttttcaagggtggcttattgacttgcacggttgggcagataatccagatttacctaagattgggtaaaaaagtcatctgtgactttgctggcagggcatttgctaagtggagtacaggatctaaaagggttttcttagaaagggcaatattgtccaatgaagtaagcagaaggactctgggttagaagcatctgcacaaaactggtgagacctactctccactgctctgcagctgggatggctgatggccaggctgagcagtggggaagcaggttt

SEQ ID NO: 191246 - DNA, 2008 bp, Homo Sapiens; identical to SEQ ID NO: 180098
  misc_feature (224)..(238): n is a, c, g, or t
  misc_feature (1378)..(1423): n is a, c, g, or t
  misc_feature (1528)..(1581): n is a, c, g, or t

SEQ ID NO: 191247 - DNA, 1902 bp, Homo Sapiens; identical to SEQ ID NO: 180099
  misc_feature (404)..(431): n is a, c, g, or t
  misc_feature (450)..(684): n is a, c, g, or t
  misc_feature (1781)..(1795): n is a, c, g, or t

SEQ ID NO: 191248 - DNA, 1495 bp, Homo Sapiens; identical to SEQ ID NO: 180100
  misc_feature (243)..(273): n is a, c, g, or t
  misc_feature (1240)..(1293): n is a, c, g, or t

SEQ ID NO: 191249 - DNA, 1210 bp, Homo Sapiens; identical to SEQ ID NO: 183824
  misc_feature (1094)..(1142): n is a, c, g, or t

SEQ ID NO: 191250 - DNA, 1788 bp, Homo Sapiens; identical to SEQ ID NO: 183826
  misc_feature (1034)..(1070): n is a, c, g, or t
  misc_feature (1079)..(1091): n is a, c, g, or t

SEQ ID NO: 191251 - DNA, 2256 bp, Homo Sapiens; identical to SEQ ID NO: 183827
  misc_feature (1089)..(1353): n is a, c, g, or t
  misc_feature (1934)..(1970): n is a, c, g, or t
  misc_feature (1979)..(1991): n is a, c, g, or t

SEQ ID NO: 191252 - DNA, 1148 bp, Homo Sapiens
ttggcgaaggctaggggcgcggctgccgggtggctgcgcggtgctgcccccggaccgaggggcagccaacccaatgaaaccaccgcgtgttcgcgcctggtagagatttctcgaagacaccagtgggcccgttccgagccctctggaccgcccgtgtggaaccaaacctgcgcgcgtggccgggccgtgggacaacgaggccgcggagactgtttcaatgcatcaaagctactgacatctcatggcatgggcatccaggttccgctgaatgcaacagagttcaactatctctgtccagccatcatcaaccaaattgatgctagatcttgtctgattcatacaagtgaaaagaaggctgaaatccctccaaagacctattcattacaaatagcctgggttggtggttttatagccatttccatcatcagtttcctgtctctgctgggggttatcttagtgcctctcatgaatcgggtgtttttcaaatttctcctgagtttccttgtggcactggccgttgggactttgagtggtgatgcttttttacaccttcttccacattctcatgcaagtcaccaccatagtcatagccatgaagaaccagcaatggaaatgaaaagaggaccacttttcagtcatctgtcttctcaaaacatagaagaaagtgcctattttgattccacgtggaagggtctaacagctctaggaggcctgtatttcatgtttcttgttgaacatgtcctcacattgatcaaacaatttaaagataagaagaaaaagaatcagaagaaacctgaaaatgatgatgatgtggagattaagaagcagttgtccaagtatgaatctcaactttcaacaaatgaggagaaagtagatacagatgatcgaactgaaggctatttacgagcagactcacaagagccctcccactttgattctcagcagcctgcagtcttggaagaagaagaggtcatgatagctcatgctcatccacaggaagtctacaatgaatatgtacccagagggtgcaagaataaatgccattcacatttccacgatacactcggccagtcagacgatctcattcaccaccatcatgactaccatcatattctccatcatcaccaccaccaaaaccaccatcctca

SEQ ID NO: 191253 - DNA, 2395 bp, Homo Sapiens; identical to SEQ ID NO: 183829

SEQ ID NO: 191254 - DNA, 1884 bp, Homo Sapiens; identical to SEQ ID NO: 183830
  misc_feature (85)..(93): n is a, c, g, or t
  misc_feature (1663)..(1673): n is a, c, g, or t
  misc_feature (1707)..(1735): n is a, c, g, or t

SEQ ID NO: 191255 - DNA, 1336 bp, Homo Sapiens; identical to SEQ ID NO: 183831
  misc_feature (735)..(745): n is a, c, g, or t
  misc_feature (779)..(807): n is a, c, g, or t

SEQ ID NO: 191256 - DNA, 1428 bp, Homo Sapiens; identical to SEQ ID NO: 183833
  misc_feature (621)..(629): n is a, c, g, or t
  misc_feature (1044)..(1060): n is a, c, g, or t

SEQ ID NO: 191257 - DNA, 541 bp, Homo Sapiens
ttggtaattttatcccctaaatcataaatattacttaatcaggcctgattctacttttgaaaattacagttcttgaaatgcagataatgtttactttgaaaacaaatgtcatgaatgatttccagtttttaaagctatatgtttcactgcttcatatctctgtccactttctgaatgagaacttattttgtgcctagagctctcactcactgataatgcttattaccttctgggcatttattccaaagtgggatcaactgtacgcctttggtatctgaccataaagtcttttgctccgctgacatttgggtgatgtcttcacatggaaatataataaaaataaaaatctagtttaatactgcattatttattttcctaaggctaaagaggagcagtcctatgcttttattcagcatcctttatctgtgacttcatgctctgataactgcctttccttccttctgtgcctttgaatacaaatttcagttctgcaaaagtgaaacattaaacattgccaacgcgtaaaaagtaaaattaaaaa

SEQ ID NO: 191258 - DNA, 428 bp, Homo Sapiens
  misc_feature (132)..(186): n is a, c, g, or t
actttgtacaaaaaagttgggttaaaagtggcagaacaggaaagacgaattaaaaataacattttttaagcgacataaggatgaaatactgatgaatctctgtgacattacagggaaaaaaatatagttttnnnnnnnnnnnnnnnnnnnnnnnnnnnnnnnnnnnnnnnnnnnnnnnnnnnnnnnaagtcataaatattacttaatcaggcctgattctacttttgaaaattacagttcttgaaatgcagataatgtttactttgaaaacaaatgtcatgaatgatttccagtttttaaagctatatgtttcactgcttcatatctctgtcttttttctgaatgagaacttattttgtgcctagagctccccctcactgataatgcttattaccttcggggcatttattccaaagtgggatcaactg

SEQ ID NO: 191259 - DNA, 1373 bp, Homo Sapiens
ccaactttgtacaaaaaagttggagccgccgccgattccggatctcattgccacgcgcccccgacgaccgcccgacgtgcattcccgattccttttggttccaagtccaatatggcaactctaaaggatcagctgatttataatcttctaaaggaagaacagaccccccagaataagattacagttgttggggttggtgctgttggcatggcctgtgccatcagtatcttaatgaaggacttggcagatgaacttgctcttgttgatgtcatcgaagacaaattgaagggagagatgatggatctccaacatggcagccttttccttagaacaccaaagattgtctctggcaaagactataatgtaactgcaaactccaagctggtcattatcacggctggggcacgtcagcaagagggagaaagccgtcttaatttggtccagcgtaacgtgaacatctttaaattcatcattcctaatgttgtaaaatacagcccgaactgcaagttgcttattgtttcaaatccagtggatatcttgacctacgtggcttggaagataagtggttttcccaaaaaccgtgttattggaagtggttgcaatctggattcagcccgattccgttacctgatgggggaaaggctgggagttcacccattaagctgtcatgggtgggtccttggggaacatggagattccagtgtgcctgtatggagtggaatgaatgttgctggtgtctctctgaagactctgcacccagatttagggactgataaagataaggaacagtggaaagaggttcacaagcaggtggttgagagtgcttatgaggtgatcaaactcaaaggctacacatcctgggctattggactctctgtagcagatttggcagagagtataatgaagaatcttaggcgggtgcacccagtttccaccatgattaagggtctttacggaataaaggatgatgtcttccttagtgttccttgcattttgggacagaatggaatctcagaccttgtgaaggtgactctgacttctgaggaagaggcccgtttgaagaagagtgcagatacactttgggggatccaaaaggagctgcaattttaaagtcttctgatgtcatatcatttcactgtctaggctacaacaggattctaggtggaggttgtgcatgttgtcctttttatctgatctgtgattaaagcagtaatattttaagatggactgggaaaaacatcaactcctgaagttagaaataaaaatggtttgtaaaatccacagctatatcctgatgctggatggtattaatcttgtgtagtcttcaactggttagtgtgaaatagttctgccacctctgacgcaccactgcc

SEQ ID NO: 191260 - DNA, 850 bp, Homo Sapiens
gccaactttgtacaaaaaagttggcacatcctgccgctattggactctctgtagcagatttggcagagagtataatgaagaatcttaggcgggtgcacccagtttccaccatgattaagggtctttacggaataaaggatgatgtcttccttagtgttccttgcattttgggacagaatggaatctcagaccttgtgaaggtgactctgacttctgaggaagaggcccgtttgaagaagagtgcagatacactttgggggatccaaaaggagctgcaattttaaagtcttctgatgtcatatcatttcactgtctaggctacaacaggattctaggtggaggttgtgcatgttgtcctttttatctgatctgtgattaaagcagtaatattttaagatggactgggaaaaacatcaactcctgaagttagaaataagaatggtttgtaaaatccacagctatatcctgatgctggatggtattaatcttgtgtagtcttcaactggttagtgtgaaatagttctgccacctctgacgcaccactgccaatgctgtacgtactgcatttgccccttgagccaggtggatgtttaccgtgtgttatataacttcctggctccttcactgaacatgcctagtccaacattttttcccagtgagtcacatcctgggatccagtgtataaatccaatatcatgtcttgtgcataattcttccaaaggatcttattttgtgaactatatcagtagtgtacattaccatataatgtaaaaagatctacatacaaacaatgcaaccaactatccaagtgttataccaactaaaacccccaataaacccttgaacagtg

SEQ ID NO: 191261 - DNA, 1731 bp, Homo Sapiens; identical to SEQ ID NO: 183835
  misc_feature (158)..(233): n is a, c, g, or t
  misc_feature (408)..(534): n is a, c, g, or t
  misc_feature (1020)..(1052): n is a, c, g, or t

SEQ ID NO: 191262 - DNA, 1128 bp, Homo Sapiens
  misc_feature (873)..(905): n is a, c, g, or t
ttggagggaagtgaatcaggcgccgggtagtgggttgctgggctgggcttgctgaggtagaggcagcgccaagaagaggcctttgccgctggtcgggattgggatgtcgaagaacacagtgtcgtcggcccgcttccggaaggtggacgtggatgaatatgacgagaacaagttcgtggacgaagaagatgggggcgacggccaggccgggcccgacgagggcgaggtggactcctgcctgcggcaaggaaacatgacagctgccctacaggcaactctgaagaacccccctatcaacaccaagagtcaggcagtgaaggaccgggcaggcagcattgtcttgaaggtgctcatctcttttaaagctaatgatatagaaaaggcagttcaatctctggacaagaatggtgtggatctcctaatgaagtatatttataaaggatttgagagcccgtctgacaatagcagtgctatgttactgcaatggcatgaaaaggcacttgctgctggaggagtagggtccattgttcgtgtcttgactgcaagaaaaactgtgtagtctggcaggaagtggattatctgcctcgggagtgggaattgctggtacaaagaccaaaacaaccaaatgccaccgctgccctgtgggtagcatctgtttctctcagctttgccttcttgctttttcatatctgtaaagaaaaaaattacatatcagttgtcctttaatgaaaattgggataatatagaagaaattgtgttaaaatagaagtgtttcatcctttcaaaaccatttcagtgatgtttataccaatctgtatatagtataatttacattcaagtttaattgtgcaacttttaacccctgttggctgnnnnnnnnnnnnnnnnnnnnnnnnnnnnnnnnnaactaatactgagagatttggtcagaatttgaggccagtttcctagctcattgctagtcagaaatgatatttataaaaaatatgagagactggcagctattaacattgcaaaactggaccatatttcccttatttaataagcaaaatatgtttttggaataagtggtgggtgaataccactgccaagttatagctttgtttttgcttgcctcctgattatctg

SEQ ID NO: 191263 - DNA, 911 bp, Homo Sapiens
ccccataatgccaactttgtacaaaaaagttgggagtgggttgctgggctgggcttgctgaggtagaggcagcgccaagaagaggcctttgccgctggtcgggattgggatgtcgaagaacacagtgtcgtcggcccgcttccggaaggtggacgtggatgaatatgacgagaacaagttcgtggacgaagaagatgggggcgacggccaggccgggcccgacgagggcgaggtggactcctgcctgcggcaaggaaacatgacagctgccctacaggcagctctgaagaacccccctatcaacaccaagagtcaggcagtgaaggaccgggcaggcagcattgtcttgaaggtgctcatctcttttaaagctaatgatatagaaaaggcagttcaatctctggacaagaatggtgtggatctcctaatgaagtatatttataaaggatttgagagcccgtctgacaatagcagtgctatgttactgcaatggcatgaaaaggcacttgctgctggaggagtagggtccattgttcgtgtcttgactgcaagaaaaactgtgtagtctggcaggaagtggattatctgcctcgggagtgggaattgctggtacaaagaccaaaacaaccaaatgccaccgctgccctgtgggtagcatctgtttctctcagctttgccttcttgctttttcatatctgtaaagaaaaaaattacatatcagttgtcctttaatgaaaattgggataatatagaagaaattgtgttaaaatagaagtgtttcatcctttcaaaaccatttcagtgatgtttataccaatctgtatatagtataatttacattcaagtttaattgtgcaacttttaacccctgttggctggttttttgttctgttttggtttgtattattttt

SEQ ID NO: 191264 - DNA, 685 bp, Homo Sapiens
taaaagccaactttgtacaaaaaagttggaataatcatggcccctcaatttatttgtggtcacccagggttcagagcaagaagtcttgctttatacaaatgtatccataaaatatcagagcttgttgggcatgaacatcaaacttttgttccactaatatggctctgtttggaaaaaactgcaaatcagaaagaatgatttgcagaaagaaagaaaaactatggtgtaatttaaactctgggcagcctctgaatgaaatgctactttctttagaaatataatagctgccttagacattatgaggtatacaactagtatttaagataccatttaatatgccccgtaaatgtcttcagtgttcttcagggtagttgggatctcaaaagatttggttcagatccaaacaaatacacattctgtgttttagctcagtgttttctaaaaaaagaaactgccacacagcaaaaaattgtttactttgttggacaaaccaaatcagttctcaaaaaatgaccggtgcttataaaaagttataaatatcgagtagctctaaaacaaaccacctgaccaagagggaagtgagcttgtgcttagtatttacattggatgccagttttgtaatcactgacttatgtgcaaactggtgcagaaattctataaactctttgctgtttttgatacctgc

SEQ ID NO: 191265 - DNA, 738 bp, Homo Sapiens
actttgtacaaaaaagttggagagcaagaagtcttgctttatacaaatgtatccataaaatatcagagcttgttgggcatgaacatcaaacttttgttccactaatatggctctgtttggaaaaaactgcaaatcagaaagaatgatttgcagaaagaaagaaaaactatggtgtaatttaaactctgtggagcctctgaatgaaatgctactttctttagaaatataatagctgccttagacattatgaggtatacaactagtatttaagataccatttaatatgccccgtaaatgtcttcagtgttcttcagggtagttgggatctcaaaagatttggttcagatccaaacaaatacacattctgtgttttagctcagtgttttctaaaaaaagaaactgccacacagcaaaaaattgtttactttgttggacaaaccaaatcagttctcaaaaaatgaccggtgcttataaaaagttataaatatcgagtagctctaaaacaaaccacctgaccaagagggaagtgagcttgtgcttagtatttacattggatgccagttttgtaatcactgacttatgtgcaaactggtgcaaaaattctataaactctttgctgtttttgatacctgctttttgtttcattttgttttgttttgtaaaaatgataaaacttcagaacataatctgtcactgttgaattaatgaataaaagcacaagaaagccaccactttcgt

SEQ ID NO: 191266 - DNA, 1432 bp, Homo Sapiens; identical to SEQ ID NO: 180102
  misc_feature (1327)..(1335): n is a, c, g, or t

SEQ ID NO: 191267 - DNA, 3027 bp, Homo Sapiens; identical to SEQ ID NO: 180104

SEQ ID NO: 191268 - DNA, 1441 bp, Homo Sapiens; identical to SEQ ID NO: 183837

SEQ ID NO: 191269 - DNA, 1299 bp, Homo Sapiens; identical to SEQ ID NO: 183838
  misc_feature (1210)..(1222): n is a, c, g, or t

SEQ ID NO: 191270 - DNA, 829 bp, Homo Sapiens
  misc_feature (457)..(517): n is a, c, g, or t
ctttgtacaaaaaagttggcttccttgggaggataatttgaaagatcctaaatatgttagagattccaaaattagatacagagaaaatattgcaagtttgatggacaaatgttttcctgagaaaaacaaaccaggtgaaattgccaaatacatggaaacagtgaaattactagactacactgaaaaacctctttatgaaaatttacgtgacattcttttgcaaggactaaaagctataggaagtaaggatgatggcaaattggacctcagtgttgtggagaatggaggtttgaaagcaaaaacaataacaaagaagcgaaagaaagaaattgaagaaagcaaggaacctggtgttgaagatacggaatggtcaaacacacagacagaggaggccatacagacccgttcaagaaccagaaagagagtccagaagtaattcagatgctgtgaaccagannnnnnnnnnnnnnnnnnnnnnnnnnnnnnnnnnnnnnnnnnnnnnnnnnnnnnnnnnnnncctgtgagtcttgcgaggtggaagtaatgattaaatactcatgtgttcagaaaacataaactttttttataaaaatattttgtacaattcattaaaggctaatttatgaaatttgaaaatcttcaggttatactccttaagttatcccaaagccgtgtgtttgtgatgttttggagtacatatatatgaaaattattatgacacgcacttttctaatcattgtacatttctcagagtggataaaaatgtttgacaaagtcctcacttttaaggaaatgcaaagcttaaaataaaactctcttttgtttgatg

SEQ ID NO: 191271 - DNA, 1600 bp, Homo Sapiens; identical to SEQ ID NO: 183841
  misc_feature (137)..(216): n is a, c, g, or t
  misc_feature (1307)..(1316): n is a, c, g, or t

SEQ ID NO: 191272 - DNA, 1157 bp, Homo Sapiens; identical to SEQ ID NO: 180108
  misc_feature (914)..(934): n is a, c, g, or t

SEQ ID NO: 191273 - DNA, 763 bp, Homo Sapiens; identical to SEQ ID NO: 183844

SEQ ID NO: 191274 - DNA, 862 bp, Homo Sapiens
gccaactttgtacaaaaaagttggctttaaagaaccgagagaggaggccccaccctcctggcagcagatgcctggggcaaggccaggggaaactgggggggcctcagggacaggcctggaaaggccacgatggctgctgaattcaaacaaggagtccctccagcctgaataacacgtggcacaaatgggcccggcctttggcagaggagcaagtgatatgatgtgtaaagtatgttggtggtgaaagcaaggttccccaggagaggggagggactggcccctgggaagctctgagatgaggctgtggcccagctgtagtcctgaccttcctcttctttaaccctttagccctaggatggctttggtgggagaggggatagaagcccatgacttcagacagactttctcttggcagatgcaggcgggcctcctcccaggctgctccagacatgggggttggggatggggggcaccttgcagccccttcctgctggggctccctccttgtagcaccccccttgcggctcagctctggtttcctctcccaggctcacccaggctctgctcaggctgggaggcagagggcacaaaccttataattttttaaatgaaaaaccgctgctgctggctgtggctagagccccctggggctgctggagctgctgcctctgttctggaggacgagccttctccttatctgctgcccatctttccaggaagtcaggatggagtcagaacaactacagtcatcccccgtggtgtctgcacatcactccagccccataaagagtgtcatgttagctgagtcaccatttggcttcggcctggaaatagtgtgattagaacactgatcgtgtgcgag

SEQ ID NO: 191275 - DNA, 1513 bp, Homo Sapiens; identical to SEQ ID NO: 183848

SEQ ID NO: 191276 - DNA, 1113 bp, Homo Sapiens; identical to SEQ ID NO: 183851
  misc_feature (421)..(509): n is a, c, g, or t
  misc_feature (715)..(731): n is a, c, g, or t

SEQ ID NO: 191277 - DNA, 1608 bp, Homo Sapiens
  misc_feature (1202)..(1286): n is a, c, g, or t
  misc_feature (1497)..(1514): n is a, c, g, or t
ttggcagagccgctgccggaggggcgttttaaagggcccgcgcgttgccgccccctcggcccgccatgctgctatccgtgccgctgctgctcggcctcctcggcctggccgtcgccgagcctgccgtctacttcaaggagcagtttctggacggagacgggtggacttcccgctggatcgaatccaaacacaagtcagattttggcaaattcgttctcagttccggcaagttctacggtgacgaggagaaagataaaggtttgcagacaagccaggatgcacgcttttatgctctgtcggccagtttcgagcctttcagcaacaaaggccagacgctggtggtgcagttcacggtgaaacatgagcagaacatcgactgtgggggcggctatgtgaagctgtttcctaatagtttggaccagacagacatgcacggagactcagaatacaacatcatgtttggtcccgacatctgtggccctggcaccaagaaggttcatgtcatcttcaactacaagggcaagaacgtgctgatcaacaaggacatccgttgcaaggatgatgagtttacacacctgtacacactgattgtgcggccagacaacacctatgaggtgaagattgacaacagccaggtggagtccggctccttggaagacgattgggacttcctgccacccaagaagataaaggatcctgatgcttcaaaaccggaagactgggatgagcgggccaagatcgatgatcccacagactccaagcctgaggactgggacaagcccgagcatatccctgaccctgatgctaagaagcccgaggactgggatgaagagatggacggagagtgggaacccccagtgattcagaaccctgagtacaagggtgagtggaagccccggcagatcgacaacccagattacaagggcacttggatccacccagaaattgacaaccccgagtattctcccgatcccagtatctatgcctatgataactttggcgtgctgggcctggacctctggcaggtcaagtctggcaccatctttgacaacttcctcatcaccaacgatgaggcatacgctgaggagtttggcaacgagacgtggggcgtaacaaaggcagcagagaaacaaatgaaggacaaacaggacgaggagcagaggcttaaggaggaggaagaagacaagaaacgcaaatatttnnnnnnnnnnnnnnnnnnnnnnnnnnnnnnnnnnnnnnnnnnnnnnnnnnnnnnnnnnnnnnnnnnnnnnnnnnnnnnnnnnnnnagatgtccccggccaggccaaggacgagctgtagagaggcctgcctccagggctggactgaggcctgagcgctcctgccgcagagcttgccgcgccaaataatgtctctgtgagactcgagaactttcatttttttccaggctggttcggatttggggtggattttggttttgttcccctcctccactctcccccaccccctccccgcccnnnnnnnnnnnnnnnnnnaaactggtattttatctttgattctccttcagccctcacccctggttctcatctttcttgatcaacatcttttcttgcctctgtccccttctct

SEQ ID NO: 191278 - DNA, 1634 bp, Homo Sapiens
  misc_feature (1162)..(1279): n is a, c, g, or t
  misc_feature (1490)..(1508): n is a, c, g, or t
ctttgtacaaaaaagttgggttttaaagggcccgcgcgttgccgccccctcggcccgccatgctgctatccgtgccgctgctgctcggcctcctcggcctggccgtcgccgagcctgccgtctacttcaaggagcagtttctggacggagacgggtggacttcccgctggatcgaatccaaacacaagtcagattttggcaaattcgttctcagttccggcaagttctacggtgacgaggagaaagataaaggtttgcagacaagccaggatgcacgcttttatgctctgtcggccagtttcgagcctttcagcaacaaaggccagacgctggtggtgcagttcacggtgaaacatgagcagaacatcgactgtgggggcggctatgtgaagctgtttcctaatagtttggaccagacagacatgcacggagactcagaatacaacatcatgtttggtcccgacatctgtggccctggcaccaagaaggttcatgtcatcttcaactacaagggcaagaacgtgctgatcaacaaggacatccgttgcaaggatgatgagtttacacacctgtacacactgattgtgcggccagacaacacctatgaggtgaagattgacaacagccaggtggagtccggctccttggaagacgattgggacttcctgccacccaagaagataaaggatcctgatgcttcaaaaccggaagactgggatgagcgggccaagatcgatgatcccacagactccaagcctgaggactgggacaagcccgagcatatccctgaccctgatgctaagaagcccgaggactgggatgaagagatggacggagagtgggaacccccagtgattcagaaccctgagtacaagggtgagtggaagccccggcagatcgacaacccagattacaagggcacttggatccacccagaaattgacaaccccgagtattctcccgatcccagtatctatgcctatgataactttggcgtgctgggcctggacctctggcaggtcaagtctggcaccatctttgacaacttcctcatcaccaacgatgaggcatacgctgaggagtttggcaacgagacgtggggcgtaacaaaggcagcagagaaacaaatgaaggacaaacaggacgaggagcagaggcttannnnnnnnnnnnnnnnnnnnnnnnnnnnnnnnnnnnnnnnnnnnnnnnnnnnnnnnnnnnnnnnnnnnnnnnnnnnnnnnnnnnnnnnnnnnnnnnnnnnnnnnnnnnnnnnnnnnnnagatgtccccggccaggccaaggacgagctgtagagaggcctgcctccagggctggactgaggcctgagcgctcctgccgcagagctggccgcgccaaataatgtctctgtgagactcgagaactttcatttttttccaggctggttcggatttggggtggattttggttttgttcccctcctccactctcccccaccccctccccgcccnnnnnnnnnnnnnnnnnnnaaactggtattttatctttgattctccttcagcccctcacccctggttctcatctttcttgatcacatcttttcttgcctctgtccccttctctcatctcttagcttcccctcaaacctggggggg

SEQ ID NO: 191279 - DNA, 620 bp, Homo Sapiens; identical to SEQ ID NO: 183854
  misc_feature (159)..(169): n is a, c, g, or t

SEQ ID NO: 191280 - DNA, 3309 bp, Homo Sapiens; identical to SEQ ID NO: 183855

SEQ ID NO: 191281 - DNA, 1196 bp, Homo Sapiens; identical to SEQ ID NO: 183856
  misc_feature (1050)..(1087): n is a, c, g, or t

SEQ ID NO: 191282 - DNA, 1302 bp, Homo Sapiens
  misc_feature (1187)..(1224): n is a, c, g, or t
ctttgtacaaaaaagttggggcttttctagccacttgctttgcagctcttgtgatcttctcggacagttcaacctgcttcagctggatcctgattgcagaggatgctgtcagggggaagcacaatttgaaaccaaaaagctgtatgcaggagctattcttgaagtttgtggatgaaaattgggaaggttccctcaagtccaagcttttgttaggagtgataaacccaaactgttcagaggactgcaaatcaagtatgtccgtggttcagaccctgtattaaagcttttggacgacaatgggaacattgctgaagaactgagcattctcaaatggaacacagacagtgtagaagaattcctgagtgaaaagttggaacgcatataaatcttgcttaaattttgtcctatccttttgttaccttatcaaatgaaatattacagcacctagaaaataatttagttttgcttgcttccattgatcagtcttttacttgaggcattaaatatctaattaaatcgtgaaatggcagtatagtccatgatatctaaggagttggcaagcttaacaaaacccattttttataaatgtccatcctcctgcatttgttgataccactaacaaaatgctttgtaacagacttgcggttaattatgcaaatgatagtttgtgataattggtccagttttacgaacaacagatttctaaattagagaggttaacaagacagatgattactatgcctcatgtgctgtgtgctctttgaaaggaatgacagcagactacaaagcaaataagatatactgagcctcaacagattgcctgctcctcagagtctctcctatttttgtattacccagctttctttttaatacaaatgttatttatagtttacaatgaatgcactgcataaaaactttgtagcttcattattgtaaaacatattcaagatcctacagtaagagtgaaacattcacaaagatttgcgttaatgaagactacacagaaaacctttctagggatttgtgtggatcagatacatacttggcaaatttttgagttttacattcttacagaaaagtccatttaaaagtgatcatttgtaagaccaaaatataaataaaaagtttcaaaaatctatctgaatttggaattcttctggtttgttctttcatgtttaaaaatgatnnnnnnnnnnnnnnnnnnnnnnnnnnnnnnnnnnnnnnagccaaaatgtaaaaatggctgtaatatttaaaacttataacatcttattgttggtaatagtgctttatatttgtctg

SEQ ID NO: 191283 - DNA, 1198 bp, Homo Sapiens; identical to SEQ ID NO: 183859

SEQ ID NO: 191284 - DNA, 1698 bp, Homo Sapiens; identical to SEQ ID NO: 183861

SEQ ID NO: 191285 - DNA, 1051 bp, Homo Sapiens; identical to SEQ ID NO: 180115

SEQ ID NO: 191286 - DNA, 1393 bp, Homo Sapiens; identical to SEQ ID NO: 183862

SEQ ID NO: 191287 - DNA, 1270 bp, Homo Sapiens; identical to SEQ ID NO: 183863
  misc_feature (64)..(84): n is a, c, g, or t
  misc_feature (278)..(313): n is a, c, g, or t
  misc_feature (470)..(535): n is a, c, g, or t

SEQ ID NO: 191288 - DNA, 618 bp, Homo Sapiens; identical to SEQ ID NO: 183865
  misc_feature (504)..(515): n is a, c, g, or t

SEQ ID NO: 191289 - DNA, 1693 bp, Homo Sapiens; identical to SEQ ID NO: 183867
  misc_feature (1215)..(1223): n is a, c, g, or t
  misc_feature (1512)..(1522): n is a, c, g, or t

SEQ ID NO: 191290 - DNA, 1199 bp, Homo Sapiens; identical to SEQ ID NO: 183868
  misc_feature (85)..(105): n is a, c, g, or t
  misc_feature (864)..(876): n is a, c, g, or t

SEQ ID NO: 191291 - DNA, 1184 bp, Homo Sapiens; identical to SEQ ID NO: 183869
  misc_feature (468)..(488): n is a, c, g, or t
  misc_feature (745)..(779): n is a, c, g, or t

SEQ ID NO: 191292 - DNA, 1042 bp, Homo Sapiens; identical to SEQ ID NO: 183870
  misc_feature (551)..(570): n is a, c, g, or t
  misc_feature (833)..(861): n is a, c, g, or t

SEQ ID NO: 191293 - DNA, 882 bp, Homo Sapiens; identical to SEQ ID NO: 183871
  misc_feature (371)..(383): n is a, c, g, or t
  misc_feature (707)..(718): n is a, c, g, or t

SEQ ID NO: 191294 - DNA, 1591 bp, Homo Sapiens; identical to SEQ ID NO: 183872
  misc_feature (603)..(637): n is a, c, g, or t
  misc_feature (894)..(904): n is a, c, g, or t

SEQ ID NO: 191295 - DNA, 1378 bp, Homo Sapiens; identical to SEQ ID NO: 183876

SEQ ID NO: 191296 - DNA, 2527 bp, Homo Sapiens; identical to SEQ ID NO: 183877
  misc_feature (1910)..(1930): n is a, c, g, or t

SEQ ID NO: 191297 - DNA, 1606 bp, Homo Sapiens; identical to SEQ ID NO: 183879
  misc_feature (897)..(927): n is a, c, g, or t
  misc_feature (1107)..(1121): n is a, c, g, or t

SEQ ID NO: 191298 - DNA, 1637 bp, Homo Sapiens; identical to SEQ ID NO: 183881
  misc_feature (350)..(363): n is a, c, g, or t
  misc_feature (1008)..(1096): n is a, c, g, or t

SEQ ID NO: 191299 - DNA, 1157 bp, Homo Sapiens; identical to SEQ ID NO: 183882
  misc_feature (239)..(327): n is a, c, g, or t

SEQ ID NO: 191300 - DNA, 1140 bp, Homo Sapiens; identical to SEQ ID NO: 183883
  misc_feature (292)..(380): n is a, c, g, or t
  misc_feature (1025)..(1037): n is a, c, g, or t

SEQ ID NO: 191301 - DNA, 1367 bp, Homo Sapiens; identical to SEQ ID NO: 183884
  misc_feature (225)..(236): n is a, c, g, or t
  misc_feature (881)..(969): n is a, c, g, or t

SEQ ID NO: 191302 - DNA, 286 bp, Homo Sapiens; identical to SEQ ID NO: 180119

SEQ ID NO: 191303 - DNA, 1258 bp, Homo Sapiens; identical to SEQ ID NO: 183887

SEQ ID NO: 191304 - DNA, 1048 bp, Homo Sapiens; identical to SEQ ID NO: 183889
  misc_feature (76)..(85): n is a, c, g, or t

SEQ ID NO: 191305 - DNA, 890 bp, Homo Sapiens
  misc_feature (337)..(348): n is a, c, g, or t
ttgggacaacgtgtgatgacattaaaaacatctataagaggatgacaggatcagagtttgactttgaggaaatgaagcgcaagaagaatgacatctatggggaagactaacagcagtacatgttattatgtaattaggacacatttaaaatttggcaaataatgcatataatgaaatcaatattgtaaggcctgcttttgtaatgaaaatggagagaatgaagagcgctgtgccagtaaatactccccttcacctttctaattattaacttgttttcatggagtggctattcagcattggcagttaccacattctgttcaatttaaccaaactggcnnnnnnnnnnnnctagtgaagttaaacaaacattgggataccgacacagacaacttgagacagtttttttaatcttttaatcagtgtagctatgtgctgctgctgctcaagagctggatccatacaggttgtgtgccatctgtcctcttgaggttcaggagattctaaattgaatattccacggtttgggacagcatccggaagttttccctatgactttatattttgtattatgtcaaatgttatggcagggcccaaatagcatagccacaagtttggtttatgtgggcataaaattctaaccaaaccccagacatagggagtcatttggagaaagcctgtatgtggtgttttaacctaataaagttgatgagagagaaggggagaggaagcgaacataaagcgggtcaagtgtagtgcatcttttgtatctcaggcgtggcttcttcagtggaccaagctgcaatgcagtattgacttgacagagcctctacttctgtctcaaaatggctccaaatgatttctgtactgcaaaataaaacccaaattctgga

SEQ ID NO: 191306 - DNA, 1123 bp, Homo Sapiens; identical to SEQ ID NO: 183892

SEQ ID NO: 191307 - DNA, 1018 bp, Homo Sapiens
  misc_feature (542)..(569): n is a, c, g, or t
  misc_feature (849)..(862): n is a, c, g, or t
actttgtacaaaaaagttggaggttttttccttttaagacatacgaaaatgtcaagagaaaggccaaagatttgtactttttcacttacaaagcactcctttttcccttaaacttctttctgtcaaattagatttaatgagagagtactatttttaaggagctatctgtttatgtagaatgattttgttaagagtaatgtaaactattattgagtagaggcctaaagaggactgtgcatttttgctatttaaaggaatcacaaatgatcatacttaagtgagcaaaaatgacaagttttactagctaagtagagaaataaatctcagatgcagcgctacaattttcattatcttaagcacattgtacatttctacagaacctgtgattattctcgcatgataaggatggtacttgcatatggtgaattactactgttgacagtttccgcagaaatcctatttcagtggaccaacattgtggcatggcagcaaatgccaacattttgtggaatagcagcaaatctacaagagaccctggttgnnnnnnnnnnnnnnnnnnnnnnnnnnnncccccttctcctgaatcagcagggatggaaggagggtagggaagttacgaattactccttccagtagtagctctgaagtgtcacatttaatatcagttttttttaaacatgattctagttaaatgtagaagagagaagaaagaggaagtgttcacttttttaatacactgatttagaaatttgatgtcttatatcagtagttctgaggtattgatagcttgctttatttctgcctttacgttgacagtgttgaagcagggtgaataactagggcatatannnnnnnnnnnnnngtaagctgtttcatgatgtttttctttggaaattccggataagttcaggaaaacattctgcatgttgtatctagtctgatgtacttatccatctcattacaaacaaaaacacacagactgcatttgtagctctgtaatccttgaatacggaagtaa

SEQ ID NO: 191308 - DNA, 1434 bp, Homo Sapiens; identical to SEQ ID NO: 183893
  misc_feature (281)..(308): n is a, c, g, or t

SEQ ID NO: 191309 - DNA, 2069 bp, Homo Sapiens; identical to SEQ ID NO: 183894
  misc_feature (818)..(845): n is a, c, g, or t
  misc_feature (1125)..(1137): n is a, c, g, or t

SEQ ID NO: 191310 - DNA, 1275 bp, Homo Sapiens
ttggagttcggttgctgcggcggggcctgcacgttgactgtgggaaactcggaaacaagctcacatcttcctgtgggaaaccttctagcaacaggatgagtctgcagtggactgcagttgccaccttcctctatgcggaggtctttgttgtgttgcttctctgcattcccttcatttctcctaaaagatggcagaagattttcaagtcccggctggtggagttgttagtgtcctatggcaacaccttctttgtggttctcattgtcatccttgtgctgttggtcatcgatgccgtgcgcgaaattcggaagtatgatgatgtgacggaaaaggtgaacctccagaacaatcccggggccatggagcacttccacatgaagcttttccgtgcccagaggaatctctacattgctggcttttccttgctgctgtccttcctgcttagacgcctggtgactctcatttcgcagcaggccacgctgctggcctccaatgaagcctttaaaaagcaggcggagagtgctagtgaggcggccaagaagtacatggaggagaatgaccagctcaagaagggagctgctgttgacggaggcaagttggatgtcgggaatgctgaggtgaagttggaggaagagaacaggagcctgaaggctgacctgcagaagctaaaggacgagctggccagcactaagcaaaaactagagaaagctgaaaaccaggttctggccatgcggaagcagtctgagggcctcaccaaggagtacgaccgcttgctggaggagcacgcaaagctgcaggctgcagtagatggtcccatggacaagaaggaagagtaagggcctccttcctcccctgcctgcagctggcttccacctggcacgtgcctgctgcttcctgagagcccggcctctccctccagtacttctgtttgtgcccttctgcttcccccattcccttccacagctcatagctcgtcatctcggcccttgtccacactctccaagcacattacaggggacctgattgctacacgttcagaatgcgtttgctgtcatcctgcttggcctggccaggcctggcacagccttggcttccacgcctgagcgtggagagcacgagttagttgtagtccggcttgcggtggggctgacttcctgttggtttgagcccctttttgttttgccctctgggtgttttctttggtcccgcaggagggtgggtggagcaggtggactggagtttctcttgagggcaataaaagttgtcatggtgtgt

SEQ ID NO: 191311 - DNA, 906 bp, Homo Sapiens; identical to SEQ ID NO: 180120

SEQ ID NO: 191312 - DNA, 993 bp, Homo Sapiens
actttgtacaaaaaagttggggaaggcattcctcctgaccagcagaggttgatctttgccggaaagcagctggaagatgggcgcaccctgtctgactacaacatccagaaagagtctaccctgcacctggtgctccgtctcagaggtgggatgcagatcttcgtgaagaccctgactggtaagaccatcaccctcgaggtggagcccagtgacaccatcgagaatgtcaaggcaaagatccaagataaggaaggcattcctcctgatcagcagaggttgatctttgccggaaaacagctggaagatggtcgtaccctgtctgactacaacatccagaaagagtccaccttgcacctggtactccgtctcagaggtgggatgcaaatcttcgtgaagacactcactggcaagaccatcacccttgaggtcgagcccagtgacactatcgagaacgtcaaagcaaagatccaagacaaggaaggcattcctcctgaccagcagaggttgatctttgccggaaagcagctggaagatgggcgcaccctgtctgactacaacatccagaaagagtctaccctgcacctggtgctccgtctcagaggtgggatgcagatcttcgtgaagaccctgactggtaagaccatcaccctcgaagtggagccgagtgacaccattgagaatgtcaaggcaaagatccaagacaaggaaggcatccctcctgaccagcagaggttgatctttgccggaaaacagctggaagatggtcgtaccctgtctgactacaacatccagaaagagtccaccttgcacctggtgctccgtctcagaggtgggatgcagatcttcgtgaagaccctgactggtaagaccatcactctcgaggtggagccgagtgacaccattgagaatgtcaaggcaaagatccaagacaaggaaggcatccctcctgaccaccaaaggttgatctttgctggggaaacagctggaagatgg

SEQ ID NO: 191313 - DNA, 1127 bp, Homo Sapiens
gccaactttgtacaaaaaagttggctcctgaccagcagaggttgatctttgccggaaaacagctggaagatggtcgtaccctgtctgactacaacatccagaaagagtccaccttgcacctggtgctccgtctcagaggtgggatgcagatcttcgtgaagaccctgactggtaagaccatcactctcgaggtggagccgagtgacaccattgagaatgtcaaggcaaagatccaagacaaggaaggcatccctcctgatcagcagaggttgatctttgctgggaaacagctggaagatggacgcaccctgtctgactacaacatccagaaagagtccaccctgcacctggtgctccgtcttagaggtgggatgcagatcttcgtgaagaccctgactggtaagaccatcactctcgaagtggagccgagtgacaccattgagaatgtcaaggcaaagatccaagacaaggaaggcatccctcctgaccagcagaggttgatctttgctgggaaacagctggaagatggacgcaccctgtctgactacaacatccagaaagagtccaccctgcacctggtgctccgtcttagaggtgggatgcagatcttcgtgaagaccctgactggtaagaccatcactctcgaagtggagccgagtgacaccattgagaatgtcaaggcaaagatccaagacaaggaaggcatccctcctgaccagcagaggttgatctttgctgggaaacagctggaagatggacgcaccctgtctgactacaacatccagaaagagtccaccctgcacctggtgctccgtctcagaggtgggatgcagatcttcgtgaagaccctgactggtaagaccatcaccctcgaggtggagcccagtgacaccatcgagaatgtcaaggcaaagatccaagataaggaaggcatccctcctgatcagcagaggttgatctttgctgggaaacagctggaagatggacgcaccctgtctgactacaacatccagaaagagtccactctgcacttggtcctgcgcttgagggggggtgtctaagtttccccttttaaggtttcaacaaatttcattgcactttcctttcaataaagttgttgcattccc

SEQ ID NO: 191314 - DNA, 1183 bp, Homo Sapiens
gagcaatgcttactttgtacaaaaactttggaccagggatttgggtcgcggttcttgtttgtggatcgctgtgatcgtcacttgacaatgcagatcttcgtgaagactctgactggtaagaccatcaccctcgaggttgagcccagtgacaccatcgagaatgtcaaggcaaagatccaagataaggaaggcatccctcctgaccagcagaggctgatctttgctggaaaacagctggaagatgggcgcaccctgtctgactacaacatccagaaagagtccaccctgcacctggtgctccgtctcagaggtgggatgcaaatcttcgtgaagacactcactggcaagaccatcacccttgaggtggagcccagtgacaccatcgagaacgtcaaagcaaagatccaggacaaggaaggcattcctcctgaccagcagaggttgatctttgccggaaagcagctggaagatgggcgcaccctgtctgactacaacatccagaaagagtctaccctgcacctggtgctccgtctcagaggtgggatgcagatcttcgtgaagaccctgactggtaagaccatcaccctcgaggtggagcccagtgacaccatcgagaatgtcaaggcaaagatccaagataaggaaggcattcctcctgatcagcagaggttgatctttgccggaaaacagctggaagatggtcgtaccctgtctgactacaacatccagaaagagtccaccttgcacctggtactccgtctcagaggtgggatgcaaatcttcgtgaagacactcactggcaagaccatcacccttgaggtcgagcccagtgacactatcgagaacgtcaaagcaaagatccaagacaaggaaggcattcctcctgaccagcagaggttgatctttgccggaaagcagctggaagatgggcgcaccctgtctgactacaacatccagaaagagtctaccctgcacctggtgctccgtctcagaggtgggatgcagatcttcgtgaagaccctgactggtaagaccatcactctcgaagtggagccgagtgacaccattgagaatgtcaaggcaaagatccaagacaaggaaggcatccctcctgatcagcagaggttgatctttgccggaaaacagctggaagatggtcgtaccctgtctgactacaacatcc

SEQ ID NO: 191315 - DNA, 673 bp, Homo Sapiens
ctttgtacaaaaaagttggcaaagatccaagacaaggaaggcatccctcctgaccagcagaggttgatctttgctgggaaacagctggaagatggacgcaccctgtctgactacaacatccagaaagagtccaccctgcacctggtgctccgtcttagaggtgggatgcagatcttcgtgaagaccctgactggtaagaccatcactctcgaagtggagccgagtgacaccatcgagaatgtcaaggcaaagatccaagacaaggaaggcatccctcctgaccagcagaggttgatctttgctgggaaacagctggaagatggacgcaccctgtctgactacaacatccagaaagagtccaccctgcacctggtgctccgtctcagaggtgggatgcaaatcttcgtgaagaccctgactggtaagaccatcaccctcgaggtggagcccagtgacaccatcgagaatgtcaaggcaaagatccaagataaggaaggcatccctcctgatcagcagaggttgatctttgctgggaaacagctggaagatggacgcaccctgtctgactacaacatccagaaagagtccactctgcacttggtcctgcgcttgacggggggtgtctaagtttccccttttaaggtttcaacaaatttcattgcactttcctttc

SEQ ID NO: 191316 - DNA, 461 bp, Homo Sapiens
gtagtcagacagggtgcgtccatcttccagctgtttcccagcaaagatcaacctctgctgatcaggagggatgccttccttatgttggatctttgccttgacattctcgatggtgtcactgggctccaaatagagggtgatggtcttaccagtcagggtcttcacgaagatttgcatcccacctctgagacggagcaccaggtgcagggtggactctttctggatgttgtagtcagacagggtgcgtccatcttccagctgtttcccagcaaagatcaacctctgctggtcaggagggatgccttccttgtcttggatctttgccttgacattctcaatggtgtcactcggctccacttcgagagtgatggtcttaccagtcagggtcttcacgaagatctgcatcccacctctaagacggagctttcaggggcagggtggcccaacttttttgtacaaag

SEQ ID NO: 191317 - DNA, 956 bp, Homo Sapiens
gccaactttgtacaaaaaagttgggctttgttgggtgagcttgtttgtgtccctgtgggtggacgtggttggtgattggcaggatcctggtatccgctaacaggtcaaaatgcagatcttcgtgaaaacccttaccggcaagaccatcacccttgaggtggagcccagtgacaccatcgaaaatgtgaaggccaagatccaggataaggaaggcattccccccgaccagcagaggctcatctttgcaggcaagcagctggaagatggccgtactctttctgactacaacatccagaaggagtcgaccctgcacctggtcctgcgtctgagaggtggtatgcagatcttcgtgaagaccctgaccggcaagaccatcaccctggaagtggagcccagtgacaccatcgaaaatgtgaaggccaagatccaggataaagaaggcatccctcccgaccagcagaggctcatctttgcaggcaagcagctggaagatggccgcactctttctgactacaacatccagaaggagtcgaccctgcacctggtcctgcgtctgagaggtggtatgcagatcttcgtgaagaccctgaccggcaagaccatcactctggaggtggagcccagtgacaccatcgaaaatgtgaaggccaagatccaagataaagaaggcatcccccccgaccagcagaggctcatctttgcaggcaagcagctggaagatggccgcactctttctgactacaacatccagaaagagtcgaccctgcacctggtcctgcgcctgaggggtggctgttaattcttcagtcatggcattcgcagtgcccagtgatggcattactctgcactatagccatttgccccaacttaagtttagaaattacaagtttcagtaatagctgaacctgttcaaaatgttaataaaggtttcgttgcatggtaaaaaaatagaataa

SEQ ID NO: 191318 - DNA, 1367 bp, Homo Sapiens
actttgtacaaaaaagttggggcaaagatccaagataaggaaggcattcctcctgatcagcagaggttgatctttgccggaaaacagctggaagatggtcgtaccctgtctgactacaacatccagaaagagtccaccttgcacctggtactccgtctcagaggtgggatgcaaatcttcgtgaagacactcactggcaagaccatcacccttgaggtcgagcccagtgacactatcgagaacgtcaaagcaaagatccaagacaaggaaggcattcctcctgaccagcagaggttgatctttgccggaaagcagctggaagatgggcgcaccctgtctgactacaacatccagaaagagtctaccctgcacctggtgctccgtctcagaggtgggatgcagatcttcgtgaagaccctgactggtaagaccatcaccctcgaagtggagccgagtgacaccattgagaatgtcaaggcaaagatccaagacaaggaaggcatccctcctgaccagcagaggttgatctttgccggaaaacagctggaagatggtcgtaccctgtctgactacaacatccagaaagagtccaccttgcacctggtgctccgtctcagaggtgggatgcagatcttcgtgaagaccctgactggtaagaccatcactctcgaggtggagccgagtgacaccattgagaatgtcaaggcaaagatccaagacaaggaaggcatccctcctgatcagcagaggttgatctttgctgggaaacagctggaagatggacgcaccctgtctgactacaacatccagaaagagtccaccctgcacctggtgctccgtcttagaggtgggatgcagatcttcgtgaagaccctgactggtaagaccatcactctcgaagtggagccgagtgacaccattgagaatgtcaaggcaaagatccaagacaaggaaggcatccctcctgaccagcagaggttgatctttgctgggaaacagctggaagatggacgcaccctgtctgactacaacatccagaaagagtccaccctgcacctggtgctccgtcttagaggtgggatgcagatcttcgtgaagaccctgactggtaagaccatcactctcgaagtggagccgagtgacaccattgagaatgtcaaggcaaagatccaagacaaggaaggcatccctcctgaccagcagaggttgatctttgctgggaaacagctggaagatggacgcaccctgtctgactacaacatccagaaagagtccaccctgcacctggtgctccgtctcagaggtgggatgcagatcttcgtgaagaccctgactggtaagaccatcaccctcaaggtggagcccca

SEQ ID NO: 191319 - DNA, 895 bp, Homo Sapiens
ctttgtacaaaaaagttggctgtgatcgtcacttgacaatgcagatcttcgtgaagactctgactggtaagaccatcaccctcgaggttgagcccagtgacaccatcgagaatgtcaaggcaaagatccaagataaggaaggcatccctcctgaccagcagaggctgatctttgctggaaaacagctggaagatgggcgcaccctgtctgactacaacatccagaaagagtccaccctgcacctggtgctccgtctcagaggtgggatgcaaatcttcgtgaagacactcactggcaagaccatcacccttgaggtcgagcccagtgacaccatcgagaacgtcaaagcaaagatccaggacaaggaaggcattcctcctgaccagcagaggttgatctttgccggaaagcagctggaagatgggcgcaccctgtctgactacaacatccagaaagagtctaccctgcacctggtgctccgtctcagaggtgggatgcagatcttcgtgaagaccctgactggtaagaccatcaccctcgaggtggagcccagtgacaccatcgagaatgtcaaggcaaagatccaagataaggaaggcattcctcctgatcagcagaggttgatctttgccggaaaacagctggaagatggtcgtaccctgtctgactacaacatccagaaagagtccaccttgcacctggtactccgtctcagaggtgggatgcaaatcttcgtgaagacactcactggcaagaccatcacccttgaggtcgagcccagtgacactatcgagaacgtcaaaccaagatccaagacaaggaagggcattcctcctgaccagcagaggttgatctttgccggaaagcagctggaagatgggcgcaccctgtctga

SEQ ID NO: 191320 - DNA, 931 bp, Homo Sapiens
ctataaaagccaactttgtacaaaaaagttggatgggctgccccataatgtcacaaatgagggttgtttaatgcctttcttatagctgctactggaacactattatgacctaatttatgagccatccttactcatctacaagtgctgaagcaatgttacatacttttttgctaaactcagattttttagcctaatttcttgtcctcctatccacctgcatccacacatggcctgcatggggctgccttccctgcagtgttctgcagccatgcttcagggtatagctgttggtggacagcctcaggtcttgggggcactatagccactaaacgaggtgtgaaaggctcaagaggatgaccagcaattaattatccccagaaagtgaaggaaaagagacctttagggatgttgctggtcaagtcttgatttgaccggagtcaatcaatcttcaagcaatcttggaatcctcaactgcagtaagcatttcaaaatgcaaacaaactgcttaacaactgacaagacaccagcccatacgctgctcttccaacagtgggttctagctttgaacaaaagtgctaaacatttccttgaatatattcttcctctttttgtcctcatcactcaatactggtgctcttgtcacaggtagaacagcttgtttcttttccatctattcaagtgtgtttctaattctaaaatgctgatcttctctggagtctatggtaggcaattatggtcactggaatagtttgtcttgttttaaaatattattggtgcatgtacaacagccatccaacatatctgtcttgttcctagatatatagctctgattttaggccttttgtgcataccattacaatatggtggggtaagacattctacagtaacctgtgctgaactgatcatcttaaaataaacttgaatcctgaat

SEQ ID NO: 191321 - DNA, 1346 bp, Homo Sapiens; identical to SEQ ID NO: 183903
  misc_feature (151)..(176): n is a, c, g, or t
  misc_feature (1059)..(1096): n is a, c, g, or t

SEQ ID NO: 191322 - DNA, 928 bp, Homo Sapiens; identical to SEQ ID NO: 183904
  misc_feature (404)..(429): n is a, c, g, or t

SEQ ID NO: 191323 - DNA, 1284 bp, Homo Sapiens; identical to SEQ ID NO: 180122

SEQ ID NO: 191324 - DNA, 1889 bp, Homo Sapiens; identical to SEQ ID NO: 180123

SEQ ID NO: 191325 - DNA, 3761 bp, Homo Sapiens; identical to SEQ ID NO: 183905

SEQ ID NO: 191326 - DNA, 1556 bp, Homo Sapiens; identical to SEQ ID NO: 183906

SEQ ID NO: 191327 - DNA, 1591 bp, Homo Sapiens; identical to SEQ ID NO: 183907

SEQ ID NO: 191328 - DNA, 1132 bp, Homo Sapiens
actttgtacaaaaaagttggctcccagcatatttagataatagggcaggggaagcaccctctttctttctagactggattatgctcacatgctcccttgccctgacatttttgtaaattctgtgccctttgctgtagctacacttcagattaaagtaggagaaagaatgtgctgagtgttttcctccctttgcctctacctggccctcatcccaacagcccagcaaggggagagagaaagagaattcttttctatagaacgagtgggggcggggatgggtagggatttatccaatctaagccctaaccccacttagtgacctcagtgttttcttccattccttcttactgccctgtcctctgccttggaagaggctttgggaatagttcatagggaagggacaacatggaagaaacagcgatttaaattgtattgaacagggcatataaaatgcattctgtaccctgatctggcatatagcttcaaaactgcagtggcgagtgtccatctcttagttagctaccttaactgtccacccttactacctgtgggatcgttgcctggtttgtcttctctgtgtcctggagcaaagccagttcctaaaactaaaactccattctagtcttgggaagaaaagtttctactcagaactggggaaggagtggaacttatgacttgggcctctaggctgtctctgtcccctcagctccccgacatgcatttactctctgccgtgggtctgcagtcgctgcaacctaccctctctctgcctcagccttacacccaagcagtaggtctgtgctctccctgtctctaggtcgctgagagaggtgcttttcttcataaaacctttggggtttggatttccccaggaagatggagaatggaatactcactcttgggtctaatctttccccttgacccaaaacttcctccccacaaaaatgcctttaaaaaccttcctgagacttaagcattctgccccacttactaactgccagttctccagcactgaggtggggcagataacggggcatatttaagggggcatctttgtgtaaaagatgcatggagtcaagagaaaaccaccttcataaactgctctgtgcaagaggaataaaacattttttcc

SEQ ID NO: 191329 - DNA, 1771 bp, Homo Sapiens; identical to SEQ ID NO: 183912
  misc_feature (1590)..(1605): n is a, c, g, or t

SEQ ID NO: 191330 - DNA, 1186 bp, Homo Sapiens; identical to SEQ ID NO: 183913
  misc_feature (275)..(290): n is a, c, g, or t

SEQ ID NO: 191331 - DNA, 959 bp, Homo Sapiens; identical to SEQ ID NO: 183914
  misc_feature (756)..(771): n is a, c, g, or t

SEQ ID NO: 191332 - DNA, 1024 bp, Homo Sapiens; identical to SEQ ID NO: 183915
  misc_feature (757)..(772): n is a, c, g, or t

SEQ ID NO: 191333 - DNA, 1267 bp, Homo Sapiens
  misc_feature (865)..(865): n is a, c, g, or t
  misc_feature (1065)..(1100): n is a, c, g, or t
ttggggcggaggatccccagccgggtcccaagcctgtgcctgagcctgagcctgagcctgagcccgagccgggagccggtcgcgggggctccgggctgtgggaccgctgggcccccagcgatggcgaccctgtggggaggccttcttcggcttggctccttgctcagcctgtcgtgcctggcgctttccgtgctgctgctggcgcagctgtcagacgccgccaagaatttcgaggatgtcagatgtaaatgtatctgccctccctataaagaaaattctgggcatatttataataagaacatatctcagaaagattgtgattgccttcatgttgtggagcccatgcctgtgcgggggcctgatgtagaagcatactgtctacgctgtgaatgcaaatatgaagaaagaagctctgtcacaatcaaggttaccattataatttatctctccattttgggccttctacttctgtacatggtatatcttactctggttgagcccatactgaagaggcgcctctttggacatgcacagttgatacagagtgatgatgatattggggatcaccagccttttgcaaatgcacacgatgtgctagcccgctcccgcagtcgagccaacgtgctgaacaaggtagaatatgcacagcagcgctggaagcttcaagtccaagagcagcgaaagtctgtctttgaccggcatgttgtcctcagctaattgggaattgaattcaaggtgactagaaagaaacaggcagacaactggaaagaactgactgggttttgctgggtttcattttaataccttgttgatttcaccaactgttgctggaagattcaaaactggaagcaaaaacttgcttganttttttttcttgttaacgtaataatagagacatttttaaaagcacacagctcaaagtcagccaataagtcttttcctatttgtgacttttactaataaaaataaatctgcctgtaaattatcttgaagtcctttacctggaacaagcactctctttttcaccacatagttttaacttgactttcaagataattttcaggnnnnnnnnnnnnnnnnnnnnnnnnnnnnnnnnnnnngtgggagaggggagggatgcctgggaagtggttaacaacttttttcaagtcactttactaaacaaacttttgtaaatagaccttaccttctattttcgagtttcatttatattttgcagtgtagccagcctcatcaaagagctgacttactcatttgacttttgcac

SEQ ID NO: 191334 - DNA, 960 bp, Homo Sapiens; identical to SEQ ID NO: 183920

SEQ ID NO: 191335 - DNA, 3190 bp, Homo Sapiens; identical to SEQ ID NO: 183923
  misc_feature (1430)..(1446): n is a, c, g, or t
  misc_feature (2014)..(2022): n is a, c, g, or t
  misc_feature (2139)..(2175): n is a, c, g, or t
  misc_feature (2903)..(2912): n is a, c, g, or t

SEQ ID NO: 191336 - DNA, 1401 bp, Homo Sapiens; identical to SEQ ID NO: 183924
  misc_feature (297)..(313): n is a, c, g, or t
  misc_feature (881)..(889): n is a, c, g, or t
  misc_feature (1006)..(1042): n is a, c, g, or t

SEQ ID NO: 191337 - DNA, 642 bp, Homo Sapiens
acaaaaaagttggcgggtctctgctgcggacgccgggggccggcgcggcgttggccgcccccggcctcgccgagtgcagcgcgcccgaaggccagtgcctgcgctccgtccgcggcccggcgcccagggtgggcggggaggccgccgcgcagtcgccgcacgctacaccgccggcgccgtcgtttcgcgtcccgcttccggccaccgcggccgccattttgttcgcgcggaagcgccgcggtagggtgggaacccaagcgggagagccgcgggatttgcggccgccgccatgccgtcgtccccgctgcgggtggcggtggtgtgctcgagcaaccagaaccggagcatggaggcgcacaacatcctcagcaaacggggattcagcgtccgatcctttggaacagggactcacgtgaagcttccaggaccagctcccgacaagcccaatgtttatgatttcaaaaccacatatgaccagatgtacaatgatcttcttaggaaagacaaagaactctatacacagaatgggattttacatatgctggacagaaataagagaatcaagccccggccagaaagattccagaactgcatagacctgtttgatctgatcctcacttgcgaagagaagagtgtatgacc

SEQ ID NO: 191338 - DNA, 1391 bp, Homo Sapiens; identical to SEQ ID NO: 180132

SEQ ID NO: 191339 - DNA, 2154 bp, Homo Sapiens; identical to SEQ ID NO: 180133
  misc_feature (958)..(1165): n is a, c, g, or t

SEQ ID NO: 191340 - DNA, 2757 bp, Homo Sapiens; identical to SEQ ID NO: 180134
  misc_feature (195)..(203): n is a, c, g, or t
  misc_feature (1651)..(1671): n is a, c, g, or t
  misc_feature (1691)..(1927): n is a, c, g, or t
  misc_feature (2339)..(2359): n is a, c, g, or t

SEQ ID NO: 191341 - DNA, 1443 bp, Homo Sapiens; identical to SEQ ID NO: 183933
  misc_feature (224)..(234): n is a, c, g, or t

SEQ ID NO: 191342 - DNA, 1369 bp, Homo Sapiens; identical to SEQ ID NO: 183934

SEQ ID NO: 191343 - DNA, 2339 bp, Homo Sapiens; identical to SEQ ID NO: 180137
  misc_feature (1025)..(1038): n is a, c, g, or t

SEQ ID NO: 191344 - DNA, 1663 bp, Homo Sapiens; identical to SEQ ID NO: 183935
  misc_feature (1231)..(1244): n is a, c, g, or t

SEQ ID NO: 191345 - DNA, 1794 bp, Homo Sapiens; identical to SEQ ID NO: 180138
  misc_feature (259)..(272): n is a, c, g, or t
  misc_feature (1364)..(1528): n is a, c, g, or t

SEQ ID NO: 191346 - DNA, 959 bp, Homo Sapiens
caactttgtacaaaaaagttggctcgccgctcgctatggcgtcgctcaccgtgaaggcctaccttctgggcaaggaggacgcggcgcgcgagattcgccgcttcagcttctgctgcagccccgagcctgaggcggaagccgaggctgcggcgggtccgggaccctgcgagcggctgctgagccgggtggccgccctgttccccgcgctgcggcctggcggcttccaggcgcactaccgcgatgaggacggggacttggttgccttttccagtgacgaggaattgacaatggccatgtcctacgtgaaggatgacatcttccgaatctacattaaagagaaaaaagagtgccggcgggaccaccgcccaccgtgtgctcaggaggcgccccgcaacatggtgcaccccaatgtgatctgcgatggctgcaatgggcctgtggtaggaacccgctacaagtgcagcgtctgcccagactacgacttgtgtagcgtctgcgagggaaagggcttgcaccgggggcacaccaagctcgcattccccagccccttcgggcacctgtctgagggcttctcgcacagccgctggctccggaaggtgaaacacggacacttcgggtggccaggatgggaaatgggtccaccaggaaactggagcccacgtcctcctcgtgcaggggaggcccgccctggccccacggcagaatcagcttctggtccatcggaggatccgagtgtgaatttcctgaagaacgttggggagagtgtggcagctgcccttagccctctgggcattgaagttgatatcgatgtggagcacggagggaaaagaagccgcctgacccccgtctctccagagagttccagcacagaggagaagagcagctcacagccaagcagctgctgctctgaccccagcaagccgggtgggaatgttgagggcgccacgcagtctctggcg

SEQ ID NO: 191347 - DNA, 1491 bp, Homo Sapiens; identical to SEQ ID NO: 180140
  misc_feature (354)..(368): n is a, c, g, or t
  misc_feature (1228)..(1245): n is a, c, g, or t

SEQ ID NO: 191348 - DNA, 3673 bp, Homo Sapiens; identical to SEQ ID NO: 180141
  misc_feature (860)..(871): n is a, c, g, or t
  misc_feature (2342)..(2402): n is a, c, g, or t
  misc_feature (3410)..(3418): n is a, c, g, or t

SEQ ID NO: 191349 - DNA, 1138 bp, Homo Sapiens; identical to SEQ ID NO: 183936
  misc_feature (72)..(80): n is a, c, g, or t
  misc_feature (899)..(940): n is a, c, g, or t

SEQ ID NO: 191350 - DNA, 1663 bp, Homo Sapiens; identical to SEQ ID NO: 183937
  misc_feature (154)..(217): n is a, c, g, or t
  misc_feature (319)..(346): n is a, c, g, or t
  misc_feature (1277)..(1291): n is a, c, g, or t

SEQ ID NO: 191351 - DNA, 1321 bp, Homo Sapiens; identical to SEQ ID NO: 183938
  misc_feature (217)..(225): n is a, c, g, or t
  misc_feature (1047)..(1108): n is a, c, g, or t

SEQ ID NO: 191352 - DNA, 1878 bp, Homo Sapiens; identical to SEQ ID NO: 183939
  misc_feature (998)..(1039): n is a, c, g, or t
  misc_feature (1206)..(1269): n is a, c, g, or t

SEQ ID NO: 191353 - DNA, 2280 bp, Homo Sapiens; identical to SEQ ID NO: 183940
  misc_feature (741)..(782): n is a, c, g, or t
  misc_feature (2078)..(2092): n is a, c, g, or t

SEQ ID NO: 191354 - DNA, 1564 bp, Homo Sapiens; identical to SEQ ID NO: 180142
  misc_feature (1443)..(1451): n is a, c, g, or t

SEQ ID NO: 191355 - DNA, 1716 bp, Homo Sapiens; identical to SEQ ID NO: 183942
  misc_feature (67)..(89): n is a, c, g, or t

SEQ ID NO: 191356 - DNA, 970 bp, Homo Sapiens
ctttgtacaaaaaagttggcccaaccatctttagagaaaaaatcatctctaaatcccatcctctttcgaggtgttgggatggtggccgatcctgataaccctttggtgctggacatcctgacgggctcttccacctcttactccttcttcccggacaagcctatcacccagtatccacatgcggtggggaagaacaccctcctcattgctgggctccaggccaggaacaatgcccgcgtcatcttcagcggctccctcgacttcttcagcgactccttcttcaactcagcagtgcagaaggcggcgcccggctcccagaggtattcccagacaggcaactatgaactagctgtggccctctcccgctgggtgttcaaggaggagggtgtcctccgtgtggggcctgtgtcccatcatcgggtgggcgagacagccccacccaatgcctacactgtcactgacctagtggagtatagcatcgtgatccagcagctctcaaatggcaaatgggtcccctttgatggcgatgacattcagctggagtttgtccgcattgatccttttgtgaggaccttcctgaagaagaaaggtggcaaatacagtgttcagttcaagttgcccgacgtgtatggtgtattccagtttaaagtggattacaaccggctaggctacacacacctgtactcttccactcaggtatccgtgcggccactccagcacacgcagtatgagcgcttcatcccctcggcctacccctactacgccagcgccttctccatgatgctggggctcttcatcttcagcatcgtcttcttgcacatgaaggagaaggagaaatccgactgaggggctagagccctctccgcacagcgtggagacggggcagggaggggggttattaggattggtggttttgttttgctttgtttaaagccgtgaggaaaatggcacaaactttacctctgtggga

SEQ ID NO: 191357 - DNA, 1188 bp, Homo Sapiens
actttgtacaaaaaagttggccaaggacccaggatttataaaggcgaggccgggaccggcgcgcgctctcgtcgcccccgctgtcccggcggcgccaaccgaagcgccccgcctgatccgtgtccgacatgctgcgccgcgctctgctgtgcctggccgtggccgccctggtgcgcgccgacgcccccgaggaggaggaccacgtcctggtgctgcggaaaagcaacttcgcggaggcgctggcggcccacaagtacctgctggtggagttctatgccccttggtgtggccactgcaaggctctggcccctgagtatgccaaagccgctgggaagctgaaggcagaaggttccgagatcaggttggccaaggtggacgccacggaggagtctgacctggcccagcagtacggcgtgcgcggctatcccaccatcaagttcttcaggaatggagacacggcttcccccaaggaatatacagctggcagagaggctgatgacatcgtgaactggctgaagaagcgcacgggcccggctgccaccaccctgcctgacggcgcagctgcagagtccttggtggagtccagcgaggtggctgtcatcggcttcttcaaggacgtggagtcggactctgccaagcagtttttgcaggcagcagaggccatcgatgacataccatttgggatcacttccaacagtgacgtgttctccaaataccagctcgacaaagatggggttgtcctctttaagaagtttgatgaaggccggaacaactttgaaggggaggtcaccaaggagaacctgctggactttatcaaacacaaccagctgccccttgtcatcgagttcaccgagcagacagccccgaagatttttggaggtgaaatcaagactcacatcctgctgttcttgcccaagagtgtgtctgactatgacggcaaactgagcaacttcaaaacagcagccgagagcttcaagggcaagatcctgttcatcttcatcgacagcgaccacaccgacaaccagcgcatcctcgagttctttggcctgaagaaggaagagtgcccggccgtgcgcctcatcaccctggaggaggagatgaccaagtacaagcccgaatcggaggagctgacggcagagaggatcacagagttctgccaccgcttcctggaagggcaaatcaagcccc

SEQ ID NO: 191358 - DNA, 1822 bp, Homo Sapiens; identical to SEQ ID NO: 183946

SEQ ID NO: 191359 - DNA, 2965 bp, Homo Sapiens; identical to SEQ ID NO: 183948
  misc_feature (2821)..(2852): n is a, c, g, or t

SEQ ID NO: 191360 - DNA, 876 bp, Homo Sapiens; identical to SEQ ID NO: 183949

SEQ ID NO: 191361 - DNA, 1322 bp, Homo Sapiens; identical to SEQ ID NO: 183951

SEQ ID NO: 191362 - DNA, 1320 bp, Homo Sapiens; identical to SEQ ID NO: 180145
  misc_feature (1220)..(1228): n is a, c, g, or t

SEQ ID NO: 191363 - DNA, 2180 bp, Homo Sapiens; identical to SEQ ID NO: 183953
  misc_feature (60)..(68): n is a, c, g, or t
  misc_feature (1809)..(1822): n is a, c, g, or t

SEQ ID NO: 191364 - DNA, 683 bp, Homo Sapiens
caactttgtacaaaaaagttgggtaagtccttgggtaagtccttggaattgattctaaggtgatgttcttagcactttaattcctgtcaaattttttgttctccccttctgccatcttaaatgtaagctgaaactggtctactgtgtctctagggttaagccaaaagacaaaaaaaattttactacttttgagattgccccaatgtacagaattatataattctaacgcttaaatcatgtgaaagggttgctgctgtcagccttgcccactgtgacttcaaacccaaggaggaactcttgatcaagatgcccaaccctgtgatcagaacctccaaatactgccatgagaaactagagggcaggtcttcataaaagccctttgaacccccttcctgccctgtgttaggagatagggatattggcccctcactgcagctgccagcacttggtcagtcactctcagccatagcactttgttcactgtcctgtgtcagagcactgagctccacccttttctgagagttattacagccagaaagtgtgggctgaagatggttggtttcatgtttttgtattatgtatctttttgtatggtaaagactatattttgtacttaaccagatatatttttaccccagatggggatattctttgtaaaaaaatgaaaataaagtttttttaat

SEQ ID NO: 191365 - DNA, 987 bp, Homo Sapiens
  misc_feature (130)..(143): n is a, c, g, or t
ttgggaacttacgtatcatgtggagaagagccaatttaacaaactaggaagatgaaaagggaaattgtggccaaaactttgggaaaaggaggttcttaaaatcagtgtttcccctttgtgcacttgtagnnnnnnnnnnnnnnccttctagagctgatttgatggacaatggagagagctttccctgtgattataaaaaaggaagctagctgctctacggtcatctttgcttagagtatactttaacctggcttttaaagcagtagtaactgccccaccaaaggtcttaaaagccatttttggagcctattgcactgtgttctcctactgcaaatattttcatatgggaggatggttttctcttcatgtaagtccttggaattgattctaaggtgatgttcttagcactttaattcctgtcaaattttttgttctccccttctgccatcttaaatgtaagctgaaactggtctactgtgtctctagggttaagccaaaagacaaaaaaaattttactacttttgagattgccccaatgtacagaattatataattctaacgcttaaatcatgtgaaagggttgctgctgtcagccttgcccactgtgacttcaaacccaaggaggaactcttgatcaagatgcccaaccctgtgatcagaacctccaaatactgccatgagaaactagagggcaggtcttcataaaagccctttgaacccccttcctgccctgtgttaggagatagggatattggcccctcactgcagctgccagcacttggtcagtcactctcagccatagcactttgttcactgtcctgtgtcagagcactgagctccacccttttctgagagttattacagccagaaagtgtgggctgaaaatggttggtttcatgtttttgtattatgtatctttttgtatggtaaagactatattttgtacttaaccagatatatttttactccagatggggatattctttg

SEQ ID NO: 191366 - DNA, 855 bp, Homo Sapiens
  misc_feature (484)..(497): n is a, c, g, or t
ttggttttgtctctcttcctggacactcactttttcagagactcaacagtctctgcaatggagtgtgggtccaccttagcctctgacttcctaatgtaggaggtggtcagcaggcaatctcctgggccttaaaggatgcggactcatcctcagccagcgcccatgttgtgatacaggggtgtttgttggatgggtttaaaaataactagaaaaactcaggcccatccattttctcagatctccttgaaaattgaggccttttcgatagtttcgggtcaggtaaaaatggcctcctggcgtaagcttttcaaggttttttggaggctttttgtaaattgtgataggaactttggaccttgaacttacgtatcatgtggagaagagccaatttaacaaactaggaagatgaaaagggaaattgtggccaaaactttgggaaaaggaggttcttaaaatcagtgtttcccctttgtgcacttgtagnnnnnnnnnnnnnnccttctagagctgatttgatggacaatggagagagctttccctgtgattataaaaaaggaagctagctgctctacggtcatctttgcttagagtatactttaacctggcttttaaagcagtagtaactgccccaccaaaggtcttaaaagccatttttggagcctattgcactgtgttctcctactgcaaatattttcatatgggaggatggttttctcttcatgtaagtccttggaattgattctaaggtgatgttcttagcactttaattcctgtcaaattttttgttctccccttctgccatcttaaatgtaagctgaaactggtctactgtgtctctagggttaagccaaaaga

SEQ ID NO: 191367 - DNA, 974 bp, Homo Sapiens
ttggctctttttctccaaaggagtgcttgtggagatcggatcttttctccagcaattgggggaaagaaggctttttctctgaattcgcttagtgtaaccagcggcgtatattttttaggcgccttttcgaaaacctagtagttaatattcatttgtttaaatcttattttatttttaagctcaaactgcttaagaataccttaattccttaaagtgaaataattttttgcaaaggggtttcctcgatttggagcttttttttcttccaccgtcatttctaactcttaaaaccaactcagttccatcatggtgatgttcaagaagatcaagtcttttgaggtggtctttaacgaccctgaaaaggtgtacggcagtggcgagaaggtggctggccgggtgatagtggaggtgtgtgaagttactcgtgtcaaagccgttaggatcctggcttgcggagtggctaaagtgctttggatgcagggatcccagcagtgcaaacagacttcggagtacctgcgctatgaagacacgcttcttctggaagaccagccaacaggtgagaatgagatggtgatcatgagacctggaaacaaatatgagtacaagttcggctttgagcttcctcaggggcctctgggaacatccttcaaaggaaaatatgggtgtgtagactactgggtgaaggcttttcttgaccgcccgagccagccaactcaagagacaaagaaaaactttgaagtagtggatctggtggatgtcaatacccctgatttaatggcacctgtgtctgctaaaaagaaaagaaagtttcctgcatgttcattcctgatgggcgggtgtctgtctctgctcgaattgacagaaaaggattctgtgaaggtgatgagatttccatccatgctgactttgagaatacatgttcccgaattgtggtccccaaagctgccattgtggcccgccacacttaccttgcc

SEQ ID NO: 191368 - DNA, 1042 bp, Homo Sapiens; identical to SEQ ID NO: 183955
  misc_feature (798)..(814): n is a, c, g, or t

SEQ ID NO: 191369 - DNA, 755 bp, Homo Sapiens
tttgtacaaaaaagttggctcattttgtcacttatctgaaaatatataatttctggtcatgtgtatgttaaaatagaaaattttgaggaaaaatggaaatagggtggaaaagtactcggtaaacagtagtaaccaaatattttcactccagatttgtgttttctctggcacagagtagatcttttgggaaatatatatgaaagtggattaagtttgactacccttatgttagccacatctggatgagaacagttacaaagagtttggtctctaagttgatttgtacccagtgggtcaacttctgcaaaattccgtaatggtgtattagtattagaatagtgaataaaatgggaaagttatacatgtatacttattatcttgctcagtattttatctcacttgttctagaattttctgtaaaccctgctactgggtttgaagagttttagtcatcctttaacaatttttaaaaatttagcttctagattccatttggtaaggaaatcaatattggaagtattgctaaaatcttataatatgaaaagagatccactaatgtagcttaaggttattagatttgggcttttaatcatggaataatcttatgtattggtgtaagagttgatgaatgactttagctgtgtgaatatataatagtcaaactgcaaacattttgcatcccttttgtgacctaatttacagacatttaaattgtgttgcagttctgctttgccgtttaataaaaagctatttca

SEQ ID NO: 191370 - DNA, 715 bp, Homo Sapiens
cgccctgccgagcgcccgccaggctcctcccgctcccgcgccgcctccctctacccacccgccgcacgtactaaggaaggcgcacagcccgccgcgctcgcctctccgccccgcgtccagctcgcccagctcgcccagcgtccgccgcgcctcggccaaggcttcaacggaccacaccaaaatgccatctcaaatggaacacgccatggaaaccatgatgtttacatttcacaaattcgctggggataaaggctacttaacaaaggaggacctgagagtactcatggaaaaggagttccctggatttttggaaaatcaaaaagaccctctggctgtggacaaaataatgaaggacctggaccagtgtagagatggcaaagtgggcttccagagcttcttttccctaattgcgggcctcaccattgcatgcaatgactattttgtagtacacatgaagcagaagggaaagaagtaggcagaaatgagcagttcgctcctccctgataagagttgtcccaaagggtcgcttaaggaatctgccccacagcttcccccatagaaggatttcatgagcagatcaggacacttagcaaatgtaaaaataaaatctaactctcatttgacaagcagagaaagaaaagttaaataccagataagcttttgatttttgtattgtttgcatccccttgccctcaataaataaagttctttttta

SEQ ID NO: 191371 - DNA, 628 bp, Homo Sapiens
aactttgtacaaaaaagttggcgtccagctcgcccagctcgcccagcgtccgccgcgcctcggccaaggcttcaacggaccacaccaaaatgccatctcaaatggaacacgccatggaaaccatgatgtttacatttcacaaattcgctggggataaaggctacttaacaaaggaggacctgagagtactcatggaaaaggagttccctggatttttggaaaatcaaaaagaccctctggctgtggacaaaataatgaaggacctggaccagtgtagagatggcaaagtgggcttccagagcttcttttccctaattgcgggcctcaccattgcatgcaatgactattttgtagtacacatgaagcagaagggaaagaagtaggcagaaatgagcagttcgctcctccctgataagagttgtcccaaagggtcgcttaaggaatctgccccacagcttcccccatagaaggatttcatgagcagatcaggacacttagcaaatgtaaaaataaaatctaactctcatttgacaagcagagaaagaaaagttaaataccagataagcttttgatttttgtattgtttgcatccccttccctccaaattcttcaataaaagttgcttttc

SEQ ID NO: 191372 - DNA, 862 bp, Homo Sapiens; identical to SEQ ID NO: 183961

SEQ ID NO: 191373 - DNA, 1267 bp, Homo Sapiens; identical to SEQ ID NO: 183962

SEQ ID NO: 191374 - DNA, 1263 bp, Homo Sapiens; identical to SEQ ID NO: 183963
  misc_feature (1126)..(1134): n is a, c, g, or t

SEQ ID NO: 191375 - DNA, 1151 bp, Homo Sapiens
ctttgtacaaaaaagttggctgttctccaccctggtgtgtctgaagctccctggaggctcctgcatggcagctctgacagtgacactgatggtgctgagctccccactggctttggctggggacacccaaccacgtttcctgtggcagggtaagtataagtgtcatttcttcaacgggacggagcgggtgcagttcctggaaagactcttctataaccaggaggagttcgtgcgcttcgacagcgacgtgggggagtaccgggcggtgacggagctagggcggcctgtcgccgagtcctggaacagccagaaggacatcctggaggacaggcggggccaggtggacaccgtgtgcagacacaactacggggttggtgagagcttcacagtgcagcggcgagtccatcctgaggtgactgtgtatcctgccaagactcagcccctgcagcaccacaacctcctggtctgctctgtgagtggtttctatccaggcagcattgaagtcaggtggttccggaacggccaggaagagaaggctggggtggtgtccacaggcctgatccagaatggagactggaccttccagaccctggtgatgctggaaacagttcctcggagtggagaagtttacacctgccaagtggagcacccaagtgtgatgagccctctcacagtggaatggagagcacggtctgaatctgcacagagcaagatgctgagtggagtcgggggctttgtgctgggcctgctcttccttggggccgggttgttcatctacttcaggaatcagaaaggacactctggacttcagccaacaggattcctgagctgaagtgaagatgaccacattcaaggaaaaaccttctgccccagctttgcaggatgaaacacttccccgcttggctctcattcttccacaagagagacctttctccggacctggttgctactggttcagcaactctgcagaaaatgtcctcccctgtggctgcctcagctcatgcctttggcctgaagtcccagcattgatggcagcccctcatcttccaagttttgtgctcccctttacctaacgcttcctgcctcccatgcatctgtactcctcctgtgccacaaacacattacattattaaaatgtttctcaaacatgg

SEQ ID NO: 191376 - DNA, 1188 bp, Homo Sapiens
ttggggtacatcagatccatcaggtccgagctgtgttgactaccactgcttttcccttcgtctcagttatgtcttggaagaaggctttgcggatccccggagaccttcgggtagcaactgtcaccttgatgctggcgatgctgagctccctactggctgagggcagagactctcccgaggatttcgtgttccagtttaagggcatgtgctacttcaccaacgggacggagcgcgtgcgtcttgtgaccagatacatctataaccgagaggagtacgcgcgcttcgacagcgacgtgggggtgtaccgcgcggtgacgccgcaggggcggcctgatgccgagtactggaacagccagaaggaagtcctggaggggacccgggcggagttggacacggtgtgcagacacaactacgaggtggcgttccgcgggatcttgcagaggagagtggagcccacagtgaccatctccccatccaggacagaggccctcaaccaccacaacctgctggtctgctcggtgacagatttctatccaggccagatcaaagtccggtggtttcggaatgatcaggaggagacagccggcgttgtgtccaccccccttattaggaatggtgactggactttccagatcctggtgatgctggaaatgactccccagcgtggagatgtctacacctgccacgtggagcaccccagcctccagagccccatcaccgtggagtggcgggctcagtctgaatctgcccagagcaagatgctgagtggcgttggaggcttcgtgctggggctgatcttccttgggctgggccttatcatccgtcaaaggagtcagaaagggcttctgcactgactcctgagactattttaactaggattggttatcactcttctgtgatgcctgcttgtgcctgcccagaattcccagctgcctgtgtcagcttgtccccctgagatcaaagtcctacagtggctgtcacgcagccaccaggtcatctcctttcatccccaccccaaggcgctggctgtgactctgcttcctgcactgacccagagcctctgcctgtgcatggccagctgcgtctactcaggtcccaaggggtttctgtttctattctttcctcacactgctcagagaagcacatgaaaaacattacctgactttagagcttttttactaattaaac

SEQ ID NO: 191377 - DNA, 877 bp, Homo Sapiens
ttggcttggaatgtgggtggaggggttcatagttctccctgagtgagacttgcctgctgctctggcccctggtcctgtcctgttctccagcatggtgtgtctgaggctccctggaggctcctgcatggcagttctgacagtgacactgatggtgctgagctccccactggctttggctggggacaccagaccacgtttcttggagtactctacgtctgagtgtcatttcttcaatgggacggagcgggtgcggttcctggacagatacttctataaccaagaggagtacgtgcgcttcgacagcgacgtgggggagttccgggcggtgacggagctggggcggcctgatgaggagtactggaacagccagaaggacttcctggaagacaggcgggccgcggtggacacctactgcagacacaactacggggttggggagagcttcacagtgcagcggcgagtccatcctaaggtgactgtgtatccttcaaagacccagcccctgcagcaccacaacctcctggtctgttctgtgagtggtttctatccaggcagcattgaagtcaggtggttccggaatggccaggaagagaagactggggtggtgtccacaggcctgatccacaatggagactggaccttccagaccctggtgatgctggaaacagttcctcggagtggagaggtttacacctgccaagtggagcacccaagcgtgacaagccctctcacagtggaatggagagcacggtctgaatctgcacagagcaagatgctgagtgggagtcgggggctttgtgctgggcctgctcttctttggggcccgggctgtttcatctacttcaggaattcagaaaggacacctctgggactttca

SEQ ID NO: 191378 - DNA, 1161 bp, Homo Sapiens; identical to SEQ ID NO: 183964

SEQ ID NO: 191379 - DNA, 896 bp, Homo Sapiens
tacaaaaaagttggcttgcctgctgctctggcccctggtcctgtcctgttctccagcatggtgtgtctgaggctccctggaggctcctgcatggcagttctgacagtgacactgatggtgctgagctccccactggctttggctggggacaccagaccacgtttcttggagtactctacgtctgagtgtcatttcttcaatgggacggagcgggtgcggtacctggacagatacttccataaccaggaggagaacgtgcgcttcgacagcgacgtgggggagttccgggcggtgacggagctggggcggcctgatgccgagtactggaacagccagaaggacctcctggagcagaagcggggccgggtggacaactactgcagacacaactacggggttgtggagagcttcacagtgcagcggcgagtccatcctaaggtgactgtgtatccttcaaagacccagcccctgcagcaccataacctcctggtctgttctgtgagtggtttctatccaggcagcattgaagtcaggtggttccggaatggccaggaagagaagactggggtggtgtccacaggcctgatccacaatggagactggaccttccagaccctggtgatgctggaaacagttcctcggagtggagaggtttacacctgccaagtggagcacccaagcgtgacaagccctctcacagtggaatggagagcacggtctgaatctgcacagagcaagatgctgagtggagtcgggggctttgtgctgggcctgctcttccttggggccgggctgttcatctacttcaggaatcagaaaggacactctggacttcagccaagaggattcctgagctgaagtgcagatgacacattcaaagaagaactttctgctcc

SEQ ID NO: 191380 - DNA, 901 bp, Homo Sapiens
ttggcatagttctccctgagtgagacttgcctgctgctctggcccctggtcctgtcctgttctccagcatggtgtgtctgaggctccctggaggctcctgcatggcagttctgacagtgacactgatggtgctgagctccccactggctttggctggggacaccagaccacgtttcttggagtactctacgggtgagtgttatttcttcaatgggacggagcgggtgcggttactggagagacacttccataaccaggaggagctcctgcgcttcgacagcgacgtgggggagttccgggcggtgacggagctggggcggcctgtcgccgagtcctggaacagccagaaggacatcctggaagacaggcgcgccgcggtggacacctattgcagacacaactacggggctgtggagagcttcacagtgcagcggcgagtccatcctaaggtgactgtgtatccttcaaagacccagcccctgcagcaccacaacctcctggtctgttctgtgagtggtttctatccaggcagcattgaagtcaggtggttccggaatggccaggaagagaagactggggtggtgtccacgggcctgatccacaatggagactggaccttccagaccctggtgatgctggaaacagttcctcggagtggagaggtttacacctgccaagtggagcacccaagcgtgacaagccctctcacagtggaatggagagcacggtctgaatctgcacagagcaagatgctgagtggagtcgggggctttgtgctgggcctgctcttccttggggccgggctgttcatctacttcaggaatcagaaaggacactctggacttcagccaagaggattcctgagctgaagtgcagatgacacattcaaagaaaacctttc

SEQ ID NO: 191381 - DNA, 1033 bp, Homo Sapiens
ttggccttcttttcctgactgcagctcttttcattttgccatccttttccagctccatgatggttctgcaggtttctgcggccccccggacagtggctctgacggcgttactgatggtgctgctcacatctgtggtccagggcagggccactccagagaattacgtgtaccagttacggcaggaatgctacgcgtttaatgggacacagcgcttcctggagagatacatctacaaccgggaggagttcgtgcgcttcgacagcgacgtgggggagttccgggcggtgacggagctggggcggcctgatgaggactactggaacagccagaaggacctcctggaggagaagcgggcagtgccggacagggtatgcagacacaactacgagctggacgaggccgtgaccctgcagcgccgagtccagcctaaggtgaacgtttccccctccaagaaggggcccctgcagcaccacaacctgcttgtctgccacgtgacagatttctacccaggcagcattcaagtccgatggttcctgaatggacaggaggaaacagctggggtcgtgtccaccaacctgatccgtaatggagactggaccttccagatcctggtgatgctggaaatgaccccccagcagggagacgtctacatctgccaagtggagcacaccagcctggacagtcctgtcaccgtggagtggaaggcacagtctgattctgcccggagtaagacattgacgggagctgggggcttcgtgctggggctcatcatctgtggagtgggcatcttcatgcacaggaggagcaagaaagttcaacgaggatctgcataaacagggttcctgacctcaccgaaaagactaatgtgccttagaacaagcatttgctgtgttttgttagcacctggttccaggacagaccctcagcttcccagaggatactgctgccaagaagttgctctgaaatcagtttctatcgttctgctctttgattcaaagcactgtttctctcactgggcctccaccatgttccc

SEQ ID NO: 191382 - DNA, 931 bp, Homo Sapiens
actttgtacaaattggcttggcctgcttctctggcccctggtcctgtcctgttctccagcatggtgtgtctgaagctccctggaggctcctgcatgacagcgctgacagtgacactgatggtgctgagctccccactggctttgtctggggacacccgaccacgtttcctgtggcagcctaagagggagtgtcatttcttcaatgggacggagcgggtgcggttcctggacagatacttctataaccaggaggagtccgtgcgcttcgacagcgacgtgggggagttccgggcggtgacggagctggggcggcctgacgctgagtactggaacagccagaaggacatcctggagcaggcgcgggccgcggtggacacctactgcagacacaactacggggttgtggagagcttcacagtgcagcggcgagtccaacctaaggtgactgtatatccttcaaagacccagcccctgcagcaccacaacctcctggtctgctctgtgagtggtttctatccaggcagcattgaagtcaggtggttcctgaacggccaggaagagaaggctgggatggtgtccacaggcctgatccagaatggagactggaccttccagaccctggtgatgctggaaacagttcctcgaagtggagaggtttacacctgccaagtggagcacccaagcgtgacaagccctctcacagtggaatggagagcacggtctgaatctgcacagagcaagatgctgagtggagtcgggggctttgtgctgggcctgctcttccttggggccgggctgttcatctacttcaggaatcagaaaggacactctggacttcagccaacaggattcctgagctgaaatgcagatgaccacattcaaggaagaattttctgccccggctttgcaggatgaaaagctttcctgcttg

SEQ ID NO: 191383 - DNA, 912 bp, Homo Sapiens
ttggctccctttagcgagtccttcttttcctgactgcagctcttttcattttgccatccttttccagctccatgatggttctgcaggtttctgcggccccccggacagtggctctgacggcgttactgatggtgctgctcacatctgtggtccagggcagggccactccagagaattacgtgtaccagggacggcaggaatgctacgcgtttaatgggacacagcgcttcctggagagatacatctacaaccgggaggagtacgcgcgcttcgacagcgacgtgggggagttccgggcggtgacggagctggggcggcctgctgcggagtactggaacagccagaaggacatcctggaggagaagcgggcagtgccggacagggtatgcagacacaactacgagctggacgaggccgtgaccctgcagcgccgagtccagcctaaggtgaacgtttccccctccaagaaggggcccctgcagcaccacaacctgcttgtctgccacgtgacagatttctacccaggcagcattcaagtccgatggttcctgaatggacaggaggaaacagctggggtcgtgtccaccaacctgatccgtaatggagactggaccttccagatcctggtgatgctggaaatgaccccccagcagggagacgtctacatctgccaagtggagcacaccagcctggacagtcctgtcaccgtggagtggaaggcacagtctgattctgcccagagtaagacattgacgggagctgggggcttcgtgctggggctcatcatctgtggagtgggcatcttcatgcacaggaggagcaagaaagttcaacgaggatctgcataaacagggttcctgacctcaccgaaaagactaatgtgccttagaacaagcatttgctgtgttttgt

SEQ ID NO: 191384 - DNA, 877 bp, Homo Sapiens
ttgggcctgctccccttagcccctggtcctgtcctcttctccagcatggtgtgtctgaagctccctggaggctccagcttggcagcgttgacagtgacactgatggtgctgagctcccgactggctttcgctggggacacccgaccacgtttcttggagctgcttaagtctgagtgtcatttcttcaatgggacggagcgggtgcggttcctggagagacacttccataaccaggaggagtacgcgcgcttcgacagcgacgtgggggagtaccgggcggtgagggagctggggcggcctgatgccgagtactggaacagccagaaggacctcctggagcagaagcggggccaggtggacaattactgcagacacaactacggggttggtgagagcttcacagtgcagcggcgagtccatcctcaggtgactgtgtatcctgcaaagacccagcccctgcagcaccacaacctcctggtctgctctgtgagtggtttctatccaggcagcattgaagtcaggtggttccggaacggccaggaagagaaggctggggtggtgtccacgggcctgatccagaatggagactggaccttccagaccctggtgatgctagaaacagttcctcggagtggagaggtttacacctgccaagtggagcacccaagcgtaacgagccctctcacagtggaatggagtgcacggtctgaatctgcacagagcaagatgctgagtggagtcggggctttgtgctgggcctgctcttccttggggccgggctgttcatctacttcaggaatcagaaaggacactctggactcagccaacaggattccctgagctgaagtgcacatgacaatttaaggaagattctctt

SEQ ID NO: 191385 - DNA, 914 bp, Homo Sapiens
actttgtacaaaaaagttggctccctttagcgagtccttcttttcctgactgcagctcttttcattttgccatccttttccagctccatgatggttctgcaggtttctgcggccccccggacagtggctctgacggcgttactgatggtgctgctcacatctgtggtccagggcagggccactccagagaattacgtgtaccagggacggcaggaatgctacgcgtttaatgggacacagcgcttcctggagagatacatctacaaccgggaggagtacgcgcgcttcgacagcgacgtgggggagttccgggcggtgacggagctggggcggcctgctgcggagtactggaacagccagaaggacatcctggaggagaagcgggcagtgccggacagggtatgcagacacaactacgagctggacgaggccgtgaccctgcagcgccgagtccagcctaaggtgaacgtttccccctccaagaaggggcccctgcagcaccacaacctgcttgtctgccacgtgacagatttctacccaggcagcattcaagtccgatggttcctgaatggacaggaggaaacagctggggtcgtgtccaccaacctgatccgtaatggagactggaccttccagatcctggtgatgctggaaatgaccccccagcagggagacgtctacatctgccaagtggagcacaccagcctggacagtcctgtcaccgtggagtggaaggcacagtctgattctgcccagagtaagacattgacgggagctgggggcttcgtgctggggctcatcatctgtggagtgggcatcttcatgcccaggaggagcaagaaaagtgagaaagcctgcaagttcaacgaggatctgcataaacagggttcctgacctcaccgaaaagactaatg

SEQ ID NO: 191386 - DNA, 909 bp, Homo Sapiens
caactttgtacaaaaaagttggcctgcttctctggcccctggtcctgtcctgttctccagcatggtgtgtctgaagctccctggaggctcctgcatgacagcgctgacagtgacactgatggtgctgagctccccactggctttggctggggacacccgaccacgtttcttgtggcagcttaagtttgaatgtcatttcttcaatgggacggagcgggtgcggttgctggaaagatgcatctataaccaagaggagtccgtgcgcttcgacagcgacgtgggggagtaccgggcggtgacggagctggggcggcctgatgccgagtactggaacagccagaaggacctcctggagcagaggcgggccgcggtggacacctactgcagacacaactacggggttggtgagagcttcacagtgcagcggcgagttgagcctaaggtgactgtgtatccttcaaagacccagcccctgcagcaccacaacctcctggtctgctctgtgagtggtttctatccaggcagcattgaagtcaggtggttccggaacggccaggaagagaaggctggggtggtgtccacaggcctgatccagaatggagattggaccttccagaccctggtgatgctggaaacagttcctcggagtggagaggtttacacctgccaagtggagcacccaagtgtgacgagccctctcacagtggaatggagagcacggtctgaatctgcacagagcaagatgctgagtggagtcgggggcttcgtgctgggcctgctcttccttggggccgggctgttcatctacttcaggaatcagaaaggacactctggacttcagccaacaggattcctgagctgaaatgcaaatgaccacattcagggaagaaccttctgtcccagctttgc

SEQ ID NO: 191387 - DNA, 1217 bp, Homo Sapiens
tggacaaaaaagttggataatttggtgtgggtggagggggatcatagttctccctgagtgagacttgcctgctcctctggcccctggtcctgtcctgttctccagcatggtgtgtctgaagctccctggaggttcctacatggcaaagctgacagtgacactgatggtgctgagctccccactggctttggctggggacacccgaccacgtttcttgcagcaggataagtatgagtgtcatttcttcaacgggacggagcgggtgcggttcctgcacagagacatctataaccaagaggaggacttgcgcttcgacagcgacgtgggggagtaccgggcggtgacggagctggggcggcctgacgctgagtactggaacagccagaaggacttcctggaagacaggcgcgccgcggtggacacctactgcagacacaactacggggttggtgagagcttcacagtgcagcggcgagttgagcctaaggtgactgtgtatcctgcaaggacccagaccctgcagcaccacaacctcctggtctgctctgtgaatggtttctatccaggcagcattgaagtcaggtggttccggaacagccaggaagagaaggctggggtggtgtccacaggcctgattcagaatggagactggaccttccagaccctggtgatgctggaaacagttcctcgaagtggagaggtttacacctgccaagtggagcacccaagcgtgacgagccctctcacagtggaatggagagcacagtctgaatctgcacagagcaagatgctgagtggagtcgggggctttgtgctgggcctgctcttccttggggccgggctattcatctacttcaagaatcagaaagggcactctggacttcacccaacaggactcgtgagctgaagtgcagatgaccacattcaagggggaaccttctgccccagctttgcatgatgaaaagctttcctgcttggctcttattcttccacaagagaggactttctcaggccctggttgctaccggttcagcaactctgcagaaaatgtccatccttgtggcttcctcagctcctgcccttggcctgaagtcccagcattgatggcagtgcctcatcttcaactttagtgctcccctttacctaaccctacggcctcccatgcatctgtactccccctgtgtgccacaaatgcactacgttattaaatttttctg

SEQ ID NO: 191388 - DNA, 1198 bp, Homo Sapiens
cttttttccattagaaaagctttgtacaaaaaagttggctcacctgctcctctggcccctggtcctgtcctgttctccagcatggtgtgtctgaagttccctggaggctcctgcatggcagctctgacagtgacactgatggtgctgagctccccactggctttggctggggacacccgaccacgtttcttggagcaggttaaacatgagtgtcatttcttcaacgggacggagcgggtgcggttcctggacagatacttctatcaccaagaggagtacgtgcgcttcgacagcgacgtgggggagtaccgggcggtgacggagctggggcggcctgatgccgagtactggaacagccagaaggacctcctggagcagaggcgggccgcggtggacacctactgcagacacaactacggggttggtgagagcttcacagtgcagcggcgagtctatcctgaggtgactgtgtatcctgcaaagacccagcccctgcagcaccacaacctcctggtctgctctgtgaatggtttctatccaggcagcattgaagtcaggtggttccggaacggccaggaagagaagactggggtggtgtccacaggcctgatccagaatggagactggaccttccagaccctggtgatgctggaaacagttcctcggagtggagaggtttacacctgccaagtggagcacccaagcctgacgagccctctcacagtggaatggagagcacggtctgaatctgcacagagcaagatgctgagtggagtcgggggcttcgtgctgggcctgctcttccttggggccgggctgttcatctacttcaggaatcagaaaggacactctggacttcagccaacaggattcctgagctgaagtgaagatgaccacattcaaggaagaaccttctgccccagctttgcaggatgaaacacttccccgcttggctctcattcttccacaagagagacctttctccggacctggttgctactggttcagcagctctgcagaaaatgtcctcccttgtggctgcctcagctcgtacctttggcctgaagtcccagcattaatggcagcccctcatcttccaagttttgtgctcccctttacctaatgcttcctgcctcccatgcatctgtactcctgctgtgccacaaacacattacattattaaatgtttctcaaacag

SEQ ID NO: 191389 - DNA, 898 bp, Homo Sapiens
actttgtacaaaaaagttggcttttcattttgccatccttttccagctccatgatggttctgcaggtttctgcggccccccggacagtggctctgacggcgttactgatggtgctgctcacatctgtggtccagggcagggccactccagagaattacgtgcaccagttacggcaggaatgctacgcgtttaatgggacacagcgcttcctggagagatacatctacaaccgggaggagttcgtgcgcttcgacagcgacgtgggggagttccgggcggtgacggagctggggcggcctgatgaggagtactggaacagccagaaggacatcctggaggaggagcgggcagtgccggacagggtatgcagacacaactacgagctggacgaggccgtgaccctgcagcgccgagtccagcctaaggtgaacgtttccccctccaagaaggggcccctgcagcaccacaacctgcttgtctgccacgtgacagatttctacccaggcagcattcaagtccgatggttcctgaatggacaggaggaaacagctggggtcgtgtccaccaacctgatccgtaatggagactggaccttccagatcctggtgatgctggaaatgaccccccagcagggagacgtctacatctgccaagtggagcacaccagcctggacagtcctgtcaccgtggagtggaaggcacagtctgattctgcccggagtaagacatttgacgggagctgggggcttcgtgctggggctcatcatctgtggagtgggcatcttcatgcacaggaaggagcaagaaagttcaacgaggatctgcctaaacaggggttccttgacctcaccgaaaaagactaaatgtgccttagaaacaagcattttgcctgtgtttt

SEQ ID NO: 191390 - DNA, 907 bp, Homo Sapiens
ttggtgctgctctgaccactggtcttgtcctcttctccagcatggtgtgtctgaagctccctggaggctcctgtatggcagcgctgacagtgacattgacggtgctgagctccccactggctttggctggggacacccaaccacgtttcttggagcaggctaagtgtgagtgtcatttcctcaatgggacggagcgagtgtggaacctgatcagatacatctataaccaagaggagtacgcgcgctacaacagtgacctgggggagtaccaggcggtgacggagctggggcggcctgacgctgagtactggaacagccagaaggacctcctggagcggaggcgggccgaggtggacacctactgcagatacaactacggggttgtggagagcttcacagtgcagcggcgagtccaacctaaggtgactgtgtatccttcaaagacccagcccctgcagcaccacaacctcctggtctgctctgtgaatggtttctatccaggcagcattgaagtcaggtggttccggaacagccaggaagagaaggctggggtggtgtccacaggcctgatccagaatggagactggaccttccagaccctggtgatgctggaaacagttcctcggagtggagaggtttacacctgccaagtggagcatccaagcatgatgagccctctcacggtgcaatggagtgcacggtctgaatctgcacagagcaagatgctgagtggagtcgggggctttgtgctgggcctgctcttccttgggacaagggctgttcatctacttcaaggaatcaaaaaggacactctggacttcagccaacaggactcttgagctgaagtgcagatgaccacattcaaggaagaacccttctgccccagctttgcaagatgaaaagcttt

SEQ ID NO: 191391 - DNA, 861 bp, Homo Sapiens
ctttgtacaaaaaagttggctggctttggctggggacacccaaccacgtttcttggagcaggctaagtgtgagtgtcatttcctcaatgggacggagcgagtgtggaacctgatcagatacatctataaccaagaggagtacgcgcgctacaacagtgacctgggggagtaccaggcggtgacggagctggggcggcctgacgctgagtactggaacagccagaaggacctcctggagcggaggcgggccgaggtggacacctactgcagatacaactacggggttgtggagagcttcacagtgcagcggcgagtccaacctaaggtgactgtgtatccttcaaagacccagcccctgcagcaccacaacctcctggtctgctctgtgaatggtttctatccaggcagcattgaagtcaggtggttccggaacggccaggaagagaaggctggggtggtgtccacaggcctgatccagaatggagactggaccttccagaccctggtgatgctggaaacagttcctcggagtggagaggtttacacctgccaagtggagcatccaagcatgatgagccctctcacggtgcaatggagtgcacggtctgaatctgcacagagcaagatgctgagtggagtcgggggctttgtgctgggcctgctcttccttgggacagggctgttcatctacttcaggaatcagaaaggacactctggacttcagccaacaggactcttgagctgaagtgcagatgaccacattcaaggaagaaccttctgccccagctttgcaagatgaaaagctttcccacttggctcttattcttccacaagagctttgtcaggaccaggttgttactg

SEQ ID NO: 191392 - DNA, 1665 bp, Homo Sapiens; identical to SEQ ID NO: 183966

SEQ ID NO: 191393 - DNA, 2149 bp, Homo Sapiens; identical to SEQ ID NO: 183971
  misc_feature (255)..(270): n is a, c, g, or t
  misc_feature (670)..(679): n is a, c, g, or t
  misc_feature (1715)..(1729): n is a, c, g, or t

SEQ ID NO: 191394 - DNA, 1970 bp, Homo Sapiens; identical to SEQ ID NO: 183972
  misc_feature (1666)..(1680): n is a, c, g, or t

SEQ ID NO: 191395 - DNA, 2775 bp, Homo Sapiens; identical to SEQ ID NO: 183973
  misc_feature (348)..(362): n is a, c, g, or t
  misc_feature (1043)..(1057): n is a, c, g, or t
  misc_feature (1457)..(1466): n is a, c, g, or t
  misc_feature (2476)..(2517): n is a, c, g, or t

SEQ ID NO: 191396 - DNA, 1129 bp, Homo Sapiens; identical to SEQ ID NO: 183975
  misc_feature (107)..(134): n is a, c, g, or t
  misc_feature (262)..(272): n is a, c, g, or t
  misc_feature (668)..(677): n is a, c, g, or t

SEQ ID NO: 191397 - DNA, 1114 bp, Homo Sapiens; identical to SEQ ID NO: 183976
  misc_feature (416)..(425): n is a, c, g, or t
  misc_feature (957)..(984): n is a, c, g, or t

SEQ ID NO: 191398 - DNA, 1264 bp, Homo Sapiens
gccaactttgtacaaaaaagttggctcctgccccccctcccgcaccctgcgtttaggggttcagtcccacagaggccactgggttcccagtggtggctgttcagaaagcagaacatactaagcgtgaggtatcttctttgtgtgtgtgttttccaagccaacacactctacagattctttattaagttaagtttctctaagtaaatgtgtaactcatggtcactgtgtaaacattttcagtggcgatatatcccctttgaccttctcttgatgaaatttacatggtttcctttgagactaaaatagcgttgagggaaatgaaattgctggactatttgtggctcctgagttgagtgattttggtgaaagaaagcacatccaaagcatagtttacctgcccacgagttctggaaaggtggccttgtggcagtattgacgttcctctgatcttaaggtcacagttgactcaatactgtgttggtccgtagcatggagcagattgaaatgcaaaaacccacacctctggaagataccttcacggccgctgctggagcttctgttgctgtgaatacttctctcagtgtgagaggttagccgtgatgaaagcagcgttacttctgaccgtgcctgagtaagagaatgctgatgccataactttatgtgtcgatacttgtcaaatcagttactgttcaggggatccttctgtttctcacggggtgaaacatgtctttagttcctcatgttaacacgaagccagagcccacatgaactgttggatgtcttccttagaaagggtaggcatggaaaattccacgaggctcattctcagtatctcattaactcattgaaagattccagttgtatttgtcacctggggtgacaagaccagacaggctttcccaggcctgggtatccagggaggctctgcagccctgctgaagggccctaactagagttctagagtttctgattctgtttctcagtagtccttttagaggcttgctatacttggtctgcttcaaggaggtcgaccttctaatgtatgaagaatgggatgcatttgatctcaagaccaaagacagatgtcagtgggctgctctggccctggtgtgcacggctgtggcagctgttgatgccagtgtcctctaactcatgctgtccttgtgattaaacacctctatctcccttgggaataagcacatacaggcttaagctctaagatagataggtgtttgtccttttaccatcgagctacttcccataa

SEQ ID NO: 191399 - DNA, 1224 bp, Homo Sapiens
ctttgtacaaaaaagttgggttctggaaaccgtggccttgtggcagtattgacgttcctctgatcttaaggtcacagttgactcaatactgtgttggtccgtagcatggagcagattgaaatgcaaaaacccacacctctggaagataccttcacggccgctgctggagcttctgttgctgtgaatacttctctcagtgtgagaggttagccgtgatgaaagcagcgttacttctgaccgtgcctgagtaagagaatgctgatgccataactttatgtgtcgatacttgtcaaatcagttactgttcaggggatccttctgtttctcacggggtgaaacatgtctttagttcctcatgttaacacgaagccagagcccacatgaactgttggatgtcttccttagaaagggtaggcatggaaaattccacgaggctcattctcagtatctcattaactcattgaaagattccagttgtatttgtcacctggggtgacaagaccagacaggctttcccaggcctgggtatccagggaggctctgcagccctgctgaagggccctaactagagttctagagtttctgattctgtttctcagtagtccttttagaggcttgctatacttggtctgcttcaaggaggtcgaccttctaatgtatgaagaatgggatgcatttgatctcaagaccaaagacagatgtcagtgggctgctctggccctggtgtgcacggctgtggcagctgttgatgccagtgtcctctaactcatgctgtccttgtgattaaacacctctatctcccttgggaataagcacatacaggcttaagctctaagatagataggtgtttgtccttttaccatcgagctacttcccataataaccactttgcatccaacactcttcacccacctcccatacgcaaggggatgtggatacttggcccaaagtaactggtggtaggaatcttagaaacaagaccacttatactgtctgtctgaggcagaagataacagcagcatctcgaccagcctctgctttaaaggaaatctttattaatcacgtatggttcacagataattctttttttaaaaaaacccaacctccctagagaagcacaactgtcaagagtcttgtacacacaacttcagctttgcatcacgagtcttgtattccaagaaaatcaaaggggtacaatttgtttggttacactatgatactttc

SEQ ID NO: 191400 - DNA, 1214 bp, Homo Sapiens
  misc_feature (831)..(839): n is a, c, g, or t
gagcaatggcttttttataatggccaactttgtacaaaaaagttggcattaactcattgaaagattccagttgtatttgtcacctggggtgacaagaccagacaggctttcccaggcctgggtatccagggaggctctgcagccctgctgaagggccctaactagagttctagagtttctgattctgtttctcagtagtccttttagaggcttgctatacttggtctgcttcaaggaggtcgaccttctaatgtatgaagaatgggatgcatttgatctcaagaccaaagacagatgtcagtgggctgctctggccctggtgtgcacggctgtggcagctgttgatgccagtgtcctctaactcatgctgtccttgtgattaaacacctctatctcccttgggaataagcacatacaggcttaagctctaagatagataggtgtttgtccttttaccatcgagctacttcccataataaccactttgcatccaacactcttcacccacctcccatacgcaaggggatgtggatacttggcccaaagtaactggtggtaggaatcttagaaacaagaccacttatactgtctgtctgaggcagaagataacagcagcatctcgaccagcctctgccttaaaggaaatctttattaatcacgtatggttcacagataattctttttttaaaaaaacccaacctcctagagaagcacaactgtcaagagtcttgtacacacaacttcagctttgcatcacgagtcttgtattccaagaaaatcaaagtggtacaatttgtttgtttacactatgatactttctaaataaactcnnnnnnnnnaaaagtctggtctttccttcaatgttacagcaaaacagatataaaatagacaataaattatagtttatatttacaaaaaaagctgtaagtgcaaacagttgtagattataaatgtattatttaatcagtttagtatgaaattgccttcccagtacatgattgtgaaaaagacatttagaaaatattctaaaatttaatctgagcctcactttctacaagggaaatcatgatttccgttcataaacagcatgctcatccccctaacaccattcttataagctgggcaccctcattttattttcttcgttggttctaaccctgtggcgtggtatgctgtatagtaaaaaggcagagccaacttttttgtacaaagtt

SEQ ID NO: 191401 - DNA, 431 bp, Homo Sapiens
aactttgtacaaaaaagttggctgatcttaaggcccacagttgactcaatactgtgttggtccgtagcatggagcagattgaaatgcaaaaacccacacctctggaagataccttcacggccgctgctggagcttctgttgctgtgaatacttctctcagtgtgagaggttagccgtgatgaaagcagcgttacttctgaccgtgcctgagtaagagaatgctgatgccataactttatgtgtcgatacttgtcaaatcagttactgttcaggggatccttctgtttctcacggggtgaaacatgtctttagttcctcatgttaacacgaagccagagcctacatgaactgttggatgtcttccttagaaagggtaggcatggaaaattccacgaggctcattctcagtatctcattaactcattgaaaga

SEQ ID NO: 191402 - DNA, 1889 bp, Homo Sapiens; identical to SEQ ID NO: 183980
  misc_feature (107)..(115): n is a, c, g, or t
  misc_feature (791)..(800): n is a, c, g, or t
  misc_feature (1424)..(1476): n is a, c, g, or t

SEQ ID NO: 191403 - DNA, 970 bp, Homo Sapiens
  misc_feature (878)..(893): n is a, c, g, or t
ttggcccaagatggcggacctactgggctgccatcctgagctccatggagaagccacccagcctcggtgaccaggagactcggcgcaaggcccgagaacaggccgcccgcctgaagaaactacaagagcaagagaaacaacagaaagtggagtttcgtaaaaggatggagaaggaggtgtcagatttcattcaagacagtgggcagatcaagaaaaagtttcagccaatgaacaagatcgagaggagcatactacatgatgtggtggaagtggctggcctgacatccttctcctttggggaagatgatgactgtcgctatgtcatgatcttcaaaaaggagtttgcaccctcagatgaagagctagactcttaccgtcgtggagaggaatgggacccccagaaggctgaggagaagcggaagctgaaggagctggcccagaggcaagaggaggaggcagcccagcaggggcctgtggtggtgagccctgccagcgactacaaggacaagtacagccacctcatcggcaagggagcagccaaagacgcagcccacatgctacaggccaataagacctacggctgtgtgcccgtggccaataagagggacacacgctccattgaagaggctatgaatgagatcagagccaagaagcgtctgcggcagagtggggaagagttgccgccaacctcctaggcgccccgcccagctccctttgacccctggggcagggcagggggcagggagagacaaggctgctgctattagagcccatcctggaaccccacctctgaaccacctcctaccagctgtccctcaggctgggggaaaacaggtgtttgatttgtcaccgttggagcttggatatgtgcgtggcannnnnnnnnnnnnnnnagagtgtgaatgcacaggtgggtatttaatctgtattattcccgttcttggaattttcttccccatggggctggggt

SEQ ID NO: 191404 - DNA, 1530 bp, Homo Sapiens; identical to SEQ ID NO: 183982

SEQ ID NO: 191405 - DNA, 973 bp, Homo Sapiens; identical to SEQ ID NO: 183983

SEQ ID NO: 191406 - DNA, 924 bp, Homo Sapiens
ttggcgcccgcttgcccgtcggtcgctagctcgctcggtgcgcgtcgtcccgctccatggcgctcttcgtgcggctgctggctctcgccctggctctggccctgggccccgccgcgaccctggcgggtcccgccaagtcgccctaccagctggtgctgcagcacagcaggctccggggccgccagcacggccccaacgtgtgtgctgtgcagaaggttattggcactaataggaagtacttcaccaactgcaagcagtggtaccaaaggaaaatctgtggcaaatcaacagtcatcagctacgagtgctgtcctggatatgaaaaggtccctggggagaagggctgtccagcagccctaccactctcaaacctttacgagaccctgggagtcgttggatccaccaccactcagctgtacacggaccgcacggagaagctgaggcctgagatggaggggcccggcagcttcaccatcttcgcccctagcaacgaggcctgggcctccttgccagctgtgagatgacctccgtctgcccgggggactcttatggggaactgccttacttccccgaggggtgggcatgatgaatgggagtctgcagtcatttcctactgtttcaggaagctttctccttaaccccttagaaaaggctgtggaacttgagctaaaatatgtcttaccaggttgcgtctaatgccccccgttccctactgggcagaaagacttgggtgcttcctgaggagggatccttggcagaagagaggcctgggctcacgagggctgagaacatgtttcccagagttgcaaggacccatctcttaaacacagagtctgcagcccctaactgacaccctgtccttcctcctaagaagtgctggactccctggtcagcaatgtcaacattgaagctgctcaatgccct

SEQ ID NO: 191407 - DNA, 938 bp, Homo Sapiens
ttggaggaaatttggaagctgccgcagtagttgttggctaaggactcgtgacaatcttcgggtgcccttcgagagaaaaggggaggatgccactggagtcatcctcttcaatgccactatccttcccatctctcttaccctcagtaccacacaatactaacccttcccctcctctgatgtcttacatcacctcccaggagatgaagtgtattcttcactggtttgccaattggtcaggtccccagcgtgaacgtttcctagaggacctggtagctaaggcagtgccagaaaaattacaaccactgctggatagtctggagcagcttagtgtgtctggggcagaccgaccaccttctatctttgagtgccagctacatctttgggatcagtggtttcgaggctgggctgagcaggagcgcaatgaatttgtcagacagctggagttcagtgagccagacttcgtggcaaagttttaccaagcagtggctgctacagctggtaaggactgataggcattcagaccaaagaagataaccatagctgatggagccatgactctctacaatgataactcaattcaaatgtgtcgcctaaagctctggaactggtattccaaccagctgaccgaactcactgaccagtacaggcatggttatttcaacattaatagcatgtcaactggactcctatttgtaaatgttatcaatctaagcaatccagctcatcagtctactagtttgcttctttccgagagatgtcaagtcctcaagaatttgatggcttcttctgcagctataaccacaaggaacctacacattgtaactcaagtccactgctggctcatgaaatgtgtaaagtaaaaccctccttccccagaaataagacaggacaataaaagtggcgtttttgtacttttacctggatccattggctggttt

SEQ ID NO: 191408 - DNA, 1096 bp, Homo Sapiens
ctttgtacaaaaaagttggagaaaacagatgtcccattacagatctttggatggtgaagggaattttaactggcgatttgttttcccgtttgactaccttccagccgaacaactctgtatcgttgcgaaaaaagagcatttctggagtattgaccaaacggaatttcgaatcccacccaggctgatcattcagatatgggacaatgacaagttttctctggatgactacttgggtttcctagaacttgacttgcgtcacacgatcattcctgcaaaatcaccagagaaatgcaggttggacatgattccggacctcaaagccatgaacccccttaaagccaagacagcctccctctttgagcagaagtccatgaaaggatggtggccatgctacgcagagaaagatggcgcccgcgtaatggctgggaaagtggagatgacattggaaatcctcaacgagaaggaggccgacgagaggccagccgggaaggggcgggacgaacccaacatgaaccccaagctggacttaccaaatcgaccagaaacctccttcctctggttcaccaacccatgcaagaccatgaagttcatcgtgtggcgccgctttaagtgggtcatcatcggcttgctgttcctgcttatcctgctgctcttcgtggccgtgctcctctactctttgccgaactatttgtcaatgaagattgtaaagccaaatgtgtaacaaaggcaaaggcttcatttcaagagtcatccagcaatgagagaatcctgcctctgtagaccaacatccagtgtgattttgtgtctgagaccacaccccagtagcaggttacgccatgtcaccgagccccattgattcccagagggtcttagtcctggaaagtcaggccaacaagcaacgtttgcatcatgttatctcttaagtattaaaagttttattttctaaagtttaaatcatgtttttcaaatatttttcaaggtggctggttccatttaaaattcatctttttatatgtgtcttcggttctagacttcagcttttggaaattgctaatagaattcaaaaatctctgcatcctgagtgatatacttcata

SEQ ID NO: 191409 - DNA, 1763 bp, Homo Sapiens; identical to SEQ ID NO: 183987

SEQ ID NO: 191410 - DNA, 2809 bp, Homo Sapiens; identical to SEQ ID NO: 183989
  misc_feature (1998)..(2033): n is a, c, g, or t
  misc_feature (2077)..(2087): n is a, c, g, or t
  misc_feature (2486)..(2543): n is a, c, g, or t
  misc_feature (2597)..(2623): n is a, c, g, or t

SEQ ID NO: 191411 - DNA, 1469 bp, Homo Sapiens; identical to SEQ ID NO: 180151

SEQ ID NO: 191412 - DNA, 2514 bp, Homo Sapiens; identical to SEQ ID NO: 183990

SEQ ID NO: 191413 - DNA, 927 bp, Homo Sapiens
ttggctttgtttgtgtgtgcgtgttgttggcctccatccccactccccagactccacttctccaggcctctctcccgccttttcatcccgcatccgcaggacacccaatcaccgggcaacaggatgccttccgcgccttccaccctgacctggaattcgtgggcaagttcttgaaacccctgctgattggtgaactggccccggaggagcccagccaggaccacggcaagaactcaaagatcactgaggacttccgggccctgaggaagacggctgaggacatgaacctgttcaagaccaaccacgtgttcttcctcctcctcctggcccacatcatcgccctggagagcattgcatggttcactgtcttttactttggcaatggctggattcctaccctcatcacggcctttgtccttgctacctctcaggcccaagctggatggctgcaacatgattatggccacctgtctgtctacagaaaacccaagtggaaccaccttgtccacaaattcgtcattggccacttaaagggtgcctctgccaactggtggaatcatcgccacttccagcaccacgccaagcctaacatcttccacaaggatcccgatgtgaacatgctgcacgtgtttgttctgggcgaatggcagcccatcgagtacggcaagaagaagctgaaatacctgccctacaatcaccagcacgaatacttcttcctgattgggccgccgctgctcatccccatgtatttccagtaccagatcatcatgaccatgatcgtccataagaactgggtggacctggcctggggccgtcagctactacatccggttcttcatcacctacatccctttctacggcatcctgggagccctccttttcctcaacttcatcaagttcctggagagccactggtttgtgtgggtc

SEQ ID NO: 191414 - DNA, 1138 bp, Homo Sapiens; identical to SEQ ID NO: 183993

SEQ ID NO: 191415 - DNA, 2456 bp, Homo Sapiens; identical to SEQ ID NO: 183994

SEQ ID NO: 191416 - DNA, 1163 bp, Homo Sapiens; identical to SEQ ID NO: 180153

SEQ ID NO: 191417 - DNA, 888 bp, Homo Sapiens; identical to SEQ ID NO: 183995

SEQ ID NO: 191418 - DNA, 2471 bp, Homo Sapiens; identical to SEQ ID NO: 183996

SEQ ID NO: 191419 - DNA, 897 bp, Homo Sapiens; identical to SEQ ID NO: 180156

SEQ ID NO: 191420 - DNA, 1689 bp, Homo Sapiens; identical to SEQ ID NO: 183998
  misc_feature (940)..(971): n is a, c, g, or t

SEQ ID NO: 191421 - DNA, 2803 bp, Homo Sapiens; identical to SEQ ID NO: 180157

SEQ ID NO: 191422 - DNA, 865 bp, Homo Sapiens; identical to SEQ ID NO: 183999

SEQ ID NO: 191423 - DNA, 1297 bp, Homo Sapiens; identical to SEQ ID NO: 180158

SEQ ID NO: 191424 - DNA, 863 bp, Homo Sapiens
ttggcggctcgcaggcaccatgactcctgtgaggatgcagcactccctggcaggtcagacctatgccgtgcccctcatccagccagacctgcggcgagaggaggccgtccagcagatggcggatgccctgcagtacctgcagaaggtctctggagacatcttcagcaggatctcccagcgggtagagcagagccggagccaggtgcaggccattggagagaaggtctccttggcccaggccaagattgagaagatcaagggcagcaagaaggccatcaaggtgttctccagtgccaagtaccctgctccagagcgcctgcaggaatatggctccatcttcacgggcgcccaggaccctggcctgcagagacgctcccgccacaggatccagagcaagcaccgccccctggacgagcgggccctgcaggagaagctgaagtactttcccgtgtgtgtgagcaccaagccggagcccgaggacgatgcagaagagggacttgggggtcttcccagcaacatcagctctgtcagctccttgctgctcttcaacaccaccgagaacctgtacaagaagtatgtcttcctggaccccctggctggtgctgtaacaaagacccatgtgatgctgggggcagagacagaggagaagctgtttgatgcccccttgtccatcagcaagagagagcagctggaacagcaggtcccagagaactacttctatgtgccagacctgggccagtgcctgagattgatgttccgtcctacctgcctgacctgcccggcattgccaacgacctcatgtacagtgccgaactgggccccggcattggccccctctgcccctggcaccatttccggaactg

SEQ ID NO: 191425 - DNA, 1375 bp, Homo Sapiens; identical to SEQ ID NO: 184002

SEQ ID NO: 191426 - DNA, 502 bp, Homo Sapiens
aattgatggagcaatgcttttttataatgccaactttgtacaaaaaagttggcattttgacatttgcacttggagaacacttgagttgtgaaggttttgggcatccaccccagaaagtgggaatttgattttatccttccgaactggaagaacatttttatgaagaatttttgtctaggagaatataacagtgttacccaaggttgtgtctttaagggtggttcattttctctgaccttttgttactcaaagtaaagtactaggagtcctaagaaatgttctgttcttgtacattatactgattaagtcaggattaatttgatttcaaagctgagaacagtggtaaaaactcgtttacagaaatgcattttggaagagaaaaatactgtaaaacgtgtcgtgaatgtttcttcagtttcttgttcagccaatgaggaaagggcattgcctttctttttaccattaatcacttctcaataaacgtgagatcctgttgagcatc

SEQ ID NO: 191427 - DNA, 1171 bp, Homo Sapiens; identical to SEQ ID NO: 184006

SEQ ID NO: 191428 - DNA, 1083 bp, Homo Sapiens
ttggcggcgacggagatcaaaatggaggaagagagcggcgcgcccggcgtgccgagcggcaacggggctccgggccctaagggtgaaggagaacgacctgctcagaatgagaagaggaaggagaaaaacataaaaagaggaggcaatcgctttgagccatatgccaatccaactaaaagatacagagccttcattacaaacataccttttgatgtgaaatggcagtcacttaaagacctggttaaagaaaaagttggtgaggtaacatacgtggagctcttaatggacgctgaaggaaagtcaaggggatgtgctgttgttgaattcaagatggaagagagcatgaaaaaagctgcggaagtcctaaacaagcatagtctgagcggaagaccactgaaagtcaaagaagatcctgatggtgaacatgccaggagagcaatgcaaaaggctggaagacttggaagcacagtatttgtagcaaatctggattataaagttggctggaagaaactgaaggaagtatttagtatggctggtgtggtggtccgagcagacattcttgaagataaagatggaaaaagtcgtggaataggcactgttacttttgaacagtccattgaagctgtgcaagctatatctatgttcaatggccagctgctatttgatagaccaatgcacgtcaagatggatgagagggccttaccaaaaggagatttcttccctcctgagcgtccacaacaacttccccatggccttggtggtattggcatggggttaggaccaggagggcaacccattgatgccaatcacctgaataaaggcatcggaatgggaaacatagtcccgcagaatgggaatggaaggcatagatttggaataaataaaatgggaggaatggaggggccctttggtggtggtatggaaaacatgggtcgatttggatctgggatgaacatgggcaggataaatggtggaggtggaggaagcgtccctgggatcgagaggatgggtcctggcattgaccgcctcgggggtgccggcatgagcgcatggcgcgggcctgggccacggcatggatcgcgt

SEQ ID NO: 191429 - DNA, 1636 bp, Homo Sapiens
actttgtacaaaaaagttggggatgagagggccttaccaaaaggagatttcttccctcctgagcgtccacaacaacttccccatggccttggtggtattggcatggggttaggaccaggagggcaacccattgatgccaatcacctgaataaaggcatcggaatgggaaacataggtcccgcaggaatgggaatggaaggcataggatttggaataaataaaatgggaggaatggaggggccctttggtggtggtatggaaaacatgggtcgatttggatctgggatgaacatgggcaggataaatgaaatcctaagtaatgcactgaagagaggagagatcattgcaaagcagggaggaggtggaggtggaggaagcgtccctgggatcgagaggatgggtcctggcattgaccgcctcgggggtgccggcatggagcgcatgggcgcgggcctgggccacggcatggatcgcgtgggctccgagatcgagcgcatgggcctggtcatggaccgcatgggctccgtggagcgcatgggctccggcattgagcgcatgggcccgctgggcctcgaccacatggcctccagcattgagcgcatgggccagaccatggagcgcattggctctggcgtggagcgcatgggtgccggcatgggcttcggccttgagcgcatggccgctcccatcgaccgtgtgggccagaccattgagcgcatgggctctggcgtggagcgcatgggccctgccatcgagcgcatgggcctgagcatggagcgcatggtgcccgcaggtatgggagctggcctggagcgcatgggccccgtgatggatcgcatggccaccggcctggagcgcatgggcgccaacaatctggagcggatgggcctggagcgcatgggcgccaacagcctcgagcgcatgggcctggagcgcatgggtgccaacagcctcgagcgcatgggccccgccatgggcccggccctgggcgctggcattgagcgcatgggcctggccatgggtggcggtggcggtgccagctttgaccgtgccatcgagatggagcgtggcaacttcggaggaagcttcgcaggttcctttggtggagctggaggccatgctcctggggtggccaggaaggcctgccagatatttgtgagaaatctgccattcgatttcacatggaagatgctaaaggacaaattcaacgagtgcggccacgtgctgtacgccgacatcaagatggagaatgggaagtccaaggggtgtggtgtggttaagttcgagtcgccagaggtggccgagagagcctgccggatgatgaatggcatgaagctgagtggccgagagattgacgttcgaattgatagaaacgcttaagcagttgccttttttaaacatcgatacgagacctctgaatttgtattttttcttgttaaccattttaatttgttggctggatgtataaagatgtttaaaaaattcagttgctttttggggtaatttgaattacttttttaatgactggggttccatttgactgtttgcattgagattgcaatgtgcgcaattttttttgtagttgtggcatcttgttgacatcgaatatgactttgataataaataccggttcctg

SEQ ID NO: 191430 - DNA, 1353 bp, Homo Sapiens; identical to SEQ ID NO: 184007

SEQ ID NO: 191431 - DNA, 612 bp, Homo Sapiens
tttgtacaaaaaagttgggaccgtgccatcccatatggagcgtggcaacttcggaggaagcttcgcaggttcctttggtggagctggaggccatgctcctggggtggccaggaaggcctgccagatatttgtgagaaatctgccattcgatttcacatggaagatgctaaaggacaaattcaacgagtgcggccacgtgctgtacgccgacatcaagatggagaatgggaagtccaaggggtgtggtgtggttaagttcgagtcgccagaggtggccgagagagcctgccggatgatgaatggcatgaagctgagtggccgagagattgacgttcgaattgatagaaacgcttaagcagttgccttttttaaacatcgatacgagacctctgaatttgtattttttcttgttaaccattttaatttgttggctggatgtataaagatgtttaaaaaattcagttgctttttggggtaatttgaattacttttttaatgactggggttccatttgactgtttgcattgagattgcaatgtgcgcaattttttttgtagttgtggcatcttgttgacatcgaatatgactttgataataaatacccggttcctg

SEQ ID NO: 191432 - DNA, 1446 bp, Homo Sapiens; identical to SEQ ID NO: 184009
  misc_feature (53)..(83): n is a, c, g, or t
  misc_feature (1027)..(1045): n is a, c, g, or t
  misc_feature (1266)..(1279): n is a, c, g, or t

SEQ ID NO: 191433 - DNA, 1595 bp, Homo Sapiens; identical to SEQ ID NO: 184010
  misc_feature (140)..(158): n is a, c, g, or t
  misc_feature (379)..(392): n is a, c, g, or t
  misc_feature (1208)..(1296): n is a, c, g, or t

SEQ ID NO: 191434 - DNA, 2138 bp, Homo Sapiens; identical to SEQ ID NO: 184011
  misc_feature (859)..(873): n is a, c, g, or t
  misc_feature (1173)..(1187): n is a, c, g, or t
  misc_feature (1727)..(1757): n is a, c, g, or t

SEQ ID NO: 191435 - DNA, 738 bp, Homo Sapiens; identical to SEQ ID NO: 180161
  misc_feature (327)..(335): n is a, c, g, or t

SEQ ID NO: 191436 - DNA, 1629 bp, Homo Sapiens; identical to SEQ ID NO: 180163
  misc_feature (867)..(875): n is a, c, g, or t

SEQ ID NO: 191437 - DNA, 903 bp, Homo Sapiens; identical to SEQ ID NO: 184015
  misc_feature (704)..(715): n is a, c, g, or t

SEQ ID NO: 191438 - DNA, 2248 bp, Homo Sapiens; identical to SEQ ID NO: 184016
  misc_feature (2103)..(2114): n is a, c, g, or t

SEQ ID NO: 191439 - DNA, 338 bp, Homo Sapiens; identical to SEQ ID NO: 184017
  misc_feature (49)..(61): n is a, c, g, or t
  misc_feature (302)..(315): n is a, c, g, or t

SEQ ID NO: 191440 - DNA, 1049 bp, Homo Sapiens
caatgcttttcttttaaaagcccactttgtacaaaaaagttggctctcactcccccaattcagttgctttgcccaagataggagttctctgatgcagaaattattgggctcttttagggtaagaagttcgtgtctttgtctggccacatcttgactaggtattgtctactctgaagacctttaatggcttccctctttcatctcctgagtatgtaacttgcaatgggcagctatccagtgacttgttctgagtaagtgtgttcattaatgtttatttagctctgaagcaagagtgatatactccaggacttagaatagtgcctaaagtgctgcagccaaagacagagcggaactatgaaaagtgggcttggagatggcaggagagcttgtcattgagcctggcaatttagcaaactgatgctgaggatgattgaggtgggtctacctcatctctgaaaattctggaaggaatggaggagtctcaacatgtgtttctgacacaagatccgtggtttgtactcaaagcccagaatccccaagtgcctgcttttgatgatgtctacagaaaatgctggctgagctgaacacatttgcccaattccaggtgtgcacagaaaaccgagaatattcaaaattccaaatttttttcttaggagcaagaagaaaatgtggccctaaagggggttagttgaggggtagggggtagtgaggatcttgatttggatctctttttatttaaatgtgaatttcaacttttgacaatcaaagaaaagacttttgttgaaatagctttactgtttctcaagtgttttggagaaaaaaatcaaccctgcaatcactttttggaattgtcttgatttttcggcagttcaagctatatcgaatatagttctgtgtagagaatgtcactgtagttttgagtgtatacatgtgtgggtgctgataattgtgtattttctttgggggtggaaaaggaaaacaattcaagctgagaaaagtattctcaaagatgcatttttataaattttattaaacaattttgttaaacc

SEQ ID NO: 191441 - DNA, 961 bp, Homo Sapiens
  misc_feature (173)..(279): n is a, c, g, or t
gcttttttataattgccaactttgtacaaaaaagttggcccagctccccaactccctgccattttttaagagacagtttcgctccatcgcccaggcctgggatgcagtgatgtgatcatagctcactgtaacctcaaactctggggctcaagcagttctcccaccagcctccnnnnnnnnnnnnnnnnnnnnnnnnnnnnnnnnnnnnnnnnnnnnnnnnnnnnnnnnnnnnnnnnnnnnnnnnnnnnnnnnnnnnnnnnnnnnnnnnnnnnnnnnnnntgggcatgagctgctgtgcccagcctccatgttttaatatcaactctcactcctgaattcagttgctttgcccaagataggagttctctgatgcagaaattattgggctcttttagggtaagaagttcgtgtctttgtctggccacatcttgactaggtattgtctactctgaagacctttaatggcttccctctttcatctcctgagtatgtaacttgcaatgggcagctatccagtgacttgttctgagtaagtgtgttcattaatgtttatttagctctgaagcaagagtgatatactccaggacttagaatagtgcctaaagtgctgcagccaaagacagagcggaactatgaaaagtgggcttggagatggcaggagagcttgtcattgagcctggcaatttagcaaactgatgctgaggatgattgaggtgggtctacctcatctctgaaaattctggaaggaatggaggagtctcaacatgtgtttctgacacaagatccgtggtttgtactcaaagcccagaatccccaagtgcctgcttttgatgatgtctacagaaaatgctggctgagctgaacacatttgcccaattccaggtgtgcacagaaaaccgagaatattcaaaattcccaatttttttctaggagcaagaagaaatgtggccctaaagggggt

SEQ ID NO: 191442 - DNA, 1430 bp, Homo Sapiens; identical to SEQ ID NO: 184018
  misc_feature (403)..(414): n is a, c, g, or t
  misc_feature (655)..(668): n is a, c, g, or t
  misc_feature (692)..(793): n is a, c, g, or t
  misc_feature (817)..(927): n is a, c, g, or t
  misc_feature (1079)..(1185): n is a, c, g, or t

SEQ ID NO: 191443 - DNA, 1075 bp, Homo Sapiens; identical to SEQ ID NO: 184019
  misc_feature (454)..(564): n is a, c, g, or t
  misc_feature (716)..(822): n is a, c, g, or t

SEQ ID NO: 191444 - DNA, 3485 bp, Homo Sapiens; identical to SEQ ID NO: 184021
  misc_feature (2995)..(3011): n is a, c, g, or t

SEQ ID NO: 191445 - DNA, 2466 bp, Homo Sapiens; identical to SEQ ID NO: 184022

SEQ ID NO: 191446 - DNA, 1403 bp, Homo Sapiens; identical to SEQ ID NO: 184023

SEQ ID NO: 191447 - DNA, 934 bp, Homo Sapiens; identical to SEQ ID NO: 184024
  misc_feature (739)..(758): n is a, c, g, or t

SEQ ID NO: 191448 - DNA, 935 bp, Homo Sapiens
  misc_feature (483)..(507): n is a, c, g, or t
actttgtacaaaaaagttggggagccttagaggtctttaatcattggttcggctgcttttatgtagtttaggctggaaatggtttcacttgctctttgactgtcagcaagactgaagatggcttttcctggacagctagaaaacacaaaatcttgtaggtcattgcacctatctcagccataggtgcagtttgcttctacatgatgctaaaggctgcgaatgggatcctgatggaactaaggactccaatgtcgaactcttctttgctgcattcctttttcttcacttacaagaaaggcctgaatggaggacttttctgtaaccaggaacattttttaggggtcaaagtgctaataattaactcaaccaggtctactttttaatggctttcataacactaactcataaggttaccgatcaatgcatttcatacggatatagacctagggctctggagggtgggggattgttaaaacacatgcnnnnnnnnnnnnnnnnnnnnnnnnngaaattttgtataaataaccattttaatcttttataaagttttgaatgttcatgtatgaatgctgcagctgtgaaccatacataaataaatgaagtaagccatactgatttaatttattggatgttattttccctaagacctgaaaatgaacatagtatgctagttatttttcagtgttagccttttactttactcacacaatttggaatcatataatataggtacttttgtccctgattaataatgtgacggatagaatgcatcaagtgtttattatgaaaagagtggaaaaagaatatacttttaccaaaggtgttggccctttctaaaaaatgagcaaatatatagaaatagtgtgggcatttcctccctgttaggtggagtgtatgtgttgacatttctccccatctccttcccactcggtttt

SEQ ID NO: 191449 - DNA, 1017 bp, Homo Sapiens; identical to SEQ ID NO: 184025

SEQ ID NO: 191450 - DNA, 1277 bp, Homo Sapiens; identical to SEQ ID NO: 184027

SEQ ID NO: 191451 - DNA, 1052 bp, Homo Sapiens; identical to SEQ ID NO: 184028

SEQ ID NO: 191452 - DNA, 1438 bp, Homo Sapiens; identical to SEQ ID NO: 180167
  misc_feature (929)..(940): n is a, c, g, or t

SEQ ID NO: 191453 - DNA, 950 bp, Homo Sapiens; identical to SEQ ID NO: 180168

SEQ ID NO: 191454 - DNA, 1961 bp, Homo Sapiens; identical to SEQ ID NO: 184030
  misc_feature (1635)..(1689): n is a, c, g, or t

SEQ ID NO: 191455 - DNA, 1623 bp, Homo Sapiens; identical to SEQ ID NO: 184031
  misc_feature (42)..(53): n is a, c, g, or t
  misc_feature (1142)..(1182): n is a, c, g, or t

SEQ ID NO: 191456 - DNA, 1376 bp, Homo Sapiens; identical to SEQ ID NO: 184035
  misc_feature (379)..(389): n is a, c, g, or t

SEQ ID NO: 191457 - DNA, 1057 bp, Homo Sapiens; identical to SEQ ID NO: 184036
  misc_feature (858)..(879): n is a, c, g, or t
  misc_feature (895)..(925): n is a, c, g, or t

SEQ ID NO: 191458 - DNA, 564 bp, Homo Sapiens
ccaactttgtacaaaaaagttggctctaaggacctaaaagcactttatgtagtttttaattaatcttaagatctggttacggtaactaaaaaagcctgtctgccaaatccagtggaaacaagtgcatagatgtgaattggtttttaggggccccacttcccaattcattaggtatgactgtggaaatacagacaaggatcttagttgatattttgggcttggggcagtgagggcttaggacaccccaagtggtttgggaaaggaggaggggagtggtgggtttatagggggaggaggaggcaggtggtctaagtgctgactggctacgttttttgggcaaatcctccaaaagggaaagggaggatttgcttagaacgatggcgctcccagtgactactttttgacttctgtttgtcttacgcttctctcagggaaaaacatgcagtcctctagtgtttcatgtacattctgtggggggtgaacaccttggttctggttaaacagctgtacttttgatagctgtgccaggaagggttaggaccaactacaaattaatgttggttg

SEQ ID NO: 191459 - DNA, 594 bp, Homo Sapiens
ttggtttttaattaatcttaagatctagttaccgtaaccagatcttaagattaattaaaaactggttacggtaactaaaaaagcctgtctgccaaatccagtggaaacaagtgcatagatgtgaattggtttttaggggccccacttcccaattcattaggtatgactgtggaaatacagacaaggatcttagttgatattttgggcttggggcagtgagggcttaggacaccccaagtggtttgggaaaggaggaggggagtggtgggtttatagggggaggaggaggcaggtggtctaagtgctgactggctacgtagttcgggcaaatcctccaaaagggaaagggaggatttgcttagaaggatggcgctcccagtgactactttttgacttctgtttgtcttacgcttctctcagggaaaaacatgcagtcctctagtgtttcatgtacattctgtggggggtgaacaccttggttctggttaaacagctgtacttttgatagctgtgccaggaagggttaggaccaactacaaattaatgttggttgtcaaatgtagtgtgtttccctaactttctgtttttcctgag

SEQ ID NO: 191460 - DNA, 1784 bp, Homo Sapiens; identical to SEQ ID NO: 180169
  misc_feature (428)..(439): n is a, c, g, or t

SEQ ID NO: 191461 - DNA, 1586 bp, Homo Sapiens; identical to SEQ ID NO: 184041

SEQ ID NO: 191462 - DNA, 1452 bp, Homo Sapiens; identical to SEQ ID NO: 184042
  misc_feature (91)..(134): n is a, c, g, or t

SEQ ID NO: 191463 - DNA, 686 bp, Homo Sapiens
  misc_feature (186)..(210): n is a, c, g, or t
cgggcaccaccggctcttcacagaccaggagtctccaagtcagcagctctggtgtccccgaggtgccgtgggaggcggcgggtgggtgcgacatgcctaacacctacgtctagcagcctcggagggcagtggcactgggccggacagggtcccaccggcaggacccttcaatcccgttgcatggcnnnnnnnnnnnnnnnnnnnnnnnnnatggtggagtgacctccggtggcaggcgggggcacgggcctagccctcccgcacgctcacgcgtggctcagccagggagctgtggatgatgctgatgatggactccaggccgctgccctccagcagcgtgcggtggtcaccctcgatgacgtggacggatactttcccgtcgcatacctgggagaggttgtagtccgcgcccaggtcctcgccgtaggcgccacccgtcttggcgcgcagtagcatcacgttgccatggtacttggccttgggtgtgtactgctcagcggcacgcagcttgtagtagaaggaccgggccgcaaagctcagctcctggcggtccaggccctggtggctcttgatgatcaggtccacggcggctgccacacgctcctctaggcccttcagcggcagcagcgcctccagcaccctgttgtgctccatgtccgtgaacgccaacttttttgtacaaagtt

SEQ ID NO: 191464 - DNA, 1844 bp, Homo Sapiens; identical to SEQ ID NO: 184044
  misc_feature (244)..(268): n is a, c, g, or t

SEQ ID NO: 191465 - DNA, 750 bp, Homo Sapiens
  misc_feature (189)..(213): n is a, c, g, or t
cacaggcaccaccgggctcttcacagaccaggagtctccaagtagggcagctctggtgtccccgaggtgccgtgggagtcggcgggtgggtggacatgcctaacacttacatctagcagcctcggggggcagtggcactgggccggacagggtcccaccggcaggacccttcaatcccgttgcatggcnnnnnnnnnnnnnnnnnnnnnnnnnatggtggagtgacctccggtggcaggcgggggcacgggcctagccctcccgcacgctcacgcgtggctcagccagggagctgtggatgatgctgatgatggactccaggccgctgccctccagcagcgtgcggtggtcaccctcgatgacgtggacggatactttcccgtcgcatacctgggagaggttgtagtccgcgcccaggtcctcgccgtaggcgccacccgtcttggcgcgcagtagcatcacgttgccatggtacttggccttgggtgtgtactgctcagcggcacgcagcttgtagtagaaggaccgggccgcaaagctcagctcctggcggtccaggccctggtggctcttgatgatcaggtccacggcggctgccacacgctcctctaggcccttcagcggcagcagcgcctccagcaccctgttgtgctccatgtccgtgaactgctgcacgaagaagcatatggcctccgtctcagcctcagcctcacagcaaggggtcagctttgccaacttttttgtacaaag

SEQ ID NO: 191466 - DNA, 777 bp, Homo Sapiens
  misc_feature (412)..(444): n is a, c, g, or t
cgctgctgccgctgaagggcctagaggagcgtgtggcagccgccgtggacctgatcatcaagagccaccagggcctggaccgccaggagctgagctttgcggcccggtccttctactacaagctgcgtgccgctgagcagtacacacccaaggccaagtaccatggcaacgtgatgctactgcgcgccaagacgggtggcgcctacggcgaggacctgggcgcggactacaacctctcccaggtatgcgacgggaaagtatccgtccacgtcatcgagggtgaccaccgcacgctgctggagggcagcggcctggagtccatcatcagcatcatccacagctccctggctgagccacgcgtgagcgtgcgggagggctaggcccgtgcccccgcctgccaccggaggtcacnnnnnnnnnnnnnnnnnnnnnnnnnnnnnnnnngccatgcaacgggattgaagggtcctgccggtgggaccctgtccggcccagtgccactgccccccgaggctgctagatgtaggtgttaggcatgtcccacccacccgccgcctctcacggcacctcggggacaccagagctgccgacttggagactcctggtctgtgaagagccggtggtgcccgtgccccgcaggaactgggctgggcctcgtgcgcccgtggggtctgcgcttggtctttctgtgcttggatttgcatatttattgcattgctggtagagacccccaggcctgtccaccctgccaagactcctcaggcatcgtgtgggtcc

SEQ ID NO: 191467 - DNA, 814 bp, Homo Sapiens; identical to SEQ ID NO: 180171
  misc_feature (131)..(150): n is a, c, g, or t
  misc_feature (538)..(549): n is a, c, g, or t

SEQ ID NO: 191468 - DNA, 1373 bp, Homo Sapiens; identical to SEQ ID NO: 180172
  misc_feature (111)..(142): n is a, c, g, or t
  misc_feature (408)..(427): n is a, c, g, or t
  misc_feature (815)..(825): n is a, c, g, or t

SEQ ID NO: 191469 - DNA, 975 bp, Homo Sapiens; identical to SEQ ID NO: 184047

SEQ ID NO: 191470 - DNA, 1734 bp, Homo Sapiens; identical to SEQ ID NO: 180174
  misc_feature (629)..(707): n is a, c, g, or t
  misc_feature (1328)..(1349): n is a, c, g, or t

SEQ ID NO: 191471 - DNA, 1498 bp, Homo Sapiens; identical to SEQ ID NO: 184051
  misc_feature (531)..(590): n is a, c, g, or t
  misc_feature (1275)..(1283): n is a, c, g, or t

SEQ ID NO: 191472 - DNA, 1875 bp, Homo Sapiens; identical to SEQ ID NO: 184052
  misc_feature (1638)..(1695): n is a, c, g, or t

SEQ ID NO: 191473 - DNA, 968 bp, Homo Sapiens
  misc_feature (484)..(492): n is a, c, g, or t
ggaggaagaacccctcaaaaaagaagacatcatcgcaacacctggaccaaggttccatattatataaggagctagaagcattatagctagtgtttgattcactagtgcttacaaattgcccccatgtgtaggggacacagaaccctttgagaaaacttagatttttgtctgtacaaagtctttgcctttttccttcttcatttttttccagtacattaaatttgtcaatttcatctttgagggaaactgattagatgggttgtgtttgtgttctgatggagaaaacagcaccccaaggactcagaagatgattttaacagttcagaacagatgtgtgcaatattggtgcatgtaataatgttgagtggcagtcaaaagtcatgatttttatcttagttcttcattactgcattgaaaaggaaaacctgtctgagaaaatgcctgacagtttaatttaaaactatggtgtaagtctttgacaagnnnnnnnnncaaacaaacacttctttccatcagtaacactggcaatcttcctgttaaccactctccttagggatggtatctgaaacaacaatggtcaccctcttgagattcgttttaagtgtaattccataatgagcagaggtgtacgcgaaattgtgttatgactgatagccttcagctacaaaaagataggactgacctggtttaaagtgttctattttgtaaatcattccatttgagtctttctgatgaacttggctatactgaaatctgttattttagtgaggctccaaaatgagcaaagctaggcctgattagagtagagtgactattaaaaaacataactttctaggagctataaatcaaagttttaaaaagatgtttggatatatttgagtattccgatcatgaaaacagaaattgccctgcctactacaggacagactgatgggaaattatgcacctggttcaacttagcttttagc

SEQ ID NO: 191474 - DNA, 1472 bp, Homo Sapiens; identical to SEQ ID NO: 184053
  misc_feature (491)..(526): n is a, c, g, or t
  misc_feature (1235)..(1244): n is a, c, g, or t

SEQ ID NO: 191475 - DNA, 1190 bp, Homo Sapiens
  misc_feature (55)..(63): n is a, c, g, or t
  misc_feature (836)..(845): n is a, c, g, or t
ttgggaaaatgcctgacagtttaatttaaaactatggtgtaagtctttgacaagnnnnnnnnncaaacaaacacttctttccatcagtaacactggcaatcttcctgttaaccactctccttagggatggtatctgaaacaacaatggtcaccctcttgagattcgttttaagtgtaattccataatgagcagaggtgtacgcgaaattgtgttatgactgatagccttcagctacaaaaagataggactgacctggtttaaagtgttctattttgtaaatcattccatttgagtctttctgatgaacttggctatactgaaatctgttattttagtgaggctccaaaatgagcaaagctaggcctgattagagtagagtgactattaaaaaacataactttctaggagctataaatcaaagttttaaaaagatgtttggatatatttgagtattccgatcatgaaaacagaaattgccctgcctactacaaggacagactgatgggaaattatgcacctggtcaacttagcttttaagcagacgatgctgtaaaaactaacggcttctctgatatttattgtaagttttagtactgatctccttttccagtgctgcacactcctggtttggaactttaatagcgttgcaacgaaatcctatatccagtttcctgtaatttaattgaagaaaaatacatccaaataaagactttattattaacagaccagatagcatcagaaatcatgtgactgttatgattatcagaatgtcttaactttttagggcaaagttaacactgaaagttctagcttaagtgttgaaacttttgtgggnnnnnnnnnntcacttttgaaactcagacttcagtgtatacccaataatttaaaattatgtgaaatgttttaaatttgtgaactcgtaattactgttttaatgattcagtttcttcagagtggtaattgtataaaattgctattgcagctttacattcaatatgatgtgcctgtaaaccaaggagttttccccgtttgtaaaagacattgtagataattgaatgtttgattttaaaaaggtcattagtttcttgttacacatttttgttagtctggtttttgttgcttatcgggtttaatattggttcttgaaatagttgatgctatgttatgtatacttttctaataaaagttg

SEQ ID NO: 191476 - DNA, 1500 bp, Homo Sapiens; identical to SEQ ID NO: 184054
  misc_feature (372)..(432): n is a, c, g, or t
  misc_feature (1117)..(1125): n is a, c, g, or t

SEQ ID NO: 191477 - DNA, 810 bp, Homo Sapiens
  misc_feature (444)..(452): n is a, c, g, or t
ccaactttgtacaaaaaagttggcaaagttttacaaagatgtttggatatatttgagtattccgatcatgaaaacagaaattgccctgcctactacaaggacagactgatgggaaattatgcacctggtcaacttagcttttaagcagacgatgctgtaaaaactaacggcttctctgatatttattgtaagttttagtactgatctccttttccagtgctgcacactcctggtttggaactttaatagcgttgcaacgaaatcctatatccagtttcctgtaatttaattgaagaaaaatacatccaaataaagactttattattaacagaccagatagcatcagaaatcatgtgactgttatgattatcagaatatgtcttaactttttagggcaaagttaacactgaaagttctagcttaagtgttgaaacttttgtgggnnnnnnnnntcacttttgaaactcagacttcagtgtatacccaataatttaaaattatgtgaaatgttttaaatttgtgaactcgtaattactgttttaatgattcagtttcttcagagtggtaattgtataaaattgctattgcagctttatattcaatatgatgtgcctgtaaaccaaggagttttccccgtttgtaaaaagacattgtagataattgaatgtttgattttagaaaggtcattagtttcttgttacacattttgttagtctggtttttgttgcttatcgggtttaatattgttcttgaaaatagttgatgctatgttatgtataacttttctaataaaagttgtgttataagctg

SEQ ID NO: 191478 - DNA, 1303 bp, Homo Sapiens
  misc_feature (182)..(190): n is a, c, g, or t
  misc_feature (963)..(971): n is a, c, g, or t
ttgggatgattttaacagttcagaacagatgtgtgcaatattggtgcatgtaataatgttgagtggcagtcaaaagtcatgatttttatcttagttcttcattactgcattgaaaaggaaaacctgtctgagaaaatgcctgacagtttaatttaaaactatggtgtaagtctttgacaagnnnnnnnnncaaacaaacacttctttccatcagtaacactggcaatcttcctgttaaccactctccttagggatggtatctgaaacaacaatggtcaccctcttgagattcgttttaagtgtaattccataatgagcagaggtgtacgcgaaattgtgttatgactgatagccttcagctacaaaaagataggactgacctggtttaaagtgttctattttgtaaatcattccatttgagtctttctgatgaacttggctatactgaaatctgttattttagtgaggctccaaaatgagcaaagctaggcctgattagagtagagtgactattaaaaaacataactttctaggagctataaatcaaagttttaaaaagatgtttggatatatttgagtattccgatcatgaaaacagaaattgccctgcctactacaaggacagactgatgggaaattatgcacctggtcaacttagcttttaagcagacgatgctgtaaaaactaacggcttctctgatatttattgtaagttttagtactgatctccttttccagtgctgcacactcctggtttggaactttaatagcgttgcaacgaaatcctatatccagtttcctgtaatttaattgaagaaaaatacatccaaataaagactttattattaacagaccagatagcatcagaaatcatgtgactgttatgattatcagaatgtcttaactttttagggcaaagttaacactgaaagttctagcttaagtgttgaaacttttgtgggnnnnnnnnntcacttttgaaactcagacttcagtgtatacccaataatttaaaattatgtgaaatgttttaaatttgtgaactcgtaattactgttttaatgattcagtttcttcagagtggtaattgtataaaattgctattgcagctttacattcaatatgatgtgcctgtaaaccaaggagttttccccgtttgtaaaaagacattgtagataattgaatgtttgattttagaaaggtcattagtttcttgttacacattttgttagtctggtttttgttgcttatcgggtttaatattgttcttgaaaatagttgatgctatgttatgtataacttt

SEQ ID NO: 191479 - DNA, 912 bp, Homo Sapiens
  misc_feature (71)..(115): n is a, c, g, or t
ttgggaatcggaaaggaggcgccggctgtggcggcggcgggagctgctcggaagctacacctcgcaagggnnnnnnnnnnnnnnnnnnnnnnnnnnnnnnnnnnnnnnnnnnnnngggccacccagcccgcccaactcccagcggagagcaaggttttcttctgttttcatagccagccagaacaatgttctacgcacattttgttctcagtaaaagagggcctctggccaaaatttggctagcggcccattgggataagaagctaaccaaagcccatgtgttcgagtgtaatttagagagcagcgtggagagtatcatctcaccaaaggtgaaaatggcattacggacatcaggacatctcttactgggagtagttcgaatctatcacaggaaagccaaataccttcttgcagactgtaatgaagcattcattaagataaagatggcttttcggccaggtgtggttgacctgcctgaggaaaatcgggaagcagcttataatgccattactttacctgaagaatttcatgactttgatcagccactgcctgacttagatgacatcgatgtggcccagcagttcagcttgaatcagagtagagtggaagagataaccatgagagaagaagttgggaacatcagtattttacaagaaaatgattttggtgattttggaatggatgatcgtgagataatgagagaaggcagtgcttttgaggatgacgacatgttagtaagcactactacttctaacctcctattagagtctgaacagagcaccagcaatctgaatgagaaaattaaccatttagaatatgaagatcaatataggatgataattttggagaaggaaatgatggtggaatattagatgacaaacttattagtaataatgatggcggtatctttga

SEQ ID NO: 191480 - DNA, 1193 bp, Homo Sapiens
  misc_feature (791)..(800): n is a, c, g, or t
ttggctcaaggtaatttaggagcttttaggagatgtagaaatacttcatttttcattggacttgttttgtcagctttttgggggtcatttttattcaggatgaagatgcatcagggggcgatcaagatcaggaagaaagaagatggaacaaaaggactcagcagatgcttcatggtcttcagcgtgctcttgctaaaactggagctgaatctatcagtttgcttgagttatgtcgaaatacgaacagaaaacaagctgccgcaaagttctacagcttcttggttcttaaaaagcagcaagctattgagctgacacaggaagaaccgtacagtgacatcatcgcaacacctggaccaaggttccatattatataaggagctagaagcattatagctagtgtttgattcactagtgcttacaaattgcccccatgtgtaggggacacagaaccctttgagaaaacttagatttttgtctgtacaaagtctttgcctttttccttcttcatttttttccagtacattaaatttgtcaatttcatctttgagggaaactgattagatgggttgtgtttgtgttctgatggagaaaacagcaccccaaggactcagaagatgattttaacagttcagaacagatgtgtgcaatattggtgcatgtaataatgttgagtggcagtcaaaagtcatgatttttatcttagttcttcattactgcattgaaaaggaaaacctgtctgagaaaatgcctgacagtttaatttaaaactatggtgtaagtctttgacaagnnnnnnnnnncaaacaaacacttctttccatcagtaacactggcaatcttcctgttaaccactctccttagggatggtatctgaaacaacaatggtcaccctcttgagattcgttttaagtgtaattccataatgagcagaggtgtacgcgaaattgtgttatgactgatagccttcagctacaaaaagatagggactgacctggtttaaagtgttctattttgtaaatcattccatttgagtctttctgatgaacttggctatactgaaatctgttattttagtgaggctccaaaatgagcaagctaggcctgattagagtagagtgactattaaaaaacataaccttctaggagctataatcaaagttttaaaaagatgtttggatatatttgagtattcc

SEQ ID NO: 191481 - DNA, 1364 bp, Homo Sapiens
ttggcacccctcccccctttcccaaggacaatctgcaagaaagcagcggcggaggagagctaagactaaaagagtggatcatgacccatgaagagcaccatgcagccaaaaccctggggattggcaaagccattgctgtcttaacctctggtggagatgcccaaggtatgaatgctgctgtcagggctgtggttcgagttggtatcttcaccggtgcccgtgtcttctttgtccatgagggttatcaaggcctggtggatggtggagatcacatcaaggaagccacctgggagagcgtttcgatgatgcttcagctgggaggcacggtgattggaagtgcccggtgcaaggactttcgggaacgagaaggacgactccaagctgcctacaacctggtgaagcgtgggatcaccaatctctgtgtcattgggggtgatggcagcctcactggggctgacaccttccgttctgagtggagtgacttgttgagtgacctccagaaagcaggtaagatcacagatgaggaggctacgaagtccagctacctgaacattgtgggcctggttgggtcaattgacaatgacttctgtggcaccgatatgaccattggcactgactctgccctgcatcggatcatggaaattgtagatgccatcactaccactgcccagagccaccagaggacatttgtgttagaagtaatgggccgccactgtggatacctggcccttgtcacctctctgtcctgtggggccgactgggtttttattcctgaatgtccaccagatgacgactgggaggaacacctttgtcgccgactcagcgagacaaggacccgtggttctcgtctcaacatcatcattgtggctgagggtgcaattgacaagaatggaaaaccaatcacctcagaagacatcaagaatgttcgtatgaatgaagccagagaggccttagaatccatagcccattcccttctggcttctgagtctcctgacattgcttctccccttggtccttctgcacatctctccctggttccctgcccctgattgcctcccacaaagaaccattacaagacaagaggctgagctgtccatggtttacccaagtctctgcttgttttcttcctttgactctgcgtaaccctctctctgtccctctgttggtcccttcagctggtggttaagcgtctgggatatgacacccgggttactgtcttggggcatgtgcagaggggtgggacgccatcagcctttgacagaattctgggcagcaggatgggtgtggaagcagtgatggcacttttggaggggaccccagataccccagcctgtgtagtgagcctctctggtaaccaggctgtg

SEQ ID NO: 191482 - DNA, 1165 bp, Homo Sapiens
aaaaactttgtacaaaaaagttgggttcctgcccgcgcggtgttccgcattctgcaagcctccggagcgcacgtcggcagtcggctccctcgttgaccgaatcaccgacctctctccccagctgtatttccaaaatgtcgctttctaacaagctgacgctggacaagctggacgttaaagggaagcgggtcgttatgagagtcgacttcaatgttcctatgaagaacaaccagataacaaacaaccagaggattaaggctgctgtcccaagcatcaaattctgcttggacaatggagccaagtcggtagtccttatgagccacctaggccggcctgatggtgtgcccatgcctgacaagtactccttagagccagttgctgtagaactcaaatctctgctgggcaaggatgttctgttcttgaaggactgtgtaggcccagaagtggagaaagcctgtgccaacccagctgctgggtctgtcatcctgctggagaacctccgctttcatgtggaggaagaagggaagggaaaagatgcttctgggaacaaggttaaagccgagccagccaaaatagaagctttccgagcttcactttccaagctaggggatgtctatgtcaatgatgcttttggcactgctcacagagcccacagctccatggtaggagtcaatctgccacagaaggctggtgggtttttgatgaagaaggagctgaactactttgcaaaggccttggagagcccagagcgacccttcctggccatcctgggcggagctaaagttgcagacaagatccagctcatcaataatatgctggacaaagtcaatgagatgattattggtggtggaatggcttttaccttccttaaggtgctcaacaacatggagattggcacttctctgtttgatgaagagggagccaagattgtcaaagacctaatgtccaaagctgagaagaatggtgtgaagattaccttgcctgttgactttgtcactgctgacaagtttgatgagaatgccaagactggccaagccactgtggcttctggcatacctgctggctggatgggcttggactgtggtcctgaaagcaccaagaattatgctgaggctgtcactcgggctaagcagatgtgtggaatggtcctgtgggggtatttgaa

SEQ ID NO: 191483 - DNA, 970 bp, Homo Sapiens
gagcaatgcttttttataatgccaactttgtacaaaaaagttggcctcgttgaccgaatcaccgacctctctccccagctgtatttccaaaatgtcgctttctaacaagctgacgctggacaagctggacgttaaagggaagcgggtcgttatgagagtcgacttcaatgttcctatgaagaacaaccagataacaaacaaccagaggattaaggctgctgtcccaagcatcaaattctgcttggacaatggagccaagtcggtagtccttatgagccacctaggccggcctgatggtgtgcccatgcctgacaagtactccttagagccagttgctgtagaactcaaatctctgctgggcaaggatgttctgttcttgaaggactgtgtaggcccagaagtggagaaagcctgtgccaacccagctgctgggtctgtcatcctgctggagaacctccgctttcatgtggaggaagaagggaagggaaaagatgcttctgggaacaaggttaaagccgagccagccaaaatagaagctttccgagcttcactttccaagctaggggatgtctatgtcaatgatgcttttggcactgctcacagagcccacagctccatggtaggagtcaatctgccacagaaggctggtgggtttttgatgaagaaggagctgaactactttgcaaaggccttggagagcccagagcgacccttcctggccatcctgggcggagctaaagttgcagacaagatccagctcatcaataatatgctggacaaagtcaatgagatgattattggtggtggaatggcttttaccttccttaaggtgctcaacaacatggagattggcacttctctgtttgatgaagagggagccaagattgtcaaagacctaatgtccaaagctgagaagaatggtgtgaagattaccttgcctgttgactttgtcactgctgacaagtttgat

SEQ ID NO: 191484 - DNA, 770 bp, Homo Sapiens
ttggctcagcgccattttgtggcagcgagacccacaaataaaggggagcgcaggggttgcggcgggactaggagcgcggcggggccggcggcagagctgtccggctgcgcggtggcccggggggcccgggcggcagggcaagcagcgcggcctcggcctatgcgaccggtggcgccggcgcggcttctgcctggagaggattcaagatgaccaacgaagaacctcttcccaagaaggttcgattgagtgaaacagacttcaaagttatggcaagagatgagttaattctaagatggaaacaatatgaagcatatgtacaagctttggagggcaagtacacagatcttaactctaatgatgtaactggcctaagagagtctgaagaaaaactaaagcaacaacagcaggagtctgcacgcagggaaaacatccttgtaatgcgactagcaaccaaggaacaagagatgcaagagtgtactactcaaatccagtacctcaagcaagtccagcagccgagcgttgcccaactgagatcaacaatggtagacccagcgatcaacttgtttttcctaaaaatgaaaggtgaactggaacagactaaagacaaactggaacaagcccaaaatgaactgagtgcctggaagtttacgcctgataggtaaacaaatcatactccccagtcaagacttccctgacagtcccactacgagaaagctgtggtgggacagccaagtactcgtttccacaccaagactcagactttttgagcc

SEQ ID NO: 191485 - DNA, 1414 bp, Homo Sapiens; identical to SEQ ID NO: 184056

SEQ ID NO: 191486 - DNA, 1213 bp, Homo Sapiens; identical to SEQ ID NO: 180178

SEQ ID NO: 191487 - DNA, 1146 bp, Homo Sapiens; identical to SEQ ID NO: 184058
  misc_feature (61)..(73): n is a, c, g, or t
  misc_feature (383)..(392): n is a, c, g, or t

SEQ ID NO: 191488 - DNA, 1520 bp, Homo Sapiens; identical to SEQ ID NO: 180179
  misc_feature (828)..(854): n is a, c, g, or t
  misc_feature (1109)..(1117): n is a, c, g, or t

SEQ ID NO: 191489 - DNA, 494 bp, Homo Sapiens; identical to SEQ ID NO: 180181
  misc_feature (75)..(85): n is a, c, g, or t
  misc_feature (207)..(397): n is a, c, g, or t

SEQ ID NO: 191490 - DNA, 130 bp, Homo Sapiens
aaccaactttgtacaaaaaagttgggatgaacttaatgtttccatttgtattaatggaatactaagtccctctgtgatttctgaaccaagctattcctaggcctgagttttattttgttgacacagaaat

SEQ ID NO: 191491 - DNA, 4321 bp, Homo Sapiens; identical to SEQ ID NO: 180182
  misc_feature (2030)..(2097): n is a, c, g, or t

SEQ ID NO: 191492 - DNA, 206 bp, Homo Sapiens
  misc_feature (75)..(85): n is a, c, g, or t
tttaaatttgaaataataataggtactggatttatgcaaatgtcttttctgcgtcttttgagatgagtatcaggnnnnnnnnnnnccttttatcatctgatgatgaacttaatgtttccatttgtattaatggaatactaagtccctctgtgatttctgaaccaagctattcctaggcctgagttttattttgttgacacagaaat

SEQ ID NO: 191493 - DNA, 1492 bp, Homo Sapiens; identical to SEQ ID NO: 184063

SEQ ID NO: 191494 - DNA, 826 bp, Homo Sapiens
ctttgtacaaaaaagttgggtgatttcctgccctccttcagtgagattgccagtgccctgggagacagcaccgtggacagcaagccgtgaggagggagcccgctcaggatggcctgggcaggggaggacatctctagagggaagctcacagcatgatgggcaagatccctgtcctcctgggccctgaggcccctgccctagtgcaacaggcattgctgaggtctgagcagggcctggcctttcctcctcttcctcaccctcatcctttgggaggctgacttggacccaaactgggcgactagggctttgagctgggcagttttccctgccatctcttcctctatcagggacagtgtgggtgccacaggtaaccccaatttctggccttcaacttctccccttgaccgggtccaactctgccactcatctgccaactttgcctggggagggctaggcttgggatgagctgggtttgtggggagttccttaatattctcaagttctgggcacacagggttaatgagtctcttggcccactggtcccacttggaggtctagaccaggattatagaggacacagcaagtgagtcctccccactctgggcttgtgcacactgacccagacccacgtcttccccacccttctctcctttcctcatcctaagtgcctggcagatgaaggagttttcaggagcttttgacactatataaaccgcactttttgtatgcaccacgggcggcttttatatgtaattgcaacgagaggcgggtgttttttgttaggtaggggtgggccctggagatgaagaggccccccccatcctta

SEQ ID NO: 191495 - DNA, 835 bp, Homo Sapiens; identical to SEQ ID NO: 180184

SEQ ID NO: 191496 - DNA, 1190 bp, Homo Sapiens
  misc_feature (1062)..(1096): n is a, c, g, or t
ggagttagttagaaccagaactttattgtagcggatacactttctgacctatcatgagtatacacatctgcgaagggaaaccgcgcggcgacagcgtgaggacatcccctgggcgtgagcgtctgtccgctgtctaaacagagcagctacagggacgggacatggaggatggccacacatagcacagccaccagtgtcctcagaactagcagtcagggtcacagaacagtattcaaaatgattgcccacctgttttagaaatctaaaattttacatgtaactaagagcaaagtgctatgtgggttttagaccatgactgtttgtttgctctcctgccctaccaccaagcaaagcagcagggctcctgggggagagggatttcaacccccctgatggcagggggtgctctggggaggagagaggagagaacaggctgttttggaaaattccagcactttgacttcgggccatgcgtctctcctggacgttctgagtacggatcgctcaggcctcctgccgtctccaaaaggagtggtcagccggtctgcaggacacctctcagtttctccttttaccagcaggaaaatgtacatttaagcataaaccacaaggctgcacacggtgagaccaggccactgcccagggagctgctgtcggaggaggagtgtggaaaaggggccagggaccccgcaccccacaccaaattaggaacaggtagaatcccaaaggcaaggcccggccacttgtagctaccctgatccagtctcttgagcagcacagctagaggcctgtggcccccgactcccagccatactcagacctgagcaggggctggggcggggctgggcggggtgggcctctccctctggggtctggggagggaggacccggcgggaagagcccgtgctcagagctccgaacttcactttacattccagtcccgggttacactagcacaaaggacacaaggaatccgatttatttacaaaatattaaaaagtcagttaatcatctacacagtaccccccatcctgccattatttatacatgcactagtttggnnnnnnnnnnnnnnnnnnnnnnnnnnnnnnnnnnntgattaccgggtgggagtgagcatgttttaccctttgtcaacgagcccagctggcatggcttttctggagtgcgaggggccagtgtcctcccaa

SEQ ID NO: 191497 - DNA, 2079 bp, Homo Sapiens; identical to SEQ ID NO: 184066

SEQ ID NO: 191498 - DNA, 1702 bp, Homo Sapiens; identical to SEQ ID NO: 184067
  misc_feature (180)..(211): n is a, c, g, or t

SEQ ID NO: 191499 - DNA, 1339 bp, Homo Sapiens; identical to SEQ ID NO: 184068
  misc_feature (587)..(621): n is a, c, g, or t
  misc_feature (1130)..(1185): n is a, c, g, or t

SEQ ID NO: 191500 - DNA, 1818 bp, Homo Sapiens; identical to SEQ ID NO: 184070
  misc_feature (102)..(111): n is a, c, g, or t
  misc_feature (328)..(336): n is a, c, g, or t
  misc_feature (760)..(1068): n is a, c, g, or t

SEQ ID NO: 191501 - DNA, 830 bp, Homo Sapiens; identical to SEQ ID NO: 184071

SEQ ID NO: 191502 - DNA, 1778 bp, Homo Sapiens; identical to SEQ ID NO: 184072
  misc_feature (175)..(183): n is a, c, g, or t
  misc_feature (508)..(567): n is a, c, g, or t
  misc_feature (607)..(915): n is a, c, g, or t
  misc_feature (1485)..(1493): n is a, c, g, or t

SEQ ID NO: 191503 - DNA, 905 bp, Homo Sapiens; identical to SEQ ID NO: 184073

SEQ ID NO: 191504 - DNA, 873 bp, Homo Sapiens; identical to SEQ ID NO: 180185

SEQ ID NO: 191505 - DNA, 1520 bp, Homo Sapiens; identical to SEQ ID NO: 180186
  misc_feature (622)..(633): n is a, c, g, or t
  misc_feature (793)..(801): n is a, c, g, or t

SEQ ID NO: 191506 - DNA, 1281 bp, Homo Sapiens; identical to SEQ ID NO: 184077

SEQ ID NO: 191507 - DNA, 1665 bp, Homo Sapiens; identical to SEQ ID NO: 184078
  misc_feature (1108)..(1168): n is a, c, g, or t

SEQ ID NO: 191508 - DNA, 1899 bp, Homo Sapiens; identical to SEQ ID NO: 184079
  misc_feature (125)..(183): n is a, c, g, or t

SEQ ID NO: 191509 - DNA, 1173 bp, Homo Sapiens; identical to SEQ ID NO: 184080

SEQ ID NO: 191510 - DNA, 1902 bp, Homo Sapiens; identical to SEQ ID NO: 184081
  misc_feature (1463)..(1485): n is a, c, g, or t

SEQ ID NO: 191511 - DNA, 907 bp, Homo Sapiens
ttggcacagtcagggaagggcgctgagaggcgagcgtgagcccagcgacaggagagtgagctcaccacgcgcagcgccatgaccagcaagggtcccgaggaggagcacccatcggtgacgctcttccgccagtacctgcgtatccgcactgtccagcccaagcctgactatggagctgctgtggctttctttgaggagacagcccgccagctgggcctgggctgtcagaaagtagaggtggcacctggctatgtggtgaccgtgttgacctggccaggcaccaaccctacactctcctccatcttgctcaactcccacacggatgtggtgcctgtcttcaaggaacattggagtcacgacccctttgaggccttcaaggattctgagggctacatctatgccaggggtgcccaggacatgaagtgcgtcagcatccagtacctggaagctgtgaggaggctgaaggtggagggccaccggttccccagaaccatccacatgacctttgtgcctgatgaggaggttgggggtcaccaaggcatggagctgttcgtgcagcggcctgagttccacgccctgagggcaggctttgccctggatgagggcatagccaatcccactgatgccttcactgtcttttatagtgagcggagtccctggtgggtgcgggttaccagcactgggaggccaggccatgcctcacgcttcatggaggacacagcagcagagaagctgcacaaggttgtaaactccatcctggcattccgggagaagaatggcagagctgcagtcaaacccccacctgaaagaggggtcgtgacctccgtgaacctgactaagctagagggtggcgtggcctataacgtgatacctgccaccatgagcgccagctttgacttccctgtgg

SEQ ID NO: 191512 - DNA, 896 bp, Homo Sapiens
caaattgatgagcaatgctttctttaaaatagccaactttgtacaaaaaagttggtgaagatgtttatgaactggcattagaagctttctaaactgcgctgtgtgatgtgttctatctagcctaggggaggacattgcctagagggggagggactgtctgggttcaggggcatggcctggagggctggtgggcagcactgtcaggctcaggtttccctgctgttggctttctgttttggttattaagacttgtgtattttctttctttgcttcctgtcaccccaggggctcctgagtataggcttttcagtccctgggcagtgtccttgagttgttttttgacactcttacctgggcttctctgtgtgcatttgcgtctggcctggagtaagcaggtccgacccctccttctttacagcttagtgttattctggcatttggttaagctggcttaatctgtttaatgttatcagtacattttaaataggggcattgaaatttactcccaccaccagggcttttttgggggatgcctgggcctttaaaacactagccaaactctaattaattctcaaatcactgccaggagttcttgctcctggctgcaggcccaggccccaaggtctccttcttggggtcacaaacagcagtaaggaagaggaatatatagcaactcagggcctgggaattgtggggcaatccgttcttagggactggatacttctggctggctgaatatagtactagctgcctccccaccaggttccgagtagtgtctgagactctgctctgcagggcctatttgtatcgctgggagtgtagaagtggcctgcccttaactgttttccctacccagctttttctaaggggagagcaagggggagagatctagattg

SEQ ID NO: 191513 - DNA, 1678 bp, Homo Sapiens; identical to SEQ ID NO: 180187
  misc_feature (862)..(935): n is a, c, g, or t
  misc_feature (944)..(1196): n is a, c, g, or t
  misc_feature (1219)..(1232): n is a, c, g, or t

SEQ ID NO: 191514 - DNA, 1419 bp, Homo Sapiens; identical to SEQ ID NO: 184082

SEQ ID NO: 191515 - DNA, 1079 bp, Homo Sapiens; identical to SEQ ID NO: 184083

SEQ ID NO: 191516 - DNA, 1748 bp, Homo Sapiens; identical to SEQ ID NO: 184084

SEQ ID NO: 191517 - DNA, 1881 bp, Homo Sapiens; identical to SEQ ID NO: 180188
  misc_feature (105)..(119): n is a, c, g, or t
  misc_feature (1038)..(1047): n is a, c, g, or t
  misc_feature (1088)..(1096): n is a, c, g, or t

SEQ ID NO: 191518 - DNA, 1392 bp, Homo Sapiens; identical to SEQ ID NO: 184085

SEQ ID NO: 191519 - DNA, 917 bp, Homo Sapiens
  misc_feature (806)..(826): n is a, c, g, or t
ttggatcaactatttcgagataaaaaacaagaaagggacagacctttggcttggagttgatgcccttggactgaatatttatgagaaagatgataagttaaccccaaagattggctttccttggagtgaaatcaggaacatctctttcaatgacaaaaagtttgtcattaaacccatcgacaagaaggcacctgactttgtgttttatgccccacgtctgagaatcaacaagcggatcctgcagctctgcatgggcaaccatgagttgtatatgcgccgcaggaagcctgacaccatcgaggtgcagcagatgaaggcccaggcccgggaggagaagcatcagaagcagctggagcggcaacagctggaaacagagaagaaaaggagagaaaccgtggagagagagaaagagcagatgatgcgcgagaaggaggagttgatgctgcggctgcaggactatgaggagaagacaaagaaggcagagagagagctctcggagcagattcagagggccctgcagctggaggaggagaggaagcgggcacaggaggaggccgagcgcctagaggctgaccgtatggctgcactgcgggctaaggaggagctggagagacaggcggtggatcagataaagagccaggagcagctggctgcggagcttgcagaatacactgccaagattgccctcctggaagaggcgcggaggcgcaaggaggatgaagttgaagagtggcagcacagggccaaagaagcccaggatgacctggtgaagaccaaggaggagctgcacctggtgatgacagcannnnnnnnnnnnnnnnnnnnngtgtacgagccggtgagctaccatgtccaggagagcttgcagatgagggcgcagagcccacgggctacagcgcggagctgtctagtgaggg

SEQ ID NO: 191520 - DNA, 955 bp, Homo Sapiens
  misc_feature (385)..(409): n is a, c, g, or t
ttggctcgcgattattctcgaatcacctcctgtgttgtgctgggagcaggactgattgaattacggaaaatgcctgtaaagtctgagtaagaaacttcatgctggcctgtgtgatacaagagtcagcatcattaaaggaaacgtggcaggacttccatctgtgccatacttgttctgtattcgaaatgagctcaaattgattttttaatttctatgaaggatccatctttgtatatttacatgcttagaggggtgaaaattattttggaaattgagtctgaagcactctcgcacacacagtgattccctcctcccgtcactccacgcagctggcagagagcacagtgatcaccagcgtgagtggtggaggaggacacttggatannnnnnnnnnnnnnnnnnnnnnnnnggcttaacagttttagaatacattgtacttatacaccttattaatgatcagctatatactatttatatacaagtgataatacagatttgtaacattagttttaaaaagggaaagttttgttctgtatattttgttaccttttacagaataaaagaattacatatgaaaaaccctctaaaccatggcacttgatgtgatgtggcaggagggcagtggtggagctggacctgcctgctgcagtcacgtgtaaacaggattattattagtgttttatgcatgtaatggactatgcacacttttaattttgtcagattcacacatgccactatgagctttcagactccagctgtgaagagactctgtttgccttgtgtttgtttgcagtctctctctgccatggccctgggcaagctgctggaaagcagcttgtgaaggccgttggttccgcccactcattctttctcgtgcactgctttctccttccacgctaaaatgcctgtgcagtggaatcccatgccgcagacatgaaaataaagccttgcaaag

SEQ ID NO: 191521 - DNA, 461 bp, Homo Sapiens
cctttgtacaaaaaagttgggttttgttccccatattttgttaccttttacagaataaaagaattacatatgaaaaaccctctaaaccatggcacttgatgtgatgtggcaggagggcagtggtggagctggacctgcctgctgcagtcacgtgtaaacaggattattattagtgttttatgcatgtaatggactatgcacacttttaattttgtcagattcacacatgccactatgagctttcagactccagctgtgaagagactctgtttgcttgtgtttgtttgtttgcagtctctctctgccatggccttggcaggctgctggaaggcagcttgtggaggccgttggttccgcccactcattccttctcgtgcactgctttctccttcacagctaagatgccatgtgcaggtggattccatgccgcagacatgaaataaaagctttgcaaaggcccg

SEQ ID NO: 191522 - DNA, 1974 bp, Homo Sapiens; identical to SEQ ID NO: 184088
  misc_feature (373)..(436): n is a, c, g, or t
  misc_feature (806)..(826): n is a, c, g, or t
  misc_feature (1747)..(1772): n is a, c, g, or t

SEQ ID NO: 191523 - DNA, 1540 bp, Homo Sapiens; identical to SEQ ID NO: 184089
  misc_feature (1108)..(1169): n is a, c, g, or t

SEQ ID NO: 191524 - DNA, 739 bp, Homo Sapiens
  misc_feature (172)..(193): n is a, c, g, or t
tttgtacaaaaaagttggtttacatgcttcctttggagaatgaaaattattttggaaattgagtctgaagcactctcgcacacacagtgattccctcctcccgtcactccacgcagctggcagagagcacagtgatcaccagcgtgagtggtggaggaggacacttggatannnnnnnnnnnnnnnnnnnnnnggcttaacagttttagaatacattgtacttatacaccttattaatgatcagctatatactatttatatacaagtgataatacagatttgtaacattagttttaaaaagggaaagttttgttctgtatattttgttaccttttacagaataaaagaattacatatgaaaaaccctctaaaccatggcacttgatgtgatgtggcaggagggcagtggtggagctggacctgcctgctgcagtcacgtgtaaacaggattattattagtgttttatgcatgtaatggactatgcacacttttaattttgtcagattcacacatgccactatgagctttcagactccagctgtgaagagactctgtttgcttgtgtttgtttgcagtctctctctgccatggccttggcaggctgctggaaggcagcttgtggaggccgttggttccgcccactcattccttctcgtgcactgctttctccttcacagctaagatgccatgtgcagtggattccatgccgcagacatgaaaataaaagctttgcaaggc

SEQ ID NO: 191525 - DNA, 931 bp, Homo Sapiens
ttgggagaatgttacaattgagtctgtggctgattacttcaagcagattggtattattaagacaaacaagaaaacgggacagcccatgattaatttgtacacagacagggaaactggcaagctgaagggagaggcaacggtctcttttgatgacccaccttcagctaaagcagctattgactggtttgatggtaaagaattctccggaaatcctatcaaggtctcatttgctactcgccgggcagactttaatcggggtggtggcaatggtcgtggaggccgagggcgaggaggtgaggagctacctgctagtggtgcagaggggtaatggggagagtgcagaagatggtaaaggcttgcatggaatgggttagatttaccaaacttggagagggagcagacccatacttggtctatctgcattaggacccatgggccgtggaggctatggaggtggtggcagtggtggtggtggccgaggaggatttcccagtggaggtggtggcggtggaggacagcagcgagctggtgactggaagtgtcctaatcccacctgtgagaatatgaacttctcttggaggaatgaatgcaaccagtgtaaggcccctaaaccagatggcccaggagggggaccaggtggctctcacatggggggtaactacggggatgatcgtcgtggtggcagaggaggctatgatcgaacggctaccggggccgcggcggggaccgtggaggcttccgaggggccggggtggtggggacagaggtggctttggccctggcaagatggattccaggggtgagcacagacaggatcgcaggaagaggcccgtattaatttaacctgggctcccaaggttctggaacagctttttgtcctgtacccatgttaaccctcgtaatttgtaaacttccaattcctgatcaccca

SEQ ID NO: 191526 - DNA, 1369 bp, Homo Sapiens; identical to SEQ ID NO: 184090
  misc_feature (494)..(556): n is a, c, g, or t

SEQ ID NO: 191527 - DNA, 1119 bp, Homo Sapiens
  misc_feature (126)..(145): n is a, c, g, or t
ttggctccatgagtactggtggtggcagtggtggcggttatggcaatcaagaccagagtggtggaggtggcagcggtggctatggacagcaggaccgtggaggccgcggcaggggtggcagtggtnnnnnnnnnnnnnnnnnnnntggtggttacaaccgcagcagtggtggctatgaacccagaggtcgtggaggtggccgtggaggcagaggtggcatgggcggaagtgaccgtggtggcttcaataaatttggtggccctcgggaccaaggatcacgtcatgactccgaacaggataattcagacaacaacaccatctttgtgcaaggcctgggtgagaatgttacaattgagtctgtggctgattacttcaagcagattggtattattaagacaaacaagaaaacgggacagcccatgattaatttgtacacagacagggaaactggcaagctgaagggagaggcaacggtctcttttgatgacccaccttcagctaaagcagctattgactggtttgatggtaaagaattctccggaaatcctatcaaggtctcatttgctactcgccgggcagactttaatcggggtggtggcaatggtcgtggaggccgagggcgaggaggacccatgggccgtggaggctatggaggtggtggcagtggtggtggtggccgaggaggatttcccagtggaagtggtggcggtggaggacagcagcgagctggtgactggaagtgtcctaatcccacctgtgagaatatgaacttctcttggaggaatgaatgcaaccagtgtaaggcccctaaaccagatgggcccaggagggggaccaggtggctctcacatggggggtaactacggggatgatcgtcttggtggcaaaggaggctatgatcgaagcaggctaccggggccgcggcggggaccgtggaggcttccgagggggccggggtggtggggacagaggtggctttggccctgcaagatggattccaggggtgagcacagacaggatcgcagggagaggccgtattaattagcctggctccccaggtctggaacagctttttgtcctgtacccagtgttaccctcgtttattttgtaaccttccat

SEQ ID NO: 191528 - DNA, 1312 bp, Homo Sapiens
  misc_feature (778)..(778): n is a, c, g, or t
agcaatgcttttccattaaagccaactttgtacaaaaaagttgtccccgacgagaacttcgttgcttgcttgcctgtgcgcgcgtgcgcggacatggcctcaaacgattatacccaacaagcaacccaaagctatggggcctaccccacccagcccgggcagggctattcccagcagagcagtcagccctacggacagcagagttacagtggttatagccagtccacggacacttcaggctatggccagagcagctattcttcttatggccagagccagaacacaggctatggaactcagtcaactccccagggatatggctcgactggcggctatggcagtagccagagctcccaatcgtcttacgggcagcagtcctcctatcctggctatggccagcagccagctcccagcagcacctcgggaagttacggtagcagttctcagagcagcagctatgggcagccccagagtgggagctacagccagcagcctagctatggtggacagcagcaaagctatggacagcagcaaagctataatccccctcagggctatggacagcagaaccagtacaacagcagcagtggtggtggaggtggaggtggaggtggaggtaactatggccaagatcaatcctccatgagtagtggtggtggcagtggtggcggttatggcaatcaagaccagagtggtggaggtggcagcggtggctatggacagcaggaccgtggaggccgcggcaggggtggcagtggtggcgcggcggcggcggctngtggtggttacaaccgcagcagtggtggctatgaacccagaggtcgtggaggtggccgtggaggcagaggtggcatgggcggaagtgaccgtggtggcttcaataaatttggtggccctcgggaccaaggatcacgtcatgactccgaacaggataattcagacaacaacaccatctttgtgcaaggcctgggtgagaatgttacaattgagtctgtggctgattacttcaagcagattggtattattaagacaaacaagaaaacgggacagcccatgattaatttgtacacagacagggaaactggcaagctgaagggagaggcaacggtctcttttgatgacccaccttcagctaaagcagctattgactggtttgatggtaaagaattctccggaaatcctatcaaggtctcatttgctactcgccgggcagactttaatcggggtggtggcaatggtcgtggaggccgagggcgaggaggacccatgggccgtggaggctatggaggtggtggcagtggtggtggtggcc

SEQ ID NO: 191529 - DNA, 1301 bp, Homo Sapiens
tcatctgccaccacgacgatcatccccgtagttaccccccatgtgagagccacctggtccccctcctgggccatctggttttaggggccttacactggttgcattcattcctccaagagaagttcatattctcacaggtgctaaggagaaaggaagacaatcagtctggagcgatggggaataggcaagacctagaactaggaagaaactacggtgactttagagatacagtgaggaaactgaagcttcagaaagacaaaacggcttgcttctcagagtcaggaacaaaaatcagtattactgaacccaatccattacctttcccattacatcaaccttacctaggtaagcttttggctaaatctgaccccaacagtgtggccttgacatttacttctttggaaaacacgcacatacctcagtaccaatatatcaaagagcacgcatgcaagagaactaagaaaaaaattaagtttcactcacggattaggacacttccagtcaccagctcgctgctgtcctccaccgccaccacctccactgggaaatcctcctcggccaccaccaccactgccaccacctccatagcctccacggcccatgggtcctcctcgccctcggcctccacgaccattgccaccaccccgattaaagtctgcccggcgagtagcaaatgagaccttgataggatttccggagaattctttaccatcaaaccagtcaatagctgctttagctgaaggtgggtcatcaaaagagaccgttgcctctcccttcagcttgccagtttccctgtctgtgtacaaattaatcatgggctgtcccgttttcttgtttgtcttaataataccaatctgcttgaagtaatcagccacagactcaattgtaacattctcacccaggccttgcacaaagatggtgttgttgtctgaattatcctgttcggagtcatgacgtgatccttggtcccgagggccaccaaatttattgaagccaccacggtcacttccgctggagaagacaagttagaagaaaggacatgaagcttccaacggctacaaaaggttgttttttgattttgtttaacattccccaaacatgggtaggtgtttttggaaaaagatacaagtggctactaaaatacatcccttcctgaccaccccttgtctgacctttgagcatgtcacacacacgtgtgcaatttctcagacacagtttataaagattttgctttaaaaggttacgttatctatttcctctggaaaaaaaataacccattttccttggtcgttcttccccaa

SEQ ID NO: 191530 - DNA, 869 bp, Homo Sapiens
  misc_feature (735)..(755): n is a, c, g, or t
ttggggcgtcggtgctcagcggtgttgggaacttcgttgcttgcttgcctgtgcgcgcgtgcgcggacatggcctcaaacgattatacccaacaagcaacccaaagctatggggcctaccccacccagcccgggcagggctattcccagcagagcagtcagccctacggacagcagagttacagtggttatagccagtccacggacacttcaggctatggccagagcagctattcttcttatggccagagccagaacacaggctatggaactcagtcaactccccagggatatggctcgactggcggctatggcagtagccagagctcccaatcgtcttacgggcagcagtcctcctatcctggctatggccagcagccagctcccagcagcacctcgggaagttacggtagcagttctcagagcagcagctatgggcagccccagagtgggagctacagccagcagcctagctatggtggacagcagcaaagctatggacagcagcaaagctataatccccctcagggctatggacagcagaaccagtacaacagcagcagtggtggtggaggtggaggtggaggtggaggtaactatggccaagatcaatcctccatgagtagtggtggtggcagtggtggcggttatggcaatcaagaccagagtggtggaggtggcagcggtggctatggacagcaggaccgtggaggccgcggcaggggtggcagtggtnnnnnnnnnnnnnnnnnnnnntggtggttacaaccgcagcagtggtggctatgaacccagaggtcgtggaggtggccgtggaggcagaggtggcatgggcggaagtgaccgtggtggcttcaataaatttggtgg

SEQ ID NO: 191531 - DNA, 946 bp, Homo Sapiens
ctaataaaaaactttgtacaaaaaagttggcgaacaggataattcagacaacaacaccatctttgtgcaaggcctgggtgagaatgttacaattgagtctgtggctgattacttcaagcagattggtattattaagacaaacaagaaaacgggacagcccatgattaatttgtacacagacagggaaactggcaagctgaagggagaggcaacggtctcttttgatgacccaccttcagctaaagcagctattgactggtttgatggtaaagaattctccggaaatcctatcaaggtctcatttgctactcgccgggcagactttaatcggggtggtggcaatggtcgtggaggccgagggcgaggaggacccatgggccgtggaggctatggaggtggtggcagtggtggtggtggccgaggaggatttcccagtggaggtggtggcggtggaggacagcagcgagctggtgactggaagtgtcctaatcccacctgtgagaatatgaacttctcttggaggaatgaatgcaaccagtgtaaggcccctaaaccagatggcccaggagggggaccaggtggctctcacatggggggtaactacggggatgatcgtcgtggtggcagaggaggctatgatcgaggcggctaccggggccgcggcggggaccgtggaggcttccgagggggccggggtggtggggacagaggtggctttggccctggcaagatggattccaggggtgagcacagacaggatcgccggggagaggccgtattaattagcctggctccccaggttctggaacagctttttgtcctgtacccagtgttaccctcgttattttgtaaccttccaattcctgatcaccccaagggttttttttgtgtcggactatgtaattgtaactatacctctgggttcccattaaaagtgaccatttta

SEQ ID NO: 191532 - DNA, 3407 bp, Homo Sapiens; identical to SEQ ID NO: 180191
  misc_feature (208)..(250): n is a, c, g, or t
  misc_feature (318)..(386): n is a, c, g, or t

SEQ ID NO: 191533 - DNA, 1004 bp, Homo Sapiens; identical to SEQ ID NO: 180192
  misc_feature (856)..(856): n is a, c, g, or t

SEQ ID NO: 191534 - DNA, 1390 bp, Homo Sapiens; identical to SEQ ID NO: 180193

SEQ ID NO: 191535 - DNA, 1929 bp, Homo Sapiens; identical to SEQ ID NO: 180194
  misc_feature (1496)..(1538): n is a, c, g, or t
  misc_feature (1607)..(1673): n is a, c, g, or t

SEQ ID NO: 191536 - DNA, 1906 bp, Homo Sapiens; identical to SEQ ID NO: 184094

SEQ ID NO: 191537 - DNA, 1783 bp, Homo Sapiens; identical to SEQ ID NO: 180195
  misc_feature (295)..(320): n is a, c, g, or t
  misc_feature (987)..(1007): n is a, c, g, or t
  misc_feature (1405)..(1443): n is a, c, g, or t

SEQ ID NO: 191538 - DNA, 2619 bp, Homo Sapiens; identical to SEQ ID NO: 184096
  misc_feature (2451)..(2492): n is a, c, g, or t

SEQ ID NO: 191539 - DNA, 1464 bp, Homo Sapiens; identical to SEQ ID NO: 180196
  misc_feature (113)..(121): n is a, c, g, or t

SEQ ID NO: 191540 - DNA, 1004 bp, Homo Sapiens
ttggattcccaccgcccccgctgtgggtctcagcagctcgggcggcgggaggagtggcagcggcaaggcagcccggtttcgcgaaggctgtcggcgcgccgcggcccgcaggcacccggcacgcgccttccccgcaggcacccggcacgcgccttccccgccgccacgatgcccaagaggaaggtcagctccgccgaaggcgccgccaaggaagagcccaagaggagatcggcgcggttgtcagctaaacctcctgcaaaagtggaagcgaagccgaaaaaggcagcagcgaaggataaatcttcagacaaaaaagtgcaaacaaaagggaaaaggggagcaaagggaaaacaggccgaagtggctaaccaagaaactaaagaagacttacctgcggaaaacggggaaacgaagactgaggagagtccagcctctgatgaagcaggagagaaagaagccaagtctgattaataaccatataccatgtcttatcagtggtccctgtctcccttcttgtacaatccagaggaatatttttatcaactattttgtaaatgcaagttttttagtagctctagaaacatttttaagaaggagggaatcccacctcatcccattttttaagtgtaaatgcttttttttaagaggtgaaatcatttgctggttgtttattttttggtacaaccagaaaatagtgtgggatattgaattatgggaggctctgactgtctcgggtgtcagcttaacattccacagatggggggttagtttttatatcctataatacaaagcatattaaatggcaatatggagtcagtcctgcatttaatgtcttgaacattttaaattacttctattaccatgttgttttttagtaaaattgtttcctaaagaaaaccactctttgatcatggctctctctgccagaattgtgtgcactctgtaacatctttggttggtagtcctgttttcctaatactttgttactgtgctgtgaaagatta

SEQ ID NO: 191541 - DNA, 2011 bp, Homo Sapiens; identical to SEQ ID NO: 180197
  misc_feature (155)..(163): n is a, c, g, or t

SEQ ID NO: 191542 - DNA, 1683 bp, Homo Sapiens; identical to SEQ ID NO: 184099
  misc_feature (1169)..(1232): n is a, c, g, or t
  misc_feature (1404)..(1437): n is a, c, g, or t

SEQ ID NO: 191543 - DNA, 1303 bp, Homo Sapiens; identical to SEQ ID NO: 184100
  misc_feature (76)..(109): n is a, c, g, or t

SEQ ID NO: 191544 - DNA, 1220 bp, Homo Sapiens; identical to SEQ ID NO: 180199
  misc_feature (287)..(300): n is a, c, g, or t
  misc_feature (321)..(344): n is a, c, g, or t

SEQ ID NO: 191545 - DNA, 871 bp, Homo Sapiens; identical to SEQ ID NO: 184101
  misc_feature (313)..(376): n is a, c, g, or t
  misc_feature (548)..(581): n is a, c, g, or t

SEQ ID NO: 191546 - DNA, 1018 bp, Homo Sapiens; identical to SEQ ID NO: 184103

SEQ ID NO: 191547 - DNA, 1276 bp, Homo Sapiens
  misc_feature (1094)..(1124): n is a, c, g, or t
ccaactttgtacaaaaaagttggctgttaaactagaacatgctaaatctgttgcttccagagccactgtcctccagaagacatccttcacccctgtaggggatgtttttgaactaaatttcatgaacgtcaaattttccagtggttattatgacttccttggtcgaagttgaaggtgacaaccggtatattgcaaataccgtagagctcagagtcaagatctccactgaagttggcatcacaaatgttgatctttccaccgtggataaggatcagagcattgcacccaaaactacccgggtgacatacccagccaaagccaagggcacattcatcgcagacagccaccagaacttcgccttgttcttccagctggtagatgtgaacactggtgctgaactcactcctcaccagacatttgtccgactccataaccagaagactggccaggaagtggtgtttgttgccgagccagacaacaagaacgtgtacaagtttgaactggatacctctgaaagaaagattgaatttgactctgcctctggcacctacactctctacttaatcattggagatgccactttgaagaacccaatcctctggaatgtggctgatgtggtcatcaagttccctgaggaagaagctccctcgactgtcttgtcccagaaccttttcactccaaaacaggaaattcagcacctgttccgcgagcctgagaagaggccccccaccgtggtgtccaatacattcactgccctgatcctctcgccgttgcttctgctcttcgctctgtggatccggattggtgccaatgtctccaacttcacttttgctcctagcacgattatatttcacctgggacatgctgctatgctgggactcatgtatgtctactggactcagctcaacatgttccagaccttgaagtacctggccatcttgggcagtgtgacgtttctggctggcaatcggatgctggcccagcaggcagtcaagagaacagcacattagttccagaagaaagatggaaattctgaaaactgaatgtcaagaaaaggagtcaagaacaattcacagtatgagaagaaaaatggnnnnnnnnnnnnnnnnnnnnnnnnnnnnnnngtccagattgtagttatacttttgcttgtttttcagtttccccaacacacagccagatacctggtgagctcagatagtctcttttctctgaacactgtgtaagaaggcttgtgaataatccctaaacttacccagatgttggcttttgaaaa

SEQ ID NO: 191548 - DNA, 1148 bp, Homo Sapiens
ttggctcgggaactgcaaggccctgtgagcgggaggactgggatcccggccgcggctgctggaagcgtcgaagctcagcggggccgcggacactgacctgtgcttagaactcatcctggcccgcagagcctgccgcgagtccctggcgtcccctgtggcgggctcttggagccactttcccgagcggaagtcagcccgcggctcggactccggcgggacctgctcggaggaatggcgccgccgggttcaagcactgtcttcctgttggccctgacaatcatagccagcacctgggctctgacgcccactcactacctcaccaagcatgacgtggagagactaaaagcctcgctggatcgccctttcacaaatttggaatctgccttctactccatcgtgggactcagcagccttggtgctcaggtgccagatgcaaagaaagcatgtacctacatcagatctaaccttgatcccagcaatgtggattccctcttctacgctgcccaggccagccaggccctctcaggatgtgagatctctatttcaaatgagaccaaagatctgcttctggcagctgtcagtgaggactcatctgttacccagatctaccatgcagttgcagctctaagtggctttggccttcccttggcatcccaagaagcactcagtgcccttactgctcgtctcagcaaggaggagactgtgctggcaacagtccaggctctgcagacagcatcccacctgtcccagcaggctgacctgaggagcatcgtggaggagattgaggaccttgttgctcgcctggatgaactcgggggcgtgtatctccagtttgaagaaggactggaaacaacagcgttatttgtggctgccacctacaagctcatggatcatgtggggactgagccatccattaaggaggatcaggtcatccagctgatgaacgcgatcttcagcaagaagaactttgagtccctctccgaagccttcagcgtggcctctgcagctgctgtgctctcgcataatcgctaccacgtgccagttgtggttgtgcctgagggctctgcttccgacactcatgaacaggctatcttgcggttgcaagtcaccaatgttctgtctcagcctctgactcagccactgttaaa

SEQ ID NO: 191549 - DNA, 1041 bp, Homo Sapiens
caatgcttttttataatgccaactttgtacaaaaaagttggcgtcttcctgttggccctgacaatcatagccagcacctgggctctgacgcccactcactacctcaccaagcatgacgtggagagactaaaagcctcgctggatcgccctttcacaaatttggaatctgccttctactccatcgtgggactcagcagccttggtgctcaggtgccagatgcaaagaaagcatgtacctacatcagatctaaccttgatcccagcaatgtggattccctcttctacgctgcccaggccagccaggccctctcaggatgtgagatctctatttcaaatgagaccaaagatctgcttctggcagctgtcagtgaggactcatctgttacccagatctaccatgcagttgcagctctaagtggctttggccttcccttggcatcccaagaagcactcagtgcccttactgctcgtctcagcaaggaggagactgtgctggcaacagtccaggctctgcagacagcatcccacctgtcccagcaggctgacctgaggagcatcgtggaggagattgaggaccttgttgctcgcctggatgaactcgggggcgtgtatctccagtttgaagaaggactggaaacaacagcgttatttgtggctgccacctacaagctcatggatcatgtggggactgagccatccattaaggaggatcaggtcatccagctgatgaacgcgatcttcagcaagaagaactttgagtccctctccgaagccttcagcgtggcctctgcagctgctgtgctctcgcataatcgctaccacgtgccagttgtggttgtgcctgagggctctgcttccgacactcatgaacaggctatcttgcggttgcaagtcaccaatgttctgtctcagcctctgactcagccactgttaaactagaacatgctaaatctgttgcttccagagccactgtcctccagaaaacatccttcacccctgtaggggatgtttttgaactaaatttcatgaacgtcaaatttt

SEQ ID NO: 191550 - DNA, 878 bp, Homo Sapiens
ctttgtacaaaaaactagaacatgctaaatctgttgcttccagagccactgtcctccagaagacatccttcacccctgtaggggatgtttttgaactaaatttcatgaacgtcaaattttccagtggttattatgacttccttgtcgaagttgaaggtgacaaccggtatattgcaaataccgtagagctcagagtcaagatctccactgaagttggcatcacaaatgttgatctttccaccgtggataaggatcagagcattgcacccaaaactacccgggtgacatacccagccaaagccaagggcacattcatcgcagacagccaccagaacttcgccttgttcttccagctggtagatgtgaacactggtgctgaactcactcctcaccagacatttgtccgactccataaccagaagactggccaggaagtggtgtttgttgccgagccagacaacaagaacgtgtacaagtttgaactggatacctctgaaagaaagattgaatttgactctgcctctggcacctacactctctacttaatcattggagatgccactttgaagaacccaatcctctggaatgtggctgatgtggtcatcaagttccctgaggaagaagctccctcgactgtcttgtcccagaaccttttcactccaaaacaggaaattcagcacctgttccgcgagcctgagaagaggccccccaccgtggtgtccaatacattcactgccctgatcctctcgccgttgcttctgctcttcgctctgtggatccggattggtgccaatgtctccaacttcacttttgctcctagcacgattatatttcacctgggacatgctgctatgctgggactcatgtatgtctactgg

SEQ ID NO: 191551 - DNA, 869 bp, Homo Sapiens
ttggcaatcccgaggctgctgagagacggtggcgcgattgggacagtcgccagggatggctgagcgtgaagatgcagcgggtgtccgggctgctctcctggacgctgagcagagtcctgtggctctccggcctctctgagccgggagctgcccggcagccccggatcatggaagagaaagcgctagaggtttatgatttgattagaactatccgggacccagaaaagcccaatactttagaagaactggaagtggtctcggaaagttgtgtggaagttcaggagataaatgaagaagaatatctggttattatcaggttcacgccaacagtacctcattgctctttggcgactcttattgttggaaatctacatttctgaaggaacccactcaacagaagaagacatcaataagcagataaatgacaaagagcgagtggcagctgcaatggaaaaccccaacttacgggaaattgtggaacagtgtgtccttgaacctgactgatagctgttttaagagccactggcctgtaattgtttgatatatttgtttaaactctttgtataatgtcagagactcatgtttaatacataggtgatttgtacctcagagcattttttaaaggattctttccaagcgagatttaattataaggtagtacctaatttgttcaatgtataacattctcaggatttgtaacacttaaatgatcagacagaataatattttctagttattatgtgtaagatgagttgctatttttctgatgctcattctgatacaactatttttcgtgtcaaatatctactgtgcccaaatgtactcaatttaaatcattactctgtaaaataaataagcagatgattctt

SEQ ID NO: 191552 - DNA, 1354 bp, Homo Sapiens
ttggggcaaccaccgcaggtcgagacagcaggcggctcaagtggacagccgggatggcagagcgtgcggcgctggaggagctggtgaaacttcagggagagcgcgtgcgaggcctcaagcagcagaaggccagcgccgagctgatcgaggaggaggtggcgaaactcctgaaactgaaggcacagctgggtcctgatgaaagcaaacagaaatttgtgctcaaaacccccaaggaaacactgatgggaaagtatggggaagactccaagcttatctatgacctgaaggaccagggcggggagctcctgtcccttcgctatgacctcactgttccttttgctcggtatttggcaatgaataaactgaccaacattaaacgctaccacatagcaaaggtatatcggcgggataacccagccatgacccgtggccgataccgggaattctaccagtgtgattttgacattgctggtggctttgatcccatgatccctgatgcagagtgcctgaagatcatgtgcgagatcctgagttcacttcagataggcgacttcctggtcaaggtaaacgatcgacgcattctagatgggatgtttgctatctgtggtgtttctgacagcaagttccgtaccatctgctcctcagtagacaagctggacaaggtgtcctgggaagaggtgaagaatgagatggtgggagagaagggccttgcacctgaggtggctgaccgcattggggactatgtccagcaacatggtggggtatccctggtggaacagctgctccaggatcctaaactatcccaaaacaagcaggccttggagggcctgggagacctgaagttgctctttgagtacctgaccctatttggcattgatgacaaaatctcctttgacctgagccttgctcgagggctggattactacactggggtgatctatgaggcagtgctgctacagaccccagcccaggcaggggaagagcccctgggtgtgggcagtgtggctgctggaggacgctatgatgggctagtgggcatgttcgaccccaaagggcgcaaggtgccatgtgtggggctcagcattggggtggagcggattttctccatcgtggaacagagactagaggctttggaggagaagatacggaccacggagacacaggtgcttgtggcatctgcacagaagaagctgctagaggaaagactaaagcttgtctcagaactgtgggatgctgggatcaagctgagctgctgtacaagaagaacccaaagctactgaaccagttacagtactgtgaggaggcagcatcccactggtggctatcatcggcgagcagaactcaagatggggtc

SEQ ID NO: 191553 - DNA, 1229 bp, Homo Sapiens
tttgtacaaaaaagttggggccatttgctatgatttctgtgtgtgaaaggtcccaaaatcaaaatggtacatccataatcagccaccatttaacccttccttgttctaaaacaaaaaccaaagggcgctggttggtagggtgaggtgggggagtattttaatttttggaatttgggaagcagacagctttactttgtaaggttggaacagcagcactatacatgaaatataaaccaaaaacctttactgtttctaaatttcctagattgctattatttggttgtaagttgagtattccacagaaagtggtaattatctcttctctcttcctccattagaaaattaggtaaataatggattcctataatgggagcatcaccacttattaaaacacacatagaatgatgaattaaaaaagttttctaggattgtcttttattctgccacatttattgataaacagtgaaggaatttttaaaaaatttttaagaattgtttgtcacgtcatttttagaaatgttctacctgtatatggtaatgtccagttttaaaaatattggacatcttcaatcttaaacatttctatttagctgattggttctcacatatacttctaaaagaaacttttatgttataagagttactttttggataagatttattaatctcagttacctactattctgacattttaggaaggaggtaattgtttttaatgatggataaacttgtgctggtgttttggatcttatgatgctgagcatgttctgcactggtgctaatgtctaatataattttatatttacacacatacgtgctacccagagattaatttagtccatatgaactattgacccattgttcattgagacagcaacatacgcactcctaaatcagtgtgtttagacttttcaagtatctaactcatttccaaacatgtaccatgttttataaacctcttgatttccagcaacatactatagaaaacacctgctactcaaaacacaacttctcagtgtcatccattgctgtcgtgagagacaacatagcaatatctggtatgttgcaagctttcaagatagcctgaacttaaaaagttggtgcattagttgtatctgatggatataaatttgcctcctagttcactttgtgtcaagagctaaaactgtgaacctaactttctcttattggtgggtaataactgaaaataaagatttattttcatgctc

SEQ ID NO: 191554 - DNA, 978 bp, Homo Sapiens
tgagcaatgctttctttataagggccaactttgtacaaaaaagtttggtcttgtgggaagagctgaagcaggcgctcttggctcggcgcggcccgctgcaatccgtggaggaacgcgccgccgagccaccatcatgcctgggcacttacaggaaggcttcggctgcgtggtcaccaaccgattcgaccagttatttgacgacgaatcggaccccttcgaggtgctgaaggcagcagagaacaagaaaaaagaagccggcgggggcggcgttgggggccctggggccaagagcgcagctcaggccgcggcccagaccaactccaacgcggcaggcaaacagctgcgcaaggagtcccagaaagaccgcaagaacccgctgccccccagcgttggcgtggttgacaagaaagaggagacgcagccgcccgtggcgcttaagaaagaaggaataagacgagttggaagaagacctgatcaacaacttcagggtgaagggaaaataattgatagaagaccagaaaggcgaccacctcgtgaacgaagattcgaaaagccacttgaagaaaagggtgaaggaggcgaattttcagttgatagaccgattattgaccgacctattcgaggtcgtggtggtcttggaagaggtcgagggggccgtggacgtggaatgggccgaggagatggatttgattctcgtggcaaacgtgaatttgataggcatagtggaagtgatagactcttttttggcctgaagcacgaggacaaacgtggaggtagcggatctcacaactggggaactgtcaaagacgaattaacagagtcccccaaatacattcagaaacaaatatcttataattacagtgacttggatcaatcaaatgtgactgaggaaacacctgaaaggtgaagaacatcatccagtggcagacactgaaaataaggagaatgaagttgaagaggtaaagaggagggtccaaa

SEQ ID NO: 191555 - DNA, 971 bp, Homo Sapiens; identical to SEQ ID NO: 184106

SEQ ID NO: 191556 - DNA, 1489 bp, Homo Sapiens
  misc_feature (270)..(280): n is a, c, g, or t
aaaaaacacaaatgaagtgaaagctttaaactggtacacactgttcacacctatatttcaagtttggaaatgcatatttgcaagcagcaatacaaaagtattcatgaagaatgcataatctctgaaaattatgaaaacatcccctgctaccaatacatttctaaatacaaaactgactaccatatttgttacttctgtgtagcgggagaagttcatttttaaaacagataaaattcagtctttaggtgtgaatggtatgaatgacagtcnnnnnnnnnnnaatttcttagtcgtttggaatccttaagcatgcaaaagctttgaacagaagggttcacaaaggaaccagggttgtcttatggcatccagttaagccagagctgggaatgcctctgggtcatccacatcaggagcagaagcacttgacttgtcggtcctgctgccacggtttgggcgcccaccacgcccacgtccacctcgtcctcccctgccgccacgtcctgggcggccaaggtctccaaaattgatctccagctgagacgttatatcatttgctggcttccggaaatgatggtccataaccgaatcttcagcatgagcctcttcactctttgatttatgaagaacaaatcccttcttccactgcccatcagcaccttcatttggttttcggatattaaattctacttttgcccggtccttattttgaatagccttccactcatccaaagtcatctcttttggaccctcctcttttacctcttcaacttcattctccttattttcagtgtctgccactggatgatgttcttcaccttcaggtgtttcctcagtcacatttgattgatccaagtcagttaattcgtctttgacagttccccagttgtgagatccgctacctccacgtttgtcctcgtgcttcaggccagatctatcacttccactatgcctatcaaattcacgtttgccacgagaatcaaatccatctcctcggcccattccacgtccacggccccctcgacctcttccaagaccaccacgacctcgaataggtcggtcaataatcggtctatcaactgaaaattcgcctccttcacccttttcttcaagtggcttttcgaatcttcgttcacgaggtggtcgcctttccggtcttctatcaattattttcccttcaccctgaagttgttgatcaggtcttcttccaactcgtcttattccttctttcttaagcgccacgggcggctgcgtctcctctttcttgtcaaccacgccaacgctggggggcagcgggttcttgcggtctttctgggactccttgcgcagctgtttgcctgccgcgttggagttggtctgggccgcggcctgagctgcgctcttggccccagggcccccaacgccgcccccgccggcttcttttttcttgttctctgctgccttcagcacctcgaaggggtccgattcgtcgtcaaagaatcgtcggggacaa

SEQ ID NO: 191557 - DNA, 886 bp, Homo Sapiens
accctcctctttacctcttcaacttcattctcgttattttcagtgtctgccactggatgatgttcttcaccttcaggtgtttcctcagtcacatttgattgatccaagtcagttaattcgtctttgacagttccccagttgtgagatccgctacctccacgtttgtcctcgtgcttcaggccacaaaaaaagatctatcacttccactatgcctatcaaattcacgtttgccacgagaatcaaatccatctcctcggcccattccacgtccacggccccctcgacctcttccaagaccaccacgacctcgaataggtcggtcaataatcggtctatcaactgaaaattcgcctccttcacccttttcttcaagtggcttttcgaatcttcgttcacgaggtggtcgcctttctggtcttctatcaattattttcccttcaccctgaagttgttgatcaggtcttcttccaactcgtcttattccttctttcttaagcgccacgggcggctgcgtctcctctttcttgtcaaccacgccaacgctggggggcagcgggttcttgcggtctttctgggactccttgcgcagctgtttgcctgccgcgttggagttggtctgggccgcggcctgagctgcgctcttggccccagggcccccaacgccgcccccgccggcttcttttttcttgttctctgctgccttcagcacctcgaaggggtccgattcgtcgtcaaataactggtcgaatcggttggtgaccacgcagccgaagccttcctgtaagtgcccaggcatgatggtggctcggcggcgcgttcctccacggattgcagcgggccgcgccgagccaagagcgcctgcttcagctcttcccacaagatccaa

SEQ ID NO: 191558 - DNA, 814 bp, Homo Sapiens
  misc_feature (588)..(598): n is a, c, g, or t
tttgtacaaaaaagttgggatcaatcaaatgtgactgaggaaacacctgaaggtgaagaacatcatccagtggcagacactgaaaataaggagaatgaagttgaagaggtaaaagaggagggtccaaaagagatgactttggatgagtggaaggctattcaaaataaggaccgggcaaaagtagaatttaatatccgaaaaccaaatgaaggtgctgatgggcagtggaagaagggatttgttcttcataaatcaaagagtgaagaggctcatgctgaagattcggttatggaccatcatttccggaagccagcaaatgatataacgtctcagctggagatcaattttggagaccttggccgcccaggacgtggcggcaggggaggacgaggtggacgtgggcgtggtgggcgcccaaaccgtggcagcaggaccgacaagtcaagtgcttctgctcctgatgtggatgacccagaggcattcccagctctggcttaactggatgccataagacaaccctggttcctttgtgaacccttctgttcaaagcttttgcatgcttaaggattccaaacgactaagaaattnnnnnnnnnnngactgtcattcataccattcacacctaaagactgaattttatctgttttaaaaatgaacttctcccgctacacagaagtaacaaatatggtagtcagttttgtatttagaaatgtattggtagcagggatgttttcataattttcagagattatgcattcttcatgaatacttttgtattgctgcttgcaaatatgcatttccaaacttgaaatat

SEQ ID NO: 191559 - DNA, 1947 bp, Homo Sapiens; identical to SEQ ID NO: 184107
  misc_feature (334)..(344): n is a, c, g, or t

SEQ ID NO: 191560 - DNA, 1004 bp, Homo Sapiens; identical to SEQ ID NO: 184108

SEQ ID NO: 191561 - DNA, 1509 bp, Homo Sapiens; identical to SEQ ID NO: 184109
  misc_feature (1003)..(1015): n is a, c, g, or t
  misc_feature (1145)..(1155): n is a, c, g, or t

SEQ ID NO: 191562 - DNA, 2020 bp, Homo Sapiens; identical to SEQ ID NO: 184110
  misc_feature (55)..(67): n is a, c, g, or t
  misc_feature (197)..(208): n is a, c, g, or t

SEQ ID NO: 191563 - DNA, 1269 bp, Homo Sapiens; identical to SEQ ID NO: 184111
  misc_feature (130)..(142): n is a, c, g, or t
  misc_feature (272)..(284): n is a, c, g, or t

SEQ ID NO: 191564 - DNA, 855 bp, Homo Sapiens
  misc_feature (609)..(659): n is a, c, g, or t
ttggctcagacatctgattgctgacctgtccagacatcatctggtctccctgaacctgaaatcacaccatggatgattttgagcgtcgcagagaacttagaaggcaaaagagggaggagatgcgactcgaagcagaaagaatcgcctaccagaggaatgacgatgatgaagaggaggcagcccgggaacggcgccgccgagcccgacaggaacggctgcggcagaagcaggaggaagaatccttgggacaggtgaccgaccaggtggaggtgaatgcccagaacagtgtgcctgacgaggaggccaagacaaccaccacaaacactcaagtggaaggggatgatgaggccgcattcctggagcgcctggctcggcgtgaggaaagacgccaaaaacgccttcaggaggctctggagcggcagaaggagttcgacccaacaataacagatgcaagtctgtcgctcccaagcagaagaatgcaaaatgacacagcagaaaatgaaactaccgagaaggaagaaaaaagtgaaagtcgccaagaaagatacgagatagaggaaacagaaacagtcaccaagtcctaccagaagaatgattggagggatgctnnnnnnnnnnnnnnnnnnnnnnnnnnnnnnnnnnnnnnnnnnnnnnnnnnnccaaagcgagggagcattggagaaaatcagatcaaagatgaaaagattaaaaaggacaaagaacccaaagaagaagttaagagcttcatggatcgaaagaacgggatttacagaagttaagtcgcagaatggagaattcatgacccacaaacttaaacatactgagaatactttcagccgccctggagggagggcc

SEQ ID NO: 191565 - DNA, 2680 bp, Homo Sapiens; identical to SEQ ID NO: 184112
  misc_feature (1269)..(1329): n is a, c, g, or t
  misc_feature (2097)..(2110): n is a, c, g, or t
  misc_feature (2240)..(2251): n is a, c, g, or t

SEQ ID NO: 191566 - DNA, 1223 bp, Homo Sapiens; identical to SEQ ID NO: 184114
  misc_feature (1099)..(1110): n is a, c, g, or t

SEQ ID NO: 191567 - DNA, 2192 bp, Homo Sapiens; identical to SEQ ID NO: 184115
  misc_feature (423)..(432): n is a, c, g, or t
  misc_feature (638)..(653): n is a, c, g, or t
  misc_feature (786)..(804): n is a, c, g, or t
  misc_feature (936)..(944): n is a, c, g, or t
  misc_feature (1143)..(1168): n is a, c, g, or t
  misc_feature (1685)..(1695): n is a, c, g, or t
  misc_feature (1829)..(1882): n is a, c, g, or t
  misc_feature (1989)..(2049): n is a, c, g, or t

SEQ ID NO: 191568 - DNA, 1164 bp, Homo Sapiens; identical to SEQ ID NO: 184116
  misc_feature (256)..(265): n is a, c, g, or t
  misc_feature (471)..(486): n is a, c, g, or t
  misc_feature (619)..(637): n is a, c, g, or t
  misc_feature (951)..(1001): n is a, c, g, or t

SEQ ID NO: 191569 - DNA, 1442 bp, Homo Sapiens; identical to SEQ ID NO: 184117
  misc_feature (1295)..(1310): n is a, c, g, or t

SEQ ID NO: 191570 - DNA, 1621 bp, Homo Sapiens; identical to SEQ ID NO: 184118
  misc_feature (120)..(178): n is a, c, g, or t
  misc_feature (1175)..(1196): n is a, c, g, or t

SEQ ID NO: 191571 - DNA, 646 bp, Homo Sapiens
  misc_feature (497)..(524): n is a, c, g, or t
tttgtacaaaaaagttggctttgagatccttggttgaaaggcaccataggagtgccaagtattattatgtggccaagggggttatttaaactgtcagttcccaaaggccaggaaaggttggggtcatttttcttaaagacgagctgtaaatatcaactaggcagccaatagtgttgactatgaagatgcaaaactattactaggctgataaaatcatagtttcttaatggctaccaataaggcaaatatcacaataataaacgccaaattccttagggcggactatttgacaaccacatggaaaactttgggggaggcatgaggggggaacatctcaaaatgccaatgtaaaatttaacttacagcaatattcaccagcagaaaatgtctttcatatggaatgatttcatgttgctaagaaaaagaattcaatttgtagtcctgatttgaatactagaatgttggctataatagttctgttcttacaacacatgaannnnnnnnnnnnnnnnnnnnnnnnnnnncatagtgcatgttcatttctactcacaaacatgttcttggtgtatttcttatgcaaacaatcttcaggcagcaaagatgtctgttacatctaaacttgaataataaagttttaccaccagtt

SEQ ID NO: 191572 - DNA, 1274 bp, Homo Sapiens; identical to SEQ ID NO: 184119
  misc_feature (276)..(298): n is a, c, g, or t
  misc_feature (929)..(948): n is a, c, g, or t
  misc_feature (956)..(1013): n is a, c, g, or t

SEQ ID NO: 191573 - DNA, 4897 bp, Homo Sapiens; identical to SEQ ID NO: 184120

SEQ ID NO: 191574 - DNA, 1745 bp, Homo Sapiens; identical to SEQ ID NO: 184122
  misc_feature (905)..(923): n is a, c, g, or t

SEQ ID NO: 191575 - DNA, 1359 bp, Homo Sapiens; identical to SEQ ID NO: 184123

SEQ ID NO: 191576 - DNA, 1217 bp, Homo Sapiens
ttggctcttccaaatgcacgatgaaggagttcttgtcaacagcgcaaggcaacagagaagtgttccatgcagggacattgcaaatacatgaaagtcatcacaatggagatttttgctaccaggatgttgataaagatattcatgactatgaatttcaatggcaagaagatgaaagaaatggccatgaagcacccatgacaaaaatcaaaaagttgacaggtagtacagaacgatatgatcaaagtcatgctagaaacaagcctattaaagatcagcttggatcaagctttcattcgcatctgcctgaaatgcacatatttcagaccgaagagaaaattgataatcaagttgtgaagtctatccacgatgcttccttggtttcaacagcccaaagaatttcttgtaggcccaaaacccatatatctaataaccatgggaataatttctggaattcttcattactcacacaaaaacaggaagtacacatgagagaaaaatctttccaatgtaatgagagtggcaaagcctttaattacagctcactcttaaggaaacatcagataatccatttagcagacaaatataaatgtgatgtatgtggcaagctctttaatcagaagcgaaacctagcatgccatcgtagatgtcacactggtgagaatccttacaagtgtaatgagtgtggcaagaccttcagtcagacgtcatcccttacatgccatcgtagacttcatactggagagaaaccttacaaatgtgaagaatgtgacaaagctttccatttcaaatcaatacttgaaagacataggataattcatactgaagagaaaccatataagtgtaatgagtgtggcaagacctttaggcagaagtcaatccttacacgccatcatcgacttcatactggagagaaaccttacaagtgtaatgagtgtggcaagacctttagtcacaagtcatcccttacatgccatcatagacttcatactggagagaaaccctacaaatgtaatgagtgtggcaagacctttagtcacaagtcatcccttacatgccatcgtagacttcatactggagagaaaccttacaaatgtgaagaatgtgacaaagcttacagtttcagatcaaattttgaaatacatcggaaaattcatactgaagacaatgcttacaagtgtaatgagtgtggaaagacctttagccggacatcatccctt

SEQ ID NO: 191577 - DNA, 1526 bp, Homo Sapiens; identical to SEQ ID NO: 184124
  misc_feature (314)..(412): n is a, c, g, or t

SEQ ID NO: 191578 - DNA, 1386 bp, Homo Sapiens; identical to SEQ ID NO: 184125
  misc_feature (1131)..(1149): n is a, c, g, or t

SEQ ID NO: 191579 - DNA, 1210 bp, Homo Sapiens; identical to SEQ ID NO: 184126

SEQ ID NO: 191580 - DNA, 881 bp, Homo Sapiens; identical to SEQ ID NO: 184128

SEQ ID NO: 191581 - DNA, 2700 bp, Homo Sapiens; identical to SEQ ID NO: 184129
  misc_feature (2313)..(2326): n is a, c, g, or t

SEQ ID NO: 191582 - DNA, 705 bp, Homo Sapiens
ttggttttaacagtggaagttaaaataaagcttacatagttttcttcctttgaaagactgtgctgtcctttaacataggtttttaaagactaggatattgaatgtgaaacatccgttttcattgttcacttctaaaccaaaaattatgtgttgccaaaaccaaacccaggttcatgaatatggtgtctattatagtgaaacatgtactttgagcttattgtttttattctgtattaaatattttcagggttttaaacactaatcacaaactgaatgacttgacttcaaaagcaacaaccttaaaggccgtcatttcattagtattcctcattctgcatcctggcttgaaaaacagctctgttgaatcacagtatcagtattttcacacgtaagcacattcgggccatttccgtggtttctcatgagctgtgttcacagacctcagcagggcatcgcatggaccgcaggagggcagattcggaccactaggcctgaaatgacatttcactaaaagtctccaaaacatttctaagactactaaggccttttatgtaatttctttaaatgtgtatttcttaagaattcaaatttgtaataaaactatttgtataaaaattaagcttttattaatttgttgctagtattgccacagacgcattaaaagaaacttactgcacaagctgctaataaatttgtaagctttgc

SEQ ID NO: 191583 - DNA, 792 bp, Homo Sapiens
  misc_feature (129)..(142): n is a, c, g, or t
ttggatatcttccaaccccccagtataaatttctgtctttctgctatgtgtggtactttgcagctgcttttgcagaaatcacaattttcctgtggaataaagatggtccaaaaatagtcaaaaattaannnnnnnnnnnnnntagtaatttatatagatgtcagcaattaggcagatcaaggtttagtttaacttccactgttaaaataaagcttacatagttttcttcctttgaaagactgtgctgtcctttaacataggtttttaaagactaggatattgaatgtgaaacatccgttttcattgttcacttctaaaccaaaaattatgtgttgccaaaaccaaacccaggttcatgaatatggtgtctattatagtgaaacatgtactttgagcttattgtttttattctgtattaaatattttcagggttttaaacactaatcacaaactgaatgacttgacttcaaaagcaacaaccttaaaggccgtcatttcattagtattcctcattctgcatcctggcttgaaaaacagctctgttgaatcacagtatcagtattttcacacgtaagcacattcgggccatttccgtggtttctcatgagctgtgttcacagacctcagcagggcatcgcatggaccgcaggagggcagattcggaccactaggcctgaaatgacatttcactaaaagtctccaaaacatttctaagactactaaggccttttatgtaatttctttaaatgtgtatttcttaagaattcaaatttgtaataaaactatttgtat

SEQ ID NO: 191584 - DNA, 1577 bp, Homo Sapiens; identical to SEQ ID NO: 184130

SEQ ID NO: 191585 - DNA, 1251 bp, Homo Sapiens; identical to SEQ ID NO: 184131
  misc_feature (1044)..(1057): n is a, c, g, or t

SEQ ID NO: 191586 - DNA, 979 bp, Homo Sapiens
ttggcgttttcctcctgtgaagacatagctgcgggtggctgtgctggtggcgttcaagatgtcgaccaagaatttccgagtcagtgacggggactggatttgccctgacaaaaaatgtggaaatgtaaactttgctagaagaaccagctgtaatcgatgtggtcgggagaaaacaactgaggccaagatgatgaaagctgggggcactgaaataggaaagacacttgcagaaaagagccgaggcctatttagtgctaatgactggcaatgtaaaacttgcagcaatgtgaattgggccagaagatcagagtgtaatatgtgtaatactccaaagtatgctaaattagaagaaagaacaggatatggtggtggttttaatgaaagagaaaatgttgaatatatagaaagagaagaatctgatggtgaatatgatgagtttggacgtaaaaagaaaaaatacagagggaaagcagttggtcctgcatctatattaaaggaagttgaagataaagaatcagagggagaagaagaggatgaggatgaagatctttctaaatataagttagatgaggatgaggatgaagatgacgctgatctctcaaaatataatcttgatgccagtgaagaagaagatagtaataaaaagaaatctaatagacgaagtcgctcaaagtctcgatcttcacattcacgatcttcatcacgctcatcctccccctcaagttcaaggtctaggtccaggtcccgttcaagaagttcttccagttcgcagtcaagatctcgttccagttccagagaacgttcgagatctcgtgggtcgaaatcaagatccagctccaggtcccacaggggctcttcttccccacgaaaaagatcttattcaagttcatcatcttctcctgagaggaacagaaagagaagtcgttctagatcttcttcatctggtgatcgcaaaaaaagacgaacaagatccacggtc

SEQ ID NO: 191587 - DNA, 923 bp, Homo Sapiens; identical to SEQ ID NO: 180203

SEQ ID NO: 191588 - DNA, 2065 bp, Homo Sapiens; identical to SEQ ID NO: 184133
  misc_feature (1729)..(1778): n is a, c, g, or t

SEQ ID NO: 191589 - DNA, 1026 bp, Homo Sapiens; identical to SEQ ID NO: 184134

SEQ ID NO: 191590 - DNA, 1638 bp, Homo Sapiens; identical to SEQ ID NO: 184135
  misc_feature (1271)..(1300): n is a, c, g, or t

SEQ ID NO: 191591 - DNA, 1383 bp, Homo Sapiens; identical to SEQ ID NO: 184136
  misc_feature (1265)..(1294): n is a, c, g, or t

SEQ ID NO: 191592 - DNA, 2206 bp, Homo Sapiens; identical to SEQ ID NO: 184137
  misc_feature (346)..(376): n is a, c, g, or t
  misc_feature (968)..(982): n is a, c, g, or t
  misc_feature (1692)..(1721): n is a, c, g, or t

SEQ ID NO: 191593 - DNA, 1135 bp, Homo Sapiens; identical to SEQ ID NO: 180204
  misc_feature (144)..(176): n is a, c, g, or t
  misc_feature (359)..(636): n is a, c, g, or t
  misc_feature (640)..(649): n is a, c, g, or t
  misc_feature (920)..(949): n is a, c, g, or t

SEQ ID NO: 191594 - DNA, 1265 bp, Homo Sapiens
  misc_feature (276)..(310): n is a, c, g, or t
  misc_feature (379)..(390): n is a, c, g, or t
  misc_feature (1006)..(1035): n is a, c, g, or t
tttgttattttgctgatgtaaattttaatataaaatatttagtcacaaaatagtattgcttttgtatgcacatagttgtaagattactttgcttttgtcaataaaaactataccatctttcataaaactctaaacaaattaagaactgtgatgtagaacaaaaattacacatggtaaaacaggtaccagcacaacgttaggttatattacatcaaaaaaagttttaatggtcccaaatatatatactcaacaactaagcatacactcaggggaggnnnnnnnnnnnnnnnnnnnnnnnnnnnnnnnnnnnttatgacacaaatgaccacatctagaattccactcaatctttaatcaagtagggagaagtccccacttnnnnnnnnnnnntatctgcagtttgaagggcaaagggaacagttaaaaaagaggaaaactttatactcgcccctcccccacagaggttttccaaacctgttgtagcttgactaaaatgttcagaatgtatgattttaaaaggcaggtctctttatacaaagaaactgctggcattcttgactatgaagaattatggcagaaaggcccattcttctgagtctcaaacatggtccaagaaagcatattctgattgtagcaactgaccagtcaatccagagttccacttacaaaacccctgccctgttggctttttgtttccatttccttccctgagaaaagggcaatgtgtggtccaagctggagagctcaaaggcttaagtctttcccctaaatatatgatatcccctccccctgctccattgaattggcacttgatgagcagaagtcaagtgtaagaggctgatctgtgtcagtcattcacaagagaccactgcgctttgttgtggattttgtatgggggaggggtggagaaccagtttttttcaacaggtactgatcctaggccgttgccattattatgaatcaaattttgctttctttgacaatggtaacgtatcttccttatctnnnnnnnnnnnnnnnnnnnnnnnnnnnnnnggataatctaccagacccacgaggcctccctttgtagtaatagctgccgtctgagatgtatttttaggtacggatccaggagagcctggagatcctggggatccaggtgatcccggagaaccaggcagatttgttgtagatgactggctggtgaggttagtcttcgttccactggacagggaaagcttgaaacttgggctctgccgtccagaaaggtttgttttcaccaa

SEQ ID NO: 191595 - DNA, 1336 bp, Homo Sapiens
actttgtacaaaaaagttggagccactccacagcatcccgagggatgatctagcctgattcctgcgtgtccgaaagaacttaacgttttaaaggtgattgtcaagtaactgtgtggggttctaatgccagtttcctaattccatctcactggagatgtttaaagttggcctctatcctaatgactcaaaacttggttcttaactaccatgattgcttttgagggcccggaattataaatatatattatattttaattgtttgagattattttgacacatttctttgatacgtagagtgttttgtttttaatttaaatctgtcctcatgcaaccctccatgaggggcagcgaagctggcagggagcagactggctttgtaggttcagcactcggccccccactgcgggagaggcggaacccacttgcatgtcagcgtttttgattcgagaaaagaaatactctcaacgttttaccaagtgattttacctccacctttactaaagtctttacctaaaacatggcagtcgctggacacaggaaagcccaccttttgtttggccttttcgaaaggtgacccatattgcacagcagaacatcacagctgtggtcccagatgagacactgacatgcgagtgaaggcctctcctcctgggccccgggctgcgcaggctcctcactctgggcggtgtttcctgtctcagaattgacacggtgaatgcttagtgtctggattttcttgtgccagtgtttacatatctgacatcgagctcctctaagaggccacgttcaagcttgtgtgtccctgacccaagatagccagtgctgctcccaggtggtacttctggtaccgtgttgagacacttgggattctcagactgtggacaggagtgtttgtcatttttcatactgttttcttaataagcgctcaggcctaaggtgtgacaggaagtcgcacgcgcttggccagagcacagtgaagcaaaggactgggtgctgatggatggagccacggcggcatctgcccacccggccgcagcccccagtgcctctcctggtggtcctcccagtctagagggtcacggcccccccgccctcctccgtctctggcaagctgaccttgactaacccaggaatacagggtcatcctcattcctaagtaagtcaaacagcaagacatggtttgcgcgggtctttgccggaagccggtcctgctggccaggtgttttacgtcagcagggaaatgtggcacacgccctcgaggcattttaacactgcgcttcaggaaatctcaagttccatcttgtgttagtaacgtacccacattttgctggagtta

SEQ ID NO: 191596 - DNA, 1334 bp, Homo Sapiens; identical to SEQ ID NO: 184140
  misc_feature (1138)..(1149): n is a, c, g, or t

SEQ ID NO: 191597 - DNA, 5616 bp, Homo Sapiens; identical to SEQ ID NO: 184141
  misc_feature (5416)..(5426): n is a, c, g, or t

SEQ ID NO: 191598 - DNA, 730 bp, Homo Sapiens
  misc_feature (214)..(224): n is a, c, g, or t
ttggtataaatgtaccagagtgtataaactgtagagatagcattggcaagacattgtacagatgcaaccttttacacaacatcattgtgtaatttgtaaagattcacatgtagttctttattatagtgattttgggctttgtacccactgaatgccattttttgtgtttttaaattattttctttatcttgttacaaaaactgagatgtggggnnnnnnnnnnncagttcacttatcattagaatgtctgaacttttatgtaacatttttgtgtgcatctctcaatgctaacaccacatgtttgcctatgacaattttataaagtgaaaggtatcttctgggttgaaataattcacaaattggtgaatgtcatcttgcaacacaccctgtacagtcttccttaaaggaacactacagtatatttttagtatctacatgctgaatgactgaatacagacctaagcacagcagtggtcctggtacagtatttaagtgtcggcatacacaggcgtaatccctgtataaagtagtgccaaactgatttcagttgtgtaactagtttaaaacccaataaatggattctttttaacacctggcttttgtcttcattaagaggagaagacagttctgtatgtattgtctcctgtggatttccttttgcagccatatattcgcaccccgtaaatctatgtcctctgaccagtataaattatctggatctgccctgtac

SEQ ID NO: 191599 - DNA, 963 bp, Homo Sapiens
  misc_feature (600)..(643): n is a, c, g, or t
  misc_feature (682)..(738): n is a, c, g, or t
actttgtacaaaaaagttggcaaagtcctaaaacgcgcggccgtgggttcggggtttattgattgaattccgccggcgcgggagcctctgcagagagagagcgcgagagatggagatgggcagacggattcatttagagctgcggaacaggacgccctctgatgtgaaagaacttgtcctggacaacagtcggtcgaatgaaggcaaactcgaaggcctcacagatgaatttgaagaactggaattcttaagtacaatcaacgtaggcctcacctcaatcgcaaacttaccaaagttaaacaaacttaagaagcttgaactaagcgataacagagtctcagggggcctggaagtattggcagaaaagtgtccgaacctcacgcatctaaatttaagtggcaacaaaattaaagacctcagcacaatagagccactgaaaaagttagaaaacctcaagagcttagaccttttcaattgcgaggtaaccaacctgaacgactaccgagaaaatgtgttcaagctcctcccgcaactcacatatctcgacggctatgaccgggacgacaaggaggcccctgactcggatgctgagggctacgnnnnnnnnnnnnnnnnnnnnnnnnnnnnnnnnnnnnnnnnnnnntatgatgaagatgctcaggtagtggaagacgaggaggannnnnnnnnnnnnnnnnnnnnnnnnnnnnnnnnnnnnnnnnnnnnnnnnnnnnnnnntgaagaaagttataacgatggagaggtagatgacgaggaagatgaagaagagcttggtgaagaagaaaggggtcagaagcgaaaacgagaacctgaagatgagggagaagatgatgactaagtgggaataaccctattttgaaaaattcctattgtgatttgactgtttttacccaatatcgctctccccccccatcgaatcctgcccctgaaacttattttttt

SEQ ID NO: 191600 - DNA, 798 bp, Homo Sapiens
ttggctgaacttccctgagatcaaacgaaggaagatggctgacaggaaggatgaggacaggaagcaatttaaagacctctttgacctgaacagctctgaagaggacgacaccgagggattctcggagagagggatactgaggcccctgagcactcggcatggggtggaagacgatgaagaggacgaggaggagggcgaggaggacagcagcaactcggaggatggagacccagacgcagaggcggggctggcccctggggagctgcagcagctggcccaggggccggaggacgagctggaggatctgcagctctcagaggacgactgaggcagcccatctggggggcctgtaggggctgccgggctggtggccagtgtttccacctccctggcagtcaggcctagaggctggcgtctgtgcagttgggggaggcagtagacacgggacaggctttattatttatttttcagcatgaaagaccaaacgtatcgagagctgggctgggctgggctggtgtggctgctgaagccccacagctgtgggctgctgaagtcagctccgcgggggagctgaccctgacgtcagcagaccgagaccagtcccagttccagggggaggcctgcaggcccctggccccttccaccacctctgccctccgtctgcagacctcgtccatctgcaccaggctctgccttcactcccccagtctttggaaatttgttcttttcctttgaagtcacattttcttttaaaattttttgttttgcatccgaaaccgaaagaaataaagcggtggg

SEQ ID NO: 191601 - DNA, 954 bp, Homo Sapiens
  misc_feature (788)..(817): n is a, c, g, or t
ctttgataaaactgtttattgtccacggaccgagcgattgctcaagaatgatacaaagcatcagagacatgcgcagtctgcttgtcaactttcaacaactcttgtgtgttcccagcaccggaaggtctcagacttcatattccagcataaacacagtgctcccctcccccaaaaatccaaacggaaacaaaatcaacagagctttaaattacggcagcaagtccaatatttcttaatacttatcaagcaaagatttgaaaataactacaatgtaaactttatttttaaatattttgagttgcttgcaggatgaaaataggagaagagagctgtgcttagaacataacatataaattaaacgatgccaaatggagagccttcttaaactatatatatattgccactatttattgtgaaggtatttgagcggcttcctctgtcagctgccacccggctcttcttaacctgttttgttttctgctcagcacggttaaaagaccaacgtgtgtggatcaaatataaaggccacacctttcagaccgaacctactcaaagatcctttactttgcaataatttgaactggagaaccaaagacgggagacgaatgaaagcaaagatgctcaaagaaccaaaggaaagacctgaaggaatccacctgcataggccacgcgttccactctgggtcaaatgcttccacgatgcagaaacctttttttaaaaaagtgcaagtctaatacctaccaagggtaataaaaaacacagcacaggaatgattacagctgatgtnnnnnnnnnnnnnnnnnnnnnnnnnnnnnntcagcagaaacaggagtaaatgttacatatgatatcaccatacaggaagcgaacaggggtggggtgttatatgggttggaggggtctggtggagttgtatatactgaaatcacatggactggtccattatgacccaa

SEQ ID NO: 191602 - DNA, 1656 bp, Homo Sapiens; identical to SEQ ID NO: 184145
  misc_feature (178)..(196): n is a, c, g, or t
  misc_feature (1322)..(1351): n is a, c, g, or t

SEQ ID NO: 191603 - DNA, 959 bp, Homo Sapiens
  misc_feature (757)..(786): n is a, c, g, or t
caactttgtacaaaaaagttggctgacttctttctcagcctccaggacactatggcctgttttaagagacatcttatttttctaaaggtgaattctcagatgataggtgaacctgagttgcagatataccaacttctgcttgtatttcttaaatgacaaagattacctagctaagaaacttcctagggaactagggaacctatgtgttccctcagtgtggtttcctgaagccagtgatatgggggttaggataggaagaactttctcggtaatgataaggagaatctcttgtttcctcccacctgtgttgtaaagataaactgacgatatacaggcacattatgtaaacatacacacgcaatgaaaccgaagcttggcggcctgggcgtggtcttgcaaaatgcttccaaagccaccttagcctgttctattcagcggcaaccccaaagcacctgttaagactcctgacccccaagtggcatgcagcccccatgcccaccgggacctggtcagcacagatcttgatgacttccctttctagggcagactgggagggtatccaggaatcggcccctgccccacgggcgttttcatgctgtacagtgacctaaagttggtaagatgtcataatggaccagtccatgtgatttcagtatatacaactccaccagacccctccaacccatataacaccccacccctgttcgcttcctgtatggtgatatcatatgtaacatttactcctgtttctgctgannnnnnnnnnnnnnnnnnnnnnnnnnnnnnacatcagctgtaatcattcctgtgctgtgttttttattaccctttggtaggtattagactttgcacttttttaaaaaaattttctgcatcgtggaagcatttgacccagagtggaccgcgtggcctatgcagtggattccttcaggtctttcctttggttctttgagcatctt

SEQ ID NO: 191604 - DNA, 870 bp, Homo Sapiens; identical to SEQ ID NO: 184146
  misc_feature (615)..(640): n is a, c, g, or t

SEQ ID NO: 191605 - DNA, 1355 bp, Homo Sapiens
  misc_feature (1011)..(1040): n is a, c, g, or t
caaattgatgagcaatgctttttccctatatagcacgactttgtacaaaaaagttgggggcttgtgtgcagggcccggctgggctccccatctgcacatcctgaggacagaaaaagctgggtcttgctgtgccctcccaggcttagtgttccctccctcaaagactgacagccatcgttctgcacggggctttctgcatgtgacgccagctaagcatagtaagaagtccagcctaggaagggaaggattttggaggtaggtggctttggtgacacactcacttctttctcagcctccaggacactatggcctgttttaagagacatcttatttttctaaaggtgaattctcagatgataggtgaacctgagttgcagatataccaacttctgcttgtatttcttaaatgacaaagattacctagctaagaaacttcctagggaactagggaacctatgtgttccctcagtgtggtttcctgaagccagtgatatgggggttaggataggaagaactttctcggtaatgataaggagaatctcttgtttcctcccacctgtgttgtaaagataaactgacgatatacaggcacattatgtaaacatacacacgcaatgaaaccgaagcttggcggcctgggcgtggtcttgcaaaatgcttccaaagccaccttagcctgttctattcagcggcaaccccaaagcacctgttaagactcctgacccccaagtggcatgcagcccccatgcccaccgggacctggtcagcacagatcttgatgacttccctttctagggcagactgggagggtatccaggaatcggcccctgccccacgggcgttttcatgctgtacagtgacctaaagttggtaagatgtcataatggaccagtccatgtgatttcagtatatacaactccaccagacccctccaacccatataacaccccacccctgttcgcttcctgtatggtgatatcatatgtaacatttactcctgtttctgctgannnnnnnnnnnnnnnnnnnnnnnnnnnnnnacatcagctgtaatcattcctgtgctgtgttttttattacccttggtaggtattagacttgcacttttttaaaaaaaggtttctgcatcgtggaagcatttgacccagagtggaacgcgtggcctatgcaggtggattccttcaagtctttcctttggttctttgagcatctttgctttcattcgtctcccgtctttggttctccagttcaaattattgcaaagtaaaggatctttgagtagttcgggtctgaaacggtgtggcctttatatttgatccacacacgtttggtcttttaaccgtgctgagcagaaa

SEQ ID NO: 191606 - DNA, 2309 bp, Homo Sapiens; identical to SEQ ID NO: 184149
  misc_feature (145)..(181): n is a, c, g, or t
  misc_feature (231)..(307): n is a, c, g, or t
  misc_feature (2124)..(2157): n is a, c, g, or t

SEQ ID NO: 191607 - DNA, 1465 bp, Homo Sapiens; identical to SEQ ID NO: 184150
  misc_feature (599)..(632): n is a, c, g, or t
  misc_feature (1326)..(1353): n is a, c, g, or t

SEQ ID NO: 191608 - DNA, 712 bp, Homo Sapiens; identical to SEQ ID NO: 184151
  misc_feature (235)..(262): n is a, c, g, or t
  misc_feature (375)..(418): n is a, c, g, or t
  misc_feature (556)..(572): n is a, c, g, or t

SEQ ID NO: 191609 - DNA, 584 bp, Homo Sapiens
actttgtacaaaaaagttgggaatgtgcaaaataagaaaaagaactgttggttatttgtgttattctggatgtataaaaatcaatggaaaaaaataaactttcaaattgaaatgacggtataacacatctactgaaaaagcaacgggaaatgtggtcctatttaagccagcccccacctagggtctatttgtgtggcagttattgggtttggtcacaaaacatcctgaaaattcgtgcgtgggcttctttctccctggtacaaacgtatggaatgcttcttaaaggggaactgtcaagctggtgtcttcagccagatgacatgagagaatatcccaaaaccctctctccaaggtgtttctagatagcacaggagagcaggcactgcactgtccacagtccacggtacacagtcgggtgggccgcctcccctctcctgggagcattcgtcgtgcccagcctgagcagggcagctggactgctgctgttcaggagccaccagagccttcctctctttgtaccacagtttcttctgtaaatccagtgttacaatcagtgtgaatggcaaataaacagtttgacaagt

SEQ ID NO: 191610 - DNA, 1178 bp, Homo Sapiens; identical to SEQ ID NO: 184152
  misc_feature (312)..(345): n is a, c, g, or t
  misc_feature (1039)..(1066): n is a, c, g, or t

SEQ ID NO: 191611 - DNA, 914 bp, Homo Sapiens; identical to SEQ ID NO: 184153
  misc_feature (427)..(454): n is a, c, g, or t
  misc_feature (568)..(610): n is a, c, g, or t
  misc_feature (749)..(765): n is a, c, g, or t

SEQ ID NO: 191612 - DNA, 2188 bp, Homo Sapiens; identical to SEQ ID NO: 180207
  misc_feature (254)..(263): n is a, c, g, or t
  misc_feature (894)..(902): n is a, c, g, or t
  misc_feature (1544)..(1784): n is a, c, g, or t
  misc_feature (1799)..(1818): n is a, c, g, or t
  misc_feature (1858)..(1871): n is a, c, g, or t

SEQ ID NO: 191613 - DNA, 1296 bp, Homo Sapiens; identical to SEQ ID NO: 184156

SEQ ID NO: 191614 - DNA, 1426 bp, Homo Sapiens
  misc_feature (1112)..(1177): n is a, c, g, or t
ttggcttatgagctccaaggatgatgtgggcaagagtgtccacgagctggagaagtccaagcgggccctagagcagcaggtggaggagatgaagacgcagctggaagagctggaggacgagctgcaggccaccgaagatgccaagctgcggttggaggtcaacctgcaggccatgaaggcccagttcgagcgggacctgcagggccgggacgagcagagcgaggagaagaagaagcagctggtcagacaggtgcgggagatggaggagctggaggaggagcagggcaacacggagctgatcaacgaccggctgaagaaggccaacctgcagatcgaccagatcaacaccgacctgaacctggagcgcagccacgcccagaagaacgagaatgctcggcagcagctggaacgccagaacaaggagcttaaggtcaagctgcaggagatggagggcactgtcaagtccaagtacaaggcctccatcaccgccctcgaggccaagattgcacagctggaggagcagctggcaacgagaccaaggagcgccaggcagcctgcaaacaggtgcgtcggaccgagaagaagctgaaggatgtgctgctgcaggtggatgacgagcggaggaacgccgagcagtacaaggaccaggccgacaaggcatctacccgcctgaagcagctcaagcggcagctggaggaggccgaagaggaggcccagcgggccaacgcctcccgccggaaactgcagcgcgagctggaggacgccactgagacggccgatgccatgaaccgcgaagtcagctccctaaagaacaagctcaggcgcggggacctgccgtttgtcgtgccccgccgaatggcccggaaaggcgccggggatggctccgacgaagaggtagatggcaaagcggatggggctgaggccaaacctgccgaataagcctcttctcctgcagcctgagatggatggacagacagacaccacagcctccccttcccagaccccgcagcacgcctctccccaccttcttgggactgctgtgaacatgcctcctcctgccctccgccccgtccccccatcccgtttccctccaggtgttgttgagggcattnnnnnnnnnnnnnnnnnnnnnnnnnnnnnnnnnnnnnnnnnnnnnnnnnnnnnnnnnnnnnnnnnnggcccgggcccaggcagagagcgaccagcaggctcctcagccctctcttgccaaaaagcacaagatgttgaggcgagcagggcaggcccccggggaggggccagagttttctatgaatctatttttcttcagactgaggccttttggtagtcggagcccccgcagtcgtcagcctccctgacgtctgccaccagcgcccccactcctcctcctttctttgctgtttgcaatcacacgtgggtgacctca

SEQ ID NO: 191615 - DNA, 1513 bp, Homo Sapiens
  misc_feature (1229)..(1294): n is a, c, g, or t
ctttgtacaaagaagctggagatggtggtgaaggacctggaggcgcacatcgactcggccaacaagaaccgggacgaagccatcaaacagctgcggaagctgcaggcccagatgaaggactgcatgcgcgagctggatgacacccgcgcctctcgtgaggagatcctggcccaggccaaagagaacgagaagaagctgaagagcatggaggccgagatgatccagttgcaggaggaactggcagccgcggagcgtgccaagcgccaggcccagcaggagcgggatgagctggctgacgagatcgccaacagcagcggcaaaggagccctggcgttagaggagaagcggcgtctggaggcccgcatcgcccagctggaggaggagctggaggaggagcagggcaacacggagctgatcaacgaccggctgaagaaggccaacctgcagatcgaccagatcaacaccgacctgaacctggagcgcagccacgcccagaagaacgagaatgctcggcagcagctggaacgccagaacaaggagcttaaggtcaagctgcaggagatggagggcactgtcaagtccaagtacaaggcctccatcaccgccctcgaggccaagattgcacagctggaggagcagctggacaacgagaccaaggagcgccaggcagcctgcaaacaggtgcgtcggaccgagaagaagctgaaggatgtgctgctgcaggtggatgacgagcggaggaacgccgagcagtacaaggaccaggccgacaaggcatctacccgcctgaagcagctcaagcggcagctggaggaggccgaagaggaggcccagcgggccaacgcctcccgccggaaactgcagcgcgagctggaggacgccactgagacggccgatgccatgaaccgcgaagtcagctccctaaagaacaagctcaggcgcggggacctgccgtttgtcgtgccccgccgaatggcccggaaaggcgccggggatggctccgacgaagaggtagatggcaaagcggatggggctgaggccaaacctgccgaataagcctcttctcctgcagcctgagatggatggacagacagacaccacagcctccccttcccagaccccgcagcacgcctctccccaccttcttgggactgctgtgaacatgcctcctcctgccctccgccccgtccccccatcccgtttccctccaggtgttgttgagggcattnnnnnnnnnnnnnnnnnnnnnnnnnnnnnnnnnnnnnnnnnnnnnnnnnnnnnnnnnnnnnnnnnnggcccgggcccaggcagagagcgaccagcaggctcctcagccctctcttgccaaaaagcacaagatgttgaggcgagcagggcatgcccccggggaggggccagagttttctatgaatctatttttcttcagactgaggccttttggtagtcggagcccccgcagtcgtcagcctccctgacgtctgccaccagcgcccccactcctcctcctttcttt

SEQ ID NO: 191616 - DNA, 902 bp, Homo Sapiens
  misc_feature (372)..(427): n is a, c, g, or t
ctcctccccccaccccagccttctgtgccctgcacagaggtggaggcccagggcctgctccttctggaccgcccagagccatgggagtgggaggcccaaggggcagaggtgtgtgaggtcaccacgtgtgattgcaaacagcaaagaaaggaggaggagtgggggcgctggtggcagacgtcagggaggctgacgactgcgggggctccgactaccaaaaggcctcagtctgaagaaaaatagattcatagaaaactctggcccctccccgggggcctgccctgctcgcctcaacatcttgtgctttttggcaagagagggctgaggagcctgctggtcgctctctgcctgggcccgggccctgtctctttnnnnnnnnnnnnnnnnnnnnnnnnnnnnnnnnnnnnnnnnnnnnnnnnnnnnnnnnaatgccctcaacaacacctggagggaaacgggatggggggacggggcggagggcaggaggaggcatgttcacagcagtcccaagaaggtggggagaggcgtgctgcggggtctgggaaggggaggctgtggtgtctgtctgtccatccatctcaggctgcaggagaagaggcttattcggcaggtttggcctcagccccatccgctttgccatctacctcttcgtcggagccatccccggcgcctttccgggccattcggcggggcacgacaaacggcaggtccccgcgcctgagcttgttctttagggagctgacttcgcggttcatggcatcggccgtctcagtggcgtcctccagctcgcgctgcagtttccggcgggaggcgttggcccgctgggcctcctcttcggcctcctccagctgccgcttgagctgcttcaggcgggtagatgccttgccaacttttttgtatca

SEQ ID NO: 191617 - DNA, 2773 bp, Homo Sapiens; identical to SEQ ID NO: 184158

SEQ ID NO: 191618 - DNA, 1658 bp, Homo Sapiens; identical to SEQ ID NO: 184160

SEQ ID NO: 191619 - DNA, 1008 bp, Homo Sapiens
tttgtacaaaaaagttggctctgcttccgtttctggttttgctctagtgtttgggtttcttcgcggctgctcaagatgaaccgactcttcgggaaagcgaaacccaaggctccgccgcccagcctgactgactgcattggcacggtggacagtagagcagaatccattgacaagaagatttctcgattggatgctgagctagtgaagtataaggatcagatcaagaagatgagagagggtcctgcaaagaatatggtcaagcagaaagccttgcgagttttaaagcaaaagaggatgtatgagcagcagcgggacaatcttgcccaacagtcattcaacatggaacaagccaattataccatccagtctttgaaggacaccaagaccacggttgatgctatgaaactgggagtaaaggaaatgaagaaggcatacaagcaagtgaagatcgaccagattgaggatttacaagaccagctagaggatatgatggaagatgcaaatgaaatccaagaagcactgagtcgcagttatggcaccccagaactggatgaagatgatttagaagcagagttggatgcactaggtgatgagcttctggctgatgaagacagttcttatttggatgaggcagcatctgcacctgcaattccagaaggtgttcccactgatacaaaaaacaaggatggagttctggtggatgaatttggattgccacagatccctgcttcatagatttgcatcattcaagcatatcttgtaaaacaaacacatattatgggactaggaaatatttatctttccaaatttgccataacagatttaggtttctttcctttctttgaaggaaagtttaattacattgctcttttattttttccattaagagactcattgcttgggaaatgctttcttcgtactaaaatttgattcctttttttcttatgaaaaaccgaactcagtttaaaagtatttttagctcgtatgacttgttttcattcattaata

SEQ ID NO: 191620 - DNA, 852 bp, Homo Sapiens
aactttgtacaaaaaagttgggatttagaagcacagttggatgcactaggtgatgagcttctggctgatgaagacagttcttatttggatgaggcagcatctgcacctgcaattccagaaggtgttcccactgatacaaaaaacaaggatggagttctggtggatgaatttggattgccacagatccctgcttcatagatttgcatcattcaagcatatcttgtaaaacaaacacatattatgggactaggaaatatttatctttccaaatttgccataacagatttaggtttctttcctttctttgaaggaaagtttaattacattgctcttttattttttccattaagagactcattgcttgggaaatgctttcttcgtactaaaatttgattcctttttttcttatgaaaaacgaactcagtttaaaagtatttttagctcgtatgacttgttttcattcattaataataatttgaaataaaactaaggaaatggaatcttaaaagtctatgacagtgtaactctacagtctcaaaatgacctgataaattgataagacaaagatgagattattggggctgttcatattatgattcagaatcattttctattgtggtattataggttggttaaagtgatggcctttttgatgggttttgttgtgtcttgtgaacaagtcgttactgtgtccattattggaatggaattatcactactgtatcatgagtgggtattttgattctatggttccctcagtattacatcttgacttgtaatcaattatgaatatttcttgatatttaatgtataggacatttatttatactcaataaatatttttcaaaagga

SEQ ID NO: 191621 - DNA, 990 bp, Homo Sapiens
gcccactttgtacaaaaaagttgggcttcgtcttctctcccggccgaggcccgggggaccagagcgagaagcggggaccatgttccgacgcaagttgacggctctcgactaccacaaccccgccggcttcaactgcaaagatgaaacagaatttagaaacttcatcgtttggcttgaagaccagaaaatcaggcactacaagattgaagacagagggaatttaagaaacatccacagcagcgactggcccaagttctttgaaaagtatctcagagatgttaactgtcctttcaagattcaagatcgacaagaagctattgactggcttcttggtttagctgttagacttgaatatggagataatgctgaaaaatacaaggatttagtacctgataattcaaaaactgctgacaatgcaactaaaaatgcagaaccattgatcaatttggatgtaaataatcctgattttaaggctggtgtgatggctttggctaacctgcttcagattcagcgtcatgatgattacctggtaatgcttaaggcaattcggattttggttcaggagcgcctgacacaggatgcagttgctaaggcaaatcaaacaaaagagggcttacctgttgctttagacaaacatattcttggttttgacacaggagatgcagttcttaatgaagctgctcaaattctgcgattgctgcacatagaggagctcagagagctacagacaaaaatcaacgaagccatagtagctgttcaggcaattattgctgatccaaagacagaccacagactgggaaaagttggaagatgaacacttgaggacttcagcttctcacctacttagtacagttgggaaccatacacttctggcatgtttggaaatcaaaatgtcacattctcgggggaggaagcccagaaaattgggtatgttctagagatttaccaccattgcttattgcttttttctttaataaagtttaggaaagt

SEQ ID NO: 191622 - DNA, 2243 bp, Homo Sapiens; identical to SEQ ID NO: 184162
  misc_feature (553)..(575): n is a, c, g, or t

SEQ ID NO: 191623 - DNA, 1086 bp, Homo Sapiens
ctttgtacaaaaaagttggcaatggaaaaccctaacaaaagaaaacaaagttggaacttctttccctcatgagtccacatttggcgttggcaactttaatgcttttaaatcaactgccaagaactttagtccatctacaaattcagtgaaagagtgtaatcgctcaaattcctcttctcctgttgacaaacttaatcagcagcctcgtctaaccaaactgacacgaatgcgcactgataagaagagtgaatttttgaaagcattgaaaagagacagagtagaagaggaacatgaagatgaaagccgtgctggctcagagaaggatgacgactcatttaatttacataacagcaatagtactcaccaagaaagggatataaaccgaaacttcgatgaaaatgaaattcctcaagagaatggcaatgcctcagtgatttcccagcagatcattcggtcttcaaccttcccacaaactgatgttctttcaagttcacttgaggcagaacacagattgttaaaggaaatgggctggcaggaagacagtgaaaatgatgaaacatgtgctcccttaactgaggatgaaatgagagaattccaagttattagtgaacagttacagaagaatggtctgagaaaaaatggtattttgaaaaatggcttgatctgtgacttcaagtttggaccgtggaagaacagcactttcaaacccacaactgagaatgatgacacagagacaagtagcagtgatacatcagatgacgacgatgtgtgaaggatttcctaacagctttagaaatcttagtgtgatacatctctcatacagtttggggtgaattgtaaaaatgaagaactataatttatgtagtgaaataccccattagaagaggattttttgggggacttcaatatgaagaaaaccaagaatgttttgttgggctgtgttgaacattatttctttgtaaatgaatgttgtaggaatgaggacttgggttggtccaacattgactttcttcatcactgcaacatttctctgactagcaatgtgacgatgtaacaaatgagattttctcatttaataataaaaaa

SEQ ID NO: 191624 - DNA, 1700 bp, Homo Sapiens; identical to SEQ ID NO: 180208
  misc_feature (452)..(467): n is a, c, g, or t
  misc_feature (917)..(917): n is a, c, g, or t

SEQ ID NO: 191625 - DNA, 1449 bp, Homo Sapiens; identical to SEQ ID NO: 180209
  misc_feature (1035)..(1049): n is a, c, g, or t

SEQ ID NO: 191626 - DNA, 950 bp, Homo Sapiens
  misc_feature (793)..(815): n is a, c, g, or t
ccaactttgtacaaaaaagttgggtcggcgccccttttagaggactgagactggttgtgggggagggaaaagcggcaaaaggggattattcaaagtaccgaaaaccttctcccgggatcaggcgcggcggcacccccaggccaggggcacctctggtggggcagaaggtgattgaattactcagatatgaagatcatcatctaggttttgtgtaaaaggccctggatattttaagtggccattttggatttacagtgtttttggataattttgccccagaagtttattaaaattggcaagaatcgtctgtgaagtgaattgatagtagtgaacaattcagcaagctacttaaaaagagacccaggcagcatttcttcagtattttggttcaaacggattatataactggttacagtatttcagctggtggtaatttttgcctccccttcccccaccccgttgttggggttcttcagccgaaactgagagacgttgatttgtgtactgagtagtttcagcagtttcaaatgactgagtattgctgaagtttcatggcagtttatttttacctttattgaaagttttaggaatttttgacttcagctctttcatgtcacaatgggacactttttctgaatgaagagattgaaagaatacagagtttttttccttttatcttttatttacgtggaaatttaagatgttgcagttttccggcagcatggtagtattgagatagctatgtgtgtctctgtatatgctgatgtttaggaatgctcttcagatgtgaaannnnnnnnnnnnnnnnnnnnnnnggctcgtaaattggatatttcatctggagtggacaagtacaacagtggcaagtacatggaataataaagaagactttgatcttaaatctaaagaacttggctaattcgggagatagccatatgaaaactttaaaa

SEQ ID NO: 191627 - DNA, 956 bp, Homo Sapiens
ctttgtacaaaaaagttggcccgcgtccgccgattcctcctccttggtcgccgcgtccttggctggcgtcagaaaaatggctacaaacttcctagcacatgagaagatctggttcgacaagttcaaatatgacgacgcagaaaggagattctacgagcagatgaacgggcctgtggcaggtgcctcccgccaggagaacggcgccagcgtgatcctccgtgacattgcgagagccagagagaacatccagaaatccctggctggaagctcaggccccggggcctccagcggcaccagcggagaccacggtgagctcgtcgtccggattgccagtctggaagtggagaaccagagtctgcgtggcgtggtacaggagctgcagcaggccatctccaagctggaggcccggctgaacgtgctggagaagagctcgcctggccaccgggccacggccccacagacccagcacgtatctcccatgcgccaagtggagcccccagccaagaagccagccacaccagcagaggatgacgaggatgatgacattgacctgtttggcagtgacaatgaggaggaggacaaggaggcggcacagctgcgggaggagcggctacggcagtacgcggagaagaaggccaagaagcctgcactggtggccaagtcctccatcctgctggatgtcaagccttgggatgatgagacggacatggctcagctggaggcctgtgtgcgctctatccagctggacgggctggtctggggggcttccaagctggtgcccgtgggctacggtatccggaagctacagattcagtgtgtggtggaaggacgacaaggtggggacagacttgctggaggaggagatcaccaagtttgaggagcacgtgcagagtgtcgatatcgcagctttcaacaagatctgaagcctgagtgtgtgtacgtgcgcgcgtgcgtga

SEQ ID NO: 191628 - DNA, 771 bp, Homo Sapiens; identical to SEQ ID NO: 180211
  misc_feature (59)..(67): n is a, c, g, or t

SEQ ID NO: 191629 - DNA, 894 bp, Homo Sapiens
tttgtacaaaaaagttggcctccttggtcgccgcgtccttggctggcgtcagaaaaatggctacaaacttcctagcacatgagaagatctggttcgacaagttcaaatatgacgacgcagaaaggagattctacgagcagatgaacgggcctgtggcaggtgcctcccgccagagctcaggccccggggcctccagcggcaccagcggagaccacggtgagctcgtcgtccggattgccagtctggaagtggagaaccagagtctgcgtggcgtggtacaggagctgcagcaggccatctccaagctggaggcccggctgaacgtgctggagaagagctcgcctggccaccgggccacggccccacagacccagcacgtatctcccatgcgccaagtggagcccccagccaagaagccagccacaccagcagaggatgacgaggatgatgacattgacctgtttggcagtgacaatgaggaggaggacaaggaggcggcacagctgcgggaggagcggctacggcagtacgcggagaagaaggccaagaagcctgcactggtggccaagtcctccatcctgctggatgtcaagccttgggatgatgagacggacatggctcagctggaggcctgtgtgcgctctatccagctggacgggctggtctggggggcttccaagctggtgcccgtgggctacggtatccggaagctacagattcagtgtgtggtggaggacgacaaggtggggacagacttgctggaggaggagatcaccaagtttgaggagcacgtgcagagtgtcgatatcgcagctttcaacaagatctgaagcctgagtgtgtgtacgtgcgcgcgtgcgtgaggccctgccacgattaaagactgagaccggc

SEQ ID NO: 191630 - DNA, 1189 bp, Homo Sapiens; identical to SEQ ID NO: 180212
  misc_feature (827)..(836): n is a, c, g, or t
  misc_feature (895)..(913): n is a, c, g, or t
  misc_feature (917)..(996): n is a, c, g, or t
  misc_feature (1090)..(1110): n is a, c, g, or t

SEQ ID NO: 191631 - DNA, 907 bp, Homo Sapiens
ctttgtacaaaaaagttggctccttggtcgccgcgtccttggctggcgtcagaaaaatggctacaaacttcctagcacatgagaagatctggttcgacaagttcaaatatgacgacgcagaaaggagattctacgagcagatgaacgggcctgtggcaggtgcctcccgccaggagaacggcgccagcgtgatcctccgtgacattgcgagagccagagagaacatccagaaatccctggctggaagctcaggccccggggcctccagcggcaccagcggagaccacggtgagctcgtcgtccggattgccagtctggaagtggagaaccagagtctgcgtggcgtggtacaggagctgcagcaggccatctccaagctggaggcccggctgaacgtgctggagaagagctcgcctggccaccgggccacggccccacagacccagcacgtatctcccatgcgccaagtggagcccccagccaagaagccagccacaccagcagaggatgacgaggatgatgacattgacctgtttggcagtgacaatgaggaggaggacaaggaggcggcacagctgcgggaggagcggctacggcagtacgcggagaagaaggccaagaagcctgcactggtggccaagtcctccatcctgctggatgtcaagccttgggatgatgagacggacatggctcagctggaggcctgtgtgcgctctatccagctggacgggctggtctggggggcttccaagctggtgcccgtgggctacggtatccggaagctacagattcagtgtgtggtggaggacgacaaggtgggggacagacttgctggaggaggagatcaccaagttttgaaggagcacgtgcagagtgtcgatatcgcagcttttcaacaagatctgaa

SEQ ID NO: 191632 - DNA, 890 bp, Homo Sapiens
ctttgtacaaaaaagttggctacaaacttcctagcacatgagaagatctggttcgacaagttcaaatatgacgacgcagaaaggagattctacgagcagatgaacgggcctgtggcaggtgcctcccgccaggagaacggcgccagcgtgatcctccgtgacattgcgagagccagagagaacatccagaaatccctggctggaagctcaggccccggggcctccagcggcaccagcggagaccacggtgagctcgtcgtccggattgccagtctggaagtggagaaccagagtctgcgtggcgtggtacaggagctgcagcaggccatctccaagctggaggcccggctgaacgtgctggagaagagctcgcctggccaccgggccacggccccacagacccagcacgtatctcccatgcgccaagtggagcccccagccaagaagccagccacaccagcagaggatgacgaggatgatgacattgacctgtttggcagtgacaatgaggaggaggacaaggaggcggcacagctgcgggaggagcggctacggcagtacgcggagaagaaggccaagaagcctgcactggtggccaagtcctccatcctgctggatgtcaagccttgggatgatgagacggacatggctcagctggaggcctgtgtgcgctctatccagctggacgggctggtctggggggcttccaagctggtgcccgtgggctacggtatccggaagctacagattcagtgtgtggtggaggacgacaaggtggggacagacttgctggaggaggagatcaccaagtttgaggagcacgtgcagagtgtcgatatcgcagctttcaacaagatctgaagcctgagtgtgtgtacgtgcgcgcgtgc

SEQ ID NO: 191633 - DNA, 1624 bp, Homo Sapiens; identical to SEQ ID NO: 184163

SEQ ID NO: 191634 - DNA, 1449 bp, Homo Sapiens; identical to SEQ ID NO: 184165
  misc_feature (1183)..(1215): n is a, c, g, or t

SEQ ID NO: 191635 - DNA, 1575 bp, Homo Sapiens; identical to SEQ ID NO: 184167
  misc_feature (805)..(873): n is a, c, g, or t

SEQ ID NO: 191636 - DNA, 898 bp, Homo Sapiens
tttgtacaaaaaagttggccaaggcctgtttgaatgcctggccctaaacctgcactgcttggggggacagcagatggagcttgctgctgttatcaatggccgaattcgtcgtatgtctcgtggggtgaatccctccttggtgagctggctgaccactatgatgggactgaggcttcaggtggtactggagcacatgcctgtaggccctgatgccattctcagatacgttcgcagggttggtgatcccccccagccacttcctgaggagccaatggaagttcagggagcagaaagagcttcccctgagcctcagcgggagaatgcttccccagcccctggaacaacagcagaagaggccatgtcccgaggtccacctcctgctcctgaggggggctcccgggatgaacaggatggagcttcagctgagacagaaccttgggcagctgcagtccccccagaatgggtccctattatccagcaggacattcagagccagcggaaggtgaaaccgcagccccctctgagtgatgcctacctcagtggtatgcctgccaagagacgcaagacgatgcagggtgagggcccccagctgcttctctcagaggctgtgagccgggcagctaaggcagccggagctcggcccctgacgagccccgagagcctgagccgggacctggaggcaccagaggttcaggagagctacaggcagcagctccggtctgatatacaaaaacgactgcaggaagaccccaactacagtccccagcgcttccccaatgcccagcgggcctttgctgatgatccttagctctttgctctatggccctttcctcatcaggggaccgtttcccccctcttccttcacagtatttaaaaataaaagtcggatttttctggc

SEQ ID NO: 191637 - DNA, 965 bp, Homo Sapiens
agcccctggccttgcagggccctagcaaggttccccagaagctgagagaactgaaagatcagccatggagggttgaggggtgggtggaggctgggcaggccccccaggagcggggccagctgtggtagctgtgttggtggtgccagcactggcagaagcagtggcaggggctggcggtggagccatacctggggtcccctgagccacaaggactggctgcataagaagctgccccacaaggccgctcaccatctgggccaacgaggcattggtacccagaccggcgccctgcagtgtcccagagactgggggccctccaggatgggaaggccgagcctgtggaggagtgggccgggcaatcaccacccgggttggagctgttgggaagcctggcacctgctgtcctgcggccgcggaggcaacagctgccaccatggcctgatgagtgatctggtgggcgacggcgtgcatgaactcagggggcagggagggcagctggatgagggtggagcccagggtttggccatgaccagggggtcccagggggccagtgggagcactcggaacaccaccaggctgtgtgccagaatcttgaatgttcatgtgcatcatgaccacgggttccacactctggtgggaaatccggatgaccctcgggtggctggtggctggcgggggagctggacctggcgggggagccccctcagctgaggactcgacattggtagaagacggagccacggatgaggcctgcccaggaccagggggaggtgcctctgcattgggagttggggggggccgagtcccatttcctgtcatggtcacagtggttcccacattgatctgtatgggaatggctgcctgctggagcaccatgggggtggtgtagtgagacataggccggaccacatgcaggtgtcgtgggggcgtgcaggccagattgcagccaacttttttgtacaaag

SEQ ID NO: 191638 - DNA, 894 bp, Homo Sapiens
gggggactgcagctgcctcaagattctgtctcagctgaagctcctatcctgttcatcccgggagcccccttcaggagcaggaggttggacctcgggacatggcctcttctgctgttgttccaggggctggggaagcattctcccgctgaggctcaggggaagctctttctgctccctgaacttccattggctcctcaggaagtgggtgggggggatcaccaaccctgcgaacgtatctgagaatggcatcagggcctacaggcatgtgctccagtaccacctgaagcctcagtcccatcatagtggtcagccagctcaccaaggagggattcaccccacgagacatacgacgaattcggccattgataacagcagcaagctccatctgctgtccccccaagcagtgcaggtttagggccaggcattcaaacaggccttggttacacaactccagcaaccgggccccaaatccactatctgtgcaatgcagcacatgcgcagcaatgctattaaactgctcttggagaaattccaggtttgtccggatgatgtccacacctggctgaacctgcaccaaggaaaaactctcccgcacatactcttctagccccgtgatcaatgtgtgggttgccatccggatgttactgggtgtgggctcctgaccacccaggtagtgctggtggaagaaggatcgcagctggggctggagccgttgtagtggctggaaatgcccatggagaagcatcactacgtccaccatagagaagttctggcacagaagagaaagcaaggccccaaagaatccaagggccccatcagctccaggctcaaagatgttgctggatccactgaggcgttttaaggaggcagcaatacccaacttttttgtacaaa

SEQ ID NO: 191639 - DNA, 1258 bp, Homo Sapiens
ttgtacaaaaaagttggctccccgcagccatccagagacacgagcccattggaatggccaacaggggacctgcatatggcctgagccgggaggtgcagcagaagattgagaaacaatatgatgcagatctggagcagatcctgatccagtggatcaccacccagtgccgaaaggatgtgggccggccccagcctggacgcgagaacttccagaactggctcaaggatggcacggtgctatgtgagctcattaatgcactgtaccccgaggggcaggccccagtaaagaagatccaggcctccaccatggccttcaagcagatggagcagatctctcagttcctgcaagcagctgagcgctatggcattaacaccactgacatcttccaaactgtggacctctgggaaggaaagaacatggcctgtgtgcagcggacgctgatgaatctgggtgggctggcagtagcccgagatgatgggctcttctctggggatcccaactggttccctaagaaatccaaggagaatcctcggaacttctcggataaccagctgcaagagggcaagaacgtgatcgggttacagatgggcaccaaccgcggggcgtctcaggcaggcatgactggctacgggatgccacgccagatcctctgatcccaccccaggccttgcccctgccctcccacgaatggttaatatatatgtagatatatattttagcagtgacattcccagagagccccagagctctcaagctcctttctgtcagggtggggggttcagcctgtcctgtcacctctgaggtgcctgctggcatcctctcccccatgcttactaatacattcccttccccatagccatcaaaactggaccaactggcctcttcctttcccctgggaccaaaatttaggggcctcagtccctcaccgccatgccctggcctattctgtctctccttcttccccctggcctgttctgtctctgagctctgtgtcctccgttcattccatggctgggagtcactgatgctgcctctgccttctgatgctggactggccttgcttctacaagtatgcttctcccacagctgtggctgcaggaacttaatttatagggaggagcctgtggcagctgctgccccagccacagctgcactgactgtgctcaccacacatctggggcagccttccctggcagggccctcgtggcttctcattttccattcccttcactgtggctaaagggtggggtgaggggat

SEQ ID NO: 191640 - DNA, 993 bp, Homo Sapiens
ttggccccggctgggcagggcgcaccacttgcagctgcagcccttgccttgagtcagtgcgccgctctccagcccgcttgaacgctccccgcagccaccgccacccattggaatggccaacaggggacctgcatatggcctgagccgggaggtgcagcagaagattgagaaacaatatgatgcagatctggagcagatcctgatccagtggatcaccacccagtgccgaaaggatgtgggccggccccagcctggacgcgagaacttccagaactggctcaaggatggcacggtgctatgtgagctcattaatgcactgtaccccgaggggcaggccccagtaaagaagatccaggcctccaccatggccttcaagcagatggagcagatctctcagttcctgcaagcagctgagcgctatggcattaacaccactgacatcttccaaactgtggacctctgggaaggaaagaacatggcctgtgtgcagcggacgctgatgaatctgggtgggctggcagtagcccgagatgatgggctcttctctggggatcccaactggttccctaagaaatccaaggagaatcctcggaacttctcggataaccagctgcaagagggcaagaacgtgatcgggttacagatgggcaccaaccgcggggcgtctcaggcaggcatgactggctacgggatgccacgccagatcctctgatcccaccccaggccttgcccctgccctcccacgaatggttaatatatatgtagatatatattttagcagtgacattcccagagagccccagagctctcaagctcctttctgtcagggtggggggttcagcctgtcctgtcacctctgaggtgcctgctggcatcctctcccccatgcttactaatacattcccttccccatagccatcaaaactggaccaactggcctcttcctttcccctgggaccaaatttaggggcctcgttccctcaccgcatgccc

SEQ ID NO: 191641 - DNA, 986 bp, Homo Sapiens
aactttgtacaaaaaagttgggtccttgagtcagtgcgccgctctccagcccgcttgaacgctccccgcagccaccgccacccattggaatggccaacaggggacctgcatatggcctgagccgggaggtgcagcagaagattgagaaacaatatgatgcagatctggagcagatcctgatccagtggatcaccacccagtgccgaaaggatgtgggccggccccagcctggacgcgagaacttccagaactggctcaaggatggcacggtgctatgtgagctcattaatgcactgtaccccgaggggcaggccccagtaaagaagatccaggcctccaccatggccttcaagcagatggagcagatctctcagttcctgcaagcagctgagcgctatggcattaacaccactgacatcttccaaactgtggacctctgggaaggaaagaacatggcctgtgtgcagcggacgctgatgaatctgggtgggctggcagtagcccgagatgatgggctcttctctggggatcccaactggttccctaagaaatccaaggagaatcctcggaacttctcggataaccagctgcaagagggcaagaacgtgatcgggttacagatgggcaccaaccgcggggcgtctcaggcaggcatgactggctacgggatgccacgccagatcctctgatcccaccccaggccttgcccctgccctcccacgaatggttaatatatatgtagatatatattttagcagtgacattcccagagagccccagagctctcaagctcctttctgtcagggtggggggttcagcctgtcctgtcacctctgaggtgcctgctggcatcctctcccccatgcttactaatacattcccttccccatagccatcaaaactggaccaactggcctcttcctttcccctgggaccaaaatttaagggcctcagtccctcaccgccatgccctggcctattctgtc

SEQ ID NO: 191642 - DNA, 1084 bp, Homo Sapiens; identical to SEQ ID NO: 184169

SEQ ID NO: 191643 - DNA, 2253 bp, Homo Sapiens; identical to SEQ ID NO: 184170
  misc_feature (2038)..(2071): n is a, c, g, or t

SEQ ID NO: 191644 - DNA, 1034 bp, Homo Sapiens; identical to SEQ ID NO: 184172

SEQ ID NO: 191645 - DNA, 1289 bp, Homo Sapiens; identical to SEQ ID NO: 184173

SEQ ID NO: 191646 - DNA, 1972 bp, Homo Sapiens; identical to SEQ ID NO: 184175
  misc_feature (1318)..(1326): n is a, c, g, or t

SEQ ID NO: 191647 - DNA, 966 bp, Homo Sapiens; identical to SEQ ID NO: 184177
  misc_feature (128)..(173): n is a, c, g, or t
  misc_feature (217)..(226): n is a, c, g, or t
  misc_feature (258)..(280): n is a, c, g, or t

SEQ ID NO: 191648 - DNA, 1348 bp, Homo Sapiens; identical to SEQ ID NO: 184178
  misc_feature (968)..(980): n is a, c, g, or t

SEQ ID NO: 191649 - DNA, 738 bp, Homo Sapiens; identical to SEQ ID NO: 184179
  misc_feature (81)..(103): n is a, c, g, or t
  misc_feature (135)..(144): n is a, c, g, or t
  misc_feature (187)..(237): n is a, c, g, or t
  misc_feature (587)..(595): n is a, c, g, or t

SEQ ID NO: 191650 - DNA, 1195 bp, Homo Sapiens
  misc_feature (103)..(146): n is a, c, g, or t
  misc_feature (930)..(938): n is a, c, g, or t
ttggctgattgtgttctaggggacggagtaggggaagacgtttgctctcccggaacagcctatctcattcctttctttcgattacccgtggcgcggagagtcnnnnnnnnnnnnnnnnnnnnnnnnnnnnnnnnnnnnnnnnnnnnagctgcagtgacatgtccagcatgaatcccgaatatgattatttattcaagttacttctgattggcgactcaggggttggaaagtcttgccttcttcttaggtttgcagatgatacatatacagaaagctacatcagcacaattggtgtggatttcaaaataagaactatagagttagacgggaaaacaatcaagcttcaaatatgggacacagcaggccaggaaagatttcgaacaatcacctccagttattacagaggagcccatggcatcatagttgtgtatgatgtgacagatcaggagtccttcaataatgttaaacagtggctgcaggaaatagatcgttatgccagtgaaaatgtcaacaaattgttggtagggaacaaatgtgatctgaccacaaagaaagtagtagactacacaacagcgaaggaatttgctgattcccttggaattccgtttttggaaaccagtgctaagaatgcaacgaatgtagaacagtctttcatgacgatggcagctgagattaaaaagcgaatgggtcccggagcaacagctggtggtgctgagaagtccaatgttaaaattcagagcactccagtcaagcagtcaggtggaggttgctgctaaaatttgcctccatccttttctcacagcaatgaatttgcaatctgaacccaagtgaaaaaacaaaattgcctgaattgtactgtatgtagctgcactacaacagattcttaccgtctccacaaaggtcagagattgtaaatggtcaatactgacnnnnnnnnnattcccttgactcaagacagctaacttcattttcagaactgttttaaacctttgtgtgctggtttataaaataatgtgtgtaatccttgttgctttcctgataccagactgtttcccgtggttggttagaatatattttgttttgatgtttatattggcatgtttagatgtcaggtttagtcttctgaggatgaagttcagccattttgtatcaaacagcacaagcagtgtctgtcactttccatgcataaagttta

SEQ ID NO: 191651 - DNA, 1425 bp, Homo Sapiens
  misc_feature (966)..(974): n is a, c, g, or t
ttgtacaaaaaagttggatagctgagtcggcaagcggctgctgattgtgttctaggggacggagtaggggaagacgtttgctctcccggaacagcctatctcattcctttctttcgattacccgtggcgcggagagtcagggcggcggctgcggcagcaagggcggcggtggcggcggcggcagctgcagtgacatgtccagcatgaatcccgaatatgattatttattcaagttacttctgattggcgactcaggggttggaaagtcttgccttcttcttaggtttgcagatgatacatatacagaaagctacatcagcacaattggtgtggatttcaaaataagaactatagagttagacgggaaaacaatcaagcttcaaatatgggacacagcaggccaggaaagatttcgaacaatcacctccagttattacagaggagcccatggcatcatagttgtgtatgatgtgacagatcaggagtccttcaataatgttaaacagtggctgcaggaaatagatcgttatgccagtgaaaatgtcaacaaattgttggtagggaacaaatgtgatctgaccacaaagaaagtagtagactacacaacagcgaaggaatttgctgattcccttggaattccgtttttggaaaccagtgctaagaatgcaacgaatgtagaacagtctttcatgacgatggcagctgagattaaaaagcgaatgggtcccggagcaacagctggtggtgctgagaagtccaatgttaaaattcagagcactccagtcaagcagtcaggtggaggttgctgctaaaatttgcctccatccttttctcacagcaatgaatttgcaatctgaacccaagtgaaaaaacaaaattgcctgaattgtactgtatgtagctgcactacaacagattcttaccgtctccacaaaggtcagagattgtaaatggtcaatactgacnnnnnnnnnattcccttgactcaagacagctaacttcattttcagaactgttttaaacctttgtgtgctggtttataaaataatgtgtgtaatccttgttgctttcctgataccagactgtttcccgtggttggttagaatatattttgttttgatgtttatattggcatgtttagatgtcaggtttagtcttctgaagatgaagttcagccattttgtatcaaacagcacaagcagtgtctgtcactttccatgcataaagtttagtgagatgttatatgtaagatctgatttgctagttcttccttgtagagttataaatggaaagattacactatctgattaatagtttcttcatactctgcatataatttgtggctgcagaatattgtaatttgttgcacactatgtaacaaaacaactgaagatatgtttaataaatattgtacttattggaagt

SEQ ID NO: 191652 - DNA, 1202 bp, Homo Sapiens
  misc_feature (129)..(172): n is a, c, g, or t
  misc_feature (956)..(964): n is a, c, g, or t
ttggaagcgatagctgagtggcggcggctgctgattgtgttctaggggacggagtaggggaagacgtttgctctcccggaacagcctatctcattcctttctttcgattacccgtggcgcggagagtcnnnnnnnnnnnnnnnnnnnnnnnnnnnnnnnnnnnnnnnnnnnnagctgcagtgacatgtccagcatgaatcccgaatatgattatttattcaagttacttctgattggcgactcaggggttggaaagtcttgccttcttcttaggtttgcagatgatacatatacagaaagctacatcagcacaattggtgtggatttcaaaataagaactatagagttagacgggaaaacaatcaagcttcaaatatgggacacagcaggccaggaaagatttcgaacaatcacctccagttattacagaggagcccatggcatcatagttgtgtatgatgtgacagatcaggagtccttcaataatgttaaacagtggctgcaggaaatagatcgttatgccagtgaaaatgtcaacaaattgttggtagggaacaaatgtgatctgaccacaaagaaagtagtagactacacaacagcgaaggaatttgctgattcccttggaattccgtttttggaaaccagtgctaagaatgcaacgaatgtagaacagtctttcatgacgatggcagctgagattaaaaagcgaatgggtcccggagcaacagctggtggtgctgagaagtccaatgttaaaattcagagcactccagtcaagcagtcaggtggaggttgctgctaaaatttgcctccatccttttctcacagcaatgaatttgcaatctgaacccaagtgaaaaaacaaaattgcctgaattgtactgtatgtagctgcactacaacagattcttaccgtctccacaaaggtcagagattgtaaatggtcaatactgacnnnnnnnnnattcccttgactcaagacagctaacttcattttcagaactgttttaaacctttgtgtgctggtttataaaataatgtgtgtaatccttgttgctttcctgataccagactgtttcccgtggttggttagaatatattttgttttgatgtttatattggcatgtttagatgtcaggttttaatcttctgaagatgaaattcagcccattttgtatcaaacagcacaagcagtgtctgtc

SEQ ID NO: 191653 - DNA, 709 bp, Homo Sapiens
gagagaatcccactttcttgctgttgtgatggtggtaagggaacgggcctggctctggcccctgatgcaggaacatggagctgatccaggacacctcccgcccgccactggagtacgtgaagggggtcccgctcatcaagtactttgcagaggcactggggcccctgcagagcttccaggcccgacctgatgacctgctcatcaacacctaccccaagtctggcaccacctgggtgagccagatactggacatgatctaccagggcggcgacctagagaagtgtaaccgggctcccatctacgtacgggtgcccttccttgaggtcaatgatccaggggaaccctcagggctggagactctgaaagacacaccgcccccacggctcatcaagtcacacctgcccctggctctgctccctcagactctgttggatcagaaggtcaaggtggtctatgttgcccgaaacccaaaggacgtggcggtctcctactaccatttccaccgtatggaaaaggcgcaccctgagcctgggacctgggacagcttcctggaaaagttcatggctggagaagtgtcctacgggtcctggtaccagcacgtgcaggagtggtgggagctgagccgcacccaccctgttctctacctcttctatgaagacatgaaggagaaccccaaaaggagattcaaaagatcctggagtttgtgggg

SEQ ID NO: 191654 - DNA, 927 bp, Homo Sapiens
ctttgtacaaaaaagttggagacaggagaggggcacgtaccggcgctacggcttcctgcaggctgcctccggatagtccccgagagcttgttccgaagcaagcaccctgcagccctagcgatccagccctcccctggaccctaggtcacggcaatcaaccccctgctgtggttcccgaaccccaaggcccgatgggtcccgcgggggtcgcggcgaggccagggcgctttttcggcgtctacctgctctactgcctgaacccccggtaccggggccgcgtctacgtggggttcactgtcaacactgctcgtcgggtccagcagcacaatgggggccgcaaaaaaggcggggcctggcggaccagcgggcgagggccctgggagatggtgctcgtcgtgcacggcttcccgtcctccgtggccgcccttcggtttgagtgggcttggcagcacccgcacgcctcgcgccgcctggcgcacgtggggcctcgcctgcgaggagagacagccttcgctttccacctgcgcgtgctggcgcacatgctgcgcgcaccgccctgggctcgcctcccgctcacgctgcgctgggtgcgcccagacctccgccaggacctctgcctcccgccgccgccgcacgtgcctctggccttcgggcctccaccgccccaggccccggccccaaggcgccgcgcaggtccctttgatgacgcggagcctgagccagaccagggggatccaggggcctgctgctccctgtgcgcccagaccatccaagatgaagaggggcccttgtgttgcccccaccctggctgcctgctaagggcccatgtgatctgcctggcaaaggagtttcttccaggagaaccagggcagcttctgcccctaaagggccaatgcccttgctgtgagaaatcactgcttttgggga

SEQ ID NO: 191655 - DNA, 1443 bp, Homo Sapiens
ttggcttgcctcccgctatgccagcccggagatgtgcttcgtgtttagcgacaggtataaattccggacatggcggcagctgtggctgtggctggcggaggccgagcagacattgggtttgcctatcacagatgaacaaatccaggagatgaaatcaaacctggagaacatcgacttcaagatggcagctgaggaagagaaacgtttacgacatgatgtgatggctcacgtgcacacatttggccactgctgtccaaaagctgcaggcattattcaccttggtgctacttcttgctatgttggagacaatactgacttgattattcttagaaatgcacttgacctgcttttgccaaagcttgccagagtgatctctcggcttgccgactttgctaaggaacgagccagtctacccacattaggtttcacacatttccagcctgcacagctgaccacagttgggaaacgttgctgtctttggattcaggatctttgcatggatctccagaacttgaagcgtgtccgagatgacctgcgcttccggggagtaaagggtaccactggcactcaggccagtttcctgcagctctttgagggagatgaccataaggtagagcagcttgacaagatggtgacagaaaaggcaggatttaagagagctttcatcatcacagggcagacatatacacgaaaagtggatattgaagtactgtctgtgctggctagcttgggggcatcagtgcacaagatttgcaccgacatacgcctcctggcaaacctcaaggagatggaggaaccctttgaaaaacagcagattggctcaagtgcgatgccatataagcggaatcccatgcgttcagaacgttgctgcagtcttgcccgccacctgatgacccttgtcatggacccgctacagacagcatctgtccagtggtttgaacgcacactggatgatagtgccaaccgacggatctgtttggccgaggcatttcttaccgcagatactatattgaatacgctgcagaacatttctgaaggattggtcgtgtaccccaaagtaattgaacggcgcattcggcaagagctgcctttcatggccacagagaacatcatcatggccatggtcaaagctggaggtagccgccaggattgccatgagaaaatcagagtgctttctcagcaggcagcttctgtggttaagcaggaagggggtgacaatgacctcatagagcgtatccaggttgatgcctacttcagtcccattcactcccagttggatcatttactggatccttcttctttcactggtcgtgcctcccagcaggtgcagagattcttagaagaggaggtgtatcccctgttaaaaccatatgaaagcgtgatgaaggtgaaagcagaattatgtctgtagagttggaagagaattaaacgaaaatcattgtt

SEQ ID NO: 191656 - DNA, 902 bp, Homo Sapiens; identical to SEQ ID NO: 184183

SEQ ID NO: 191657 - DNA, 1181 bp, Homo Sapiens; identical to SEQ ID NO: 184185
  misc_feature (374)..(437): n is a, c, g, or t

SEQ ID NO: 191658 - DNA, 625 bp, Homo Sapiens
  misc_feature (540)..(559): n is a, c, g, or t
ctttgtacaaaaaagttggcgtagcacaagtgattggagtagaacatgtcactgctgtacatttttaactcccctaatggtgtgtctataattgttaaatctaagtgcttcctctcagtaaagcctcctggcaccaggccttcctgctcgactgaaaaaaattttctctttgaaaatccccttttactcatggcccacagtagaatatccaaaacgccttggctttcaggcctggcctttcctacagggagctcagtaacctggacggctctaaggctggaatgaccacataggtaggtatggtgagttcaaccatttttgctcttgaattgatgcccttcgatgtatgccatttagtgaaagtgctaagtcttaagtttcctaccactttggtttcatatttttggacttaacaaagttgtgaatagcacagtcgaggaaaattgatacctgcagtaacccataggaaataaactgtagagttccatattctggtattgtgattatattgttttatattaacaaagaaaagaaaagaannnnnnnnnnnnnnnnnnnnccccgtcttgcaaagtatagtgacccctgtttccattaaatttgaataaagactatttttgcttga

SEQ ID NO: 191659 - DNA, 1650 bp, Homo Sapiens; identical to SEQ ID NO: 184186
  misc_feature (101)..(139): n is a, c, g, or t
  misc_feature (407)..(416): n is a, c, g, or t
  misc_feature (1434)..(1493): n is a, c, g, or t

SEQ ID NO: 191660 - DNA, 1271 bp, Homo Sapiens; identical to SEQ ID NO: 180222
  misc_feature (296)..(305): n is a, c, g, or t

SEQ ID NO: 191661 - DNA, 1146 bp, Homo Sapiens; identical to SEQ ID NO: 184188

SEQ ID NO: 191662 - DNA, 1250 bp, Homo Sapiens; identical to SEQ ID NO: 184189

SEQ ID NO: 191663 - DNA, 988 bp, Homo Sapiens
caaattgatgagcaatgcttttcctttaatagcgcaactttgtacaaaaaagttgggacggaggtccgtcctctttccttgcctaacgcagccatggctcgtggtcccaagaagcatctgaagcgggtggcagctccaaagcattggatgctggataaattgaccggtgtgtttgctcctcgtccatccaccggtccccacaagttgagagagtgtctccccctcatcattttcctgaggaacagacttaagtatgccctgacaggagatgaagtaaagaagatttgcatgcagcggttcattaaaatcgatggcaaggtccgaactgatataacctaccctgctggattcatggatgtcatcagcattgacaagacgggagagaatttccgtctgatctatgacaccaagggtcgctttgctgtacatcgtattacacctgaggaggccaagtacaagttgtgcaaagtgagaaagatctttgtgggcacaaaaggaatccctcatctggtgactcatgatgcccgcaccatccgctaccccgatcccctcatcaaggtgaatgataccattcagattgatttagagactggcaagattactgatttcatcaagttcgacactggtaacctgtgtatggtgactggaggtgctaacctaggaagaattggtgtgatcaccaacagagagaggcaccctggatcttttgacgtggttcacgtgaaagatgccaatggcaacagctttgccactcgactttccaacatttttgttattggcaagggcaacaaaccatggatttctcttccccgaggaaagggtatccgcctcaccattgctgaagagagagacaaaagactggcggccaaacagagcagtgggtgaaatgggtccctgggtgacatgtcagatctttgtacgtaattaaaaatattgtggcaggattaatagcacaaaaaacacaagaaaaacccaactttcttgtcaa

SEQ ID NO: 191664 - DNA, 772 bp, Homo Sapiens
ctttgtacaaaaaagttggctccttttaagccagaaacgtagcctgagctcctgaagagttcctgggagatttgagctgattttggagatgaagtaaagaagatttgcatgcagcggttcattaaaatcgatggcaaggtccgaactgatataacctaccctgctggattcatggatgtcatcagcattgacaagacgggagagaatttccgtctgatctatgacaccaagggtcgctttgctgtacatcgtattacacctgaggaggccaagtacaagttgtgcaaagtgagaaagatctttgtgggcacaaaaggaatccctcatctggtgactcatgatgcccgcaccatccgctaccccgatcccctcatcaaggtgaatgataccattcagattgatttagagactggcaagattactgatttcatcaagttcgacactggtaacctgtgtatggtgactggaggtgctaacctaggaagaattggtgtgatcaccaacagagagaggcaccctggatcttttgacgtggttcacgtgaaagatgccaatggcaacagctttgccactcgactttccaacatttttgttattggcaagggcaacaaaccatggatttctcttccccgaggaaagggtatccgcctcaccattgctgaagagagagacaaaagactggcggccaaacagagcagtgggtgaaatgggtccctgggtgacatgtcagatctttgtacgtaattaaaaatattgtggcaggattaatagc

SEQ ID NO: 191665 - DNA, 749 bp, Homo Sapiens
ataaagccacctttgtacaaaaaagttggaacgcagccatggctcgtggtcccaagaagcatctgaagcgggtggcagctccaaagcattggatgctggataaattgaccggtgtgtttgagatgaagtaaagaagatttgcatgcagcggttcattaaaatcgatggcaaggtccgaactgatataacctaccctgctggattcatggatgtcatcagcattgacaagacgggagagaatttccgtctgatctatgacaccaagggtcgctttgctgtacatcgtattacacctgaggaggccaagtacaagttgtgcaaagtgagaaagatctttgtgggcacaaaaggaatccctcatctggtgactcatgatgcccgcaccatccgctaccccgatcccctcatcaaggtgaatgataccattcagattgatttagagactggcaagattactgatttcatcaagttcgacactggtaacctgtgtatggtgactggaggtgctaacctaggaagaattggtgtgatcaccaacagagagaggcaccctggatcttttgacgtggttcacgtgaaagatgccaatggcaacagctttgccactcgactttccaacatttttgttattggcaagggcaacaaaccatggatttctcttccccgaggaaagggtatccgcctcaccattgctgaaaacagagacaaaagactggcggccaacagagcagtgggtgaaatgggttccc

SEQ ID NO: 191666 - DNA, 809 bp, Homo Sapiens
tttgtacaaaaaagttggggcagctcccactgcaaaagagatgctggataaattgaccggtgtgtttgctcctcgtccatccaccggtccccacaagttgagagagtgtctccccctcatcattttcctgaggaacagacttaagtatgccctgacaggagatgaagtaaagaagatttgcatgcagcggttcattaaaatcgatggcaaggtccgaactgatataacctaccctgctggattcatggatgtcatcagcattgacaagacgggagagaatttccgtctgatctatgacaccaagggtcgctttgctgtacatcgtattacacttgatgaggccaagtacaagttgtgcaaagtgagaaagatctttgtgggcacaaaaggaatccctcatctggtgactcatgatgcccgcaccatccgctaccccgatcccctcatcaaggtgaatgataccattcagattgatttagagactggcaagattactgatttcatcaagttcgacactggtaacctgtgtatggtgactggaggtgctaacctaggaagaattggtgtgatcaccaacagagagaggcaccctggatcttttgacgtggttcacgtgaaagatgccaatggcaacagctttgccactcgactttccaacatttttgttattggcaagggcaacaaaccatggatttctcttccccgaggaaagggtatccgcctcaccattgctgagagagagacaaaagactggcggcaaacagagcagtgggtgaatgggtccctgggtgacatgtcagatctttgta

SEQ ID NO: 191667 - DNA, 1946 bp, Homo Sapiens; identical to SEQ ID NO: 184190

SEQ ID NO: 191668 - DNA, 1431 bp, Homo Sapiens
tcccaggcccaagtccccgggaggccgccgtgggggcaagagctgggcccggagaggcccctgggaggcaagggcggggcctgcagaggctgttctccaaccagtgctagaactgtacaggccaccaggaggcaggaggtgggccctcagagcttggctggagaaagttcggggcctacaaaggcggttgggagctgggcaggagttgagccaaaagagcctgcttacttgccgggaggcagggccaggagagcccgactccaggacaacttgggcctgcggcggtcgccgggaggcccaaccttggcgtggaggagcccaccgaccggagaccatttggggcctggagatgccatcggagggcaggagctcatcctggagaggccaccgtgaggcctgacctgggcctggggagcttggcttgaggaagctgtggaccgaccaaggccaccaggagatgggtaggcactgagtccaaagaggttgttgagaggcaggagtcgggcctggagacgcaaccaggaagaagagctgggcccggagagaacgcccggagggtgcaagtgggtctggagaggccgacttgaggaggttctgggcccggagaggccgctggaagggaaaaactggccctggaaaggccgttgtgaggaacgagccccatgggcctgaagaggccactggcaggtgggagctgggcctgccgaagcggccgagaggcaggagctttggactcgggaggccgcaatgaggcgacagctagctgggcgtggagagtccgctgtgaggcagaggctgggcctgtgcaggccttcgggaggcaggaggctgggccttgtcgaggcccgcagaggccaccgaaagtcaaaagcggggcttgggaaggccgctgggaggcatgagctgggctgggccgaaagaggccactgggaggcaggaggagctgggcctggagaggctgccgaaaggcaggagcttcaaccgaggatgccacagtgagacaccatctgggtccggagggtccactgtgaggcagaggctggcctgtagagtccgacagtagacagaagttgggcaaaaggctgatttgaggaagttttgggcttcaagagtcagccacgaggcaggcactaggcctggaaatggcccgacagtcatgagttgggcctaaatgggccactgtgagggaggagctatgcctgttgaggctgctggcaggcaggcagaaatttggcctggggcagctgccatgaggcaagagctgggcctggaaaaagcccctgggaggcaagagcagggcctgcagaggctgttctcaagtcaaagctgggcctgttcatgccactgggaagcagaaggtgggcctggagagtttgacttgaggaagttttgggcctacattggccgccatgagctggacaggaactccaa

SEQ ID NO: 191669 - DNA, 1114 bp, Homo Sapiens; identical to SEQ ID NO: 184191
  misc_feature (122)..(178): n is a, c, g, or t

SEQ ID NO: 191670 - DNA, 840 bp, Homo Sapiens
ttggctctccaggatgagctcctgccctccgatggcatctccaggccccaaatggtctccggtcggtgggctcctccacgccaaggttgggcctcccggcgaccgccgcaggcccaagttgtcctgaagtcgggctctcccggctgcatctccagggcggactctggcccgactccaggtcccaacaacgtctttggactcagctcctgcccagctcccagcggccctggtaggcccacaacttccctaagccaagctccccaggcccagctcaggcctcgcggtggcctctccaggctcagctcctggccctccgatgacatctgcaggccccaaacggcctccggtcggtgggctcctctaggcccagcttgggcctcccggcggcctccgcaggcccaaatcgtcccgaagtcagtctctccaggcttagctccagcctcccggcggcctctgcaggcccaagtcgtcctcaagtcggcctggaagtgggcctggaagagcagcaagtcggcctccccgggcccagctccgtcctctcggcggcctctccaggtgcaaaacttcctcgagtcagcctctccaggcccagctcctcctgcctcccagtggcctctttcggcccagcccagctcatggctctcggcggccttcccaggccccgcttttgacttttggcagcctcttcaggcgcagaacttgatctccaagcggcctttgcaggcccggcctcctgcctctcgaaaggcctgcacgggcccggcctcggcctcagcctcacagcggacttctccacggcccagctagctctcgcctcactgcgggtctccccagtccaaa

SEQ ID NO: 191671 - DNA, 4501 bp, Homo Sapiens; identical to SEQ ID NO: 184193
  misc_feature (4339)..(4361): n is a, c, g, or t

SEQ ID NO: 191672 - DNA, 1602 bp, Homo Sapiens; identical to SEQ ID NO: 184194
  misc_feature (727)..(749): n is a, c, g, or t
  misc_feature (1026)..(1075): n is a, c, g, or t

SEQ ID NO: 191673 - DNA, 1501 bp, Homo Sapiens; identical to SEQ ID NO: 184196
  misc_feature (677)..(689): n is a, c, g, or t
  misc_feature (1096)..(1157): n is a, c, g, or t

SEQ ID NO: 191674 - DNA, 2258 bp, Homo Sapiens; identical to SEQ ID NO: 180224
  misc_feature (141)..(169): n is a, c, g, or t
  misc_feature (386)..(500): n is a, c, g, or t

SEQ ID NO: 191675 - DNA, 1036 bp, Homo Sapiens; identical to SEQ ID NO: 184199

SEQ ID NO: 191676 - DNA, 1472 bp, Homo Sapiens; identical to SEQ ID NO: 180225

SEQ ID NO: 191677 - DNA, 2073 bp, Homo Sapiens; identical to SEQ ID NO: 184201

SEQ ID NO: 191678 - DNA, 1076 bp, Homo Sapiens; identical to SEQ ID NO: 180226

SEQ ID NO: 191679 - DNA, 908 bp, Homo Sapiens
tttgtacaaaaaagttggtggggattcggcctcggcctcgctgtcttctgcagccgctactggaacctccacctcgactccagcggccccgacagcacggaagcagctggataaagaacaggttagaaaggcagtggacgctctcttgacgcattgcaagtccaggaaaaacaattatgggttgcttttgaatgagaatgaaagtttatttttaatggtggtattatggaaaattccaagtaaagaactgagggtcagattgaccttgcctcatagtattcgatcagattcagaagatatctgtttatttacgaaggatgaacccaattcaactcctgaaaagacagaacagttttatagaaagcttttaaacaagcatggaattaaaaccgtttctcagattatctccctccaaactctaaagaaggaatataaatcctatgaagccaagctccgccttctgagcagttttgatttcttccttactgatgccagaattaggcggctcttaccctcactcattgggagacatttctatcaaagaaagaaagttccagtatctgtaaaccttctgtccaagaatttatcaagagagatcaatgactgtataggtggaacggtcttaaacatttctaaaagtggttcttgcagtgctatacgtattggtcacgttggaatgcaaattgagcacatcattgaaaacattgttgctgtcaccaaaggactttcagaaaaattgccagagaagtgggagagcgtgaaactcctgtttgtgaaaactgagaaatcggctgcacttcccatcttttcctcgtttgtcagcaattgggatgaagccaccaaaagatctttgcttaataagaaaaaaaagaggcaaggagaaaacgaagagaaagaaattttgaaaa

SEQ ID NO: 191680 - DNA, 1102 bp, Homo Sapiens; identical to SEQ ID NO: 184205
  misc_feature (127)..(148): n is a, c, g, or t
  misc_feature (206)..(214): n is a, c, g, or t
  misc_feature (685)..(725): n is a, c, g, or t

SEQ ID NO: 191681 - DNA, 1074 bp, Homo Sapiens; identical to SEQ ID NO: 180228

SEQ ID NO: 191682 - DNA, 886 bp, Homo Sapiens
ttggccatattcatcaccactagtcttttcccacccaacctctgcaggatgtgaagtgatagctgtgaatacccgctccacgagtcaaacctttatttataaatgcgacgcagttctctgtacccttcccctgggtgtgctgaagcagcagccaccagccgttcagtttgtgccacctctccctgagtggaaaacatctgcagtccaaaggatgggatttggcaaccttaacaaggtggtgttgtgttttgatcgggtgttctgggatccaagtgtcaatttgttcgggcatgttggcagtacgactgccagcaggggtgagctcttcctcttctggaacctctataaagctccaatactgttggcactagtggcaggagaagctgctggtatcatggaaaacataagtgacgatgtgattgttggccgatgcctggccattctcaaagggatttttggtagcagtgcagtacctcagcccaaagaaactgtggtgtctcgttggcgtgctgatccctgggctcggggctcttattcctatgttgctgcaggatcatctggaaatgactatgatttaatggctcagccaatcactcctggcccctcgattccaggtgccccacagccgattccacgactcttctttgcgggagaacatacgatccgtaactacccagccacagtgcatggtgctctgctgagtgggctgcgagaagcgggaagaattgcagaccagtttttgggggccatgtatacgctgcctcgccaggccacaccaggtgttcctgcacagcagtctcccagcatgtgagacaaatgcattctaaagggaagaaggccatgtgcctgtttctgccatgtaaaggaggctcttctagcaatacta

SEQ ID NO: 191683 - DNA, 2599 bp, Homo Sapiens; identical to SEQ ID NO: 184207

SEQ ID NO: 191684 - DNA, 806 bp, Homo Sapiens
gagcaatgctttcattataatagccaactttgtacaaaaaagttggctctgattgcgagtacatgatcccctgtgagaaggtgtccaccctgcccgcgatcacactgaagctgggaggcaaaggctacaagctgtccccagaggactacacgctcaaggtgtcgcaggccgggaagaccctctgcctgagcggcttcatgggcatggacatcccgccacccagcgggccactctggatcctgggcgacgtcttcatcggccgctactacactgtgtttgaccgtgacaacaacagggtgggcttcgccgaggctgcccgcctctagttcccaaggcgtccgcgcgccagcacagaaacagaggagagtcccagagcaggaggcccctggcccagcggcccctcccacacacacccacacactcgcccgcccactgtcctgggcgccctggaagccggcggcccaagcccgacttgctgttttgttctgtggttttcccctccctgggttcagaaatgctgcctgcctgtctgtctctccatctgtttggtgggggtagagctgatccagagcacagatctgtttcgtgcattggaagaccccacccaagcttggcagccgagctcgtgtatcctggggctcccttcatctccagggagtcccctccccggccctaccagcgcccgctgggctgagcacctaccccacaccaggccgtcctccccgggcgctcccttggaaacctgccctgccctgaggggcgcctctgcccaccttgtgcccagctgggctctgccaccctacctg

SEQ ID NO: 191685 - DNA, 1725 bp, Homo Sapiens
ttggctgatccggcccaactgcggcgtcatcccggctataagcgcacggcctcggcgaccctctccgacccggccgccgccgccatgcagccctccagccttctgccgctcgccctctgcctgctggctgcacccgcctccgcgctcgtcaggatcccgctgcacaagttcacgtccatccgccggaccatgtcggaggttgggggctctgtggaggacctgattgccaaaggccccgtctcaaagtactcccaggcggtgccagccgtgaccgaggggcccattcccgaggtgctcaagaactacatggacgcccagtactacggggagattggcatcgggacgcccccccagtgcttcacagtcgtcttcgacacgggctcctccaacctgtgggtcccctccatccactgcaaactgctggacatcgcttgctggatccaccacaagtacaacagcgacaagtccagcacctacgtgaagaatggtacctcgtttgacatccactatggctcgggcagcctctccgggtacctgagccaggacactgtgtcggtgccctgccagtcagcgtcgtcagcctctgccctgggcggtgtcaaagtggagaggcaggtctttggggaggccaccaagcagccaggcatcaccttcatcgcagccaagttcgatggcatcctgggcatggcctacccccgcatctccgtcaacaacgtgctgcccgtcttcgacaacctgatgcagcagaagctggtggaccagaacatcttctccttctacctgagcagggacccagatgcgcagcctgggggtgagctgatgctgggtggcacagactccaagtattacaagggttctctgtcctacctgaatgtcacccgcaaggcctactggcaggtccacctggaccaggtggaggtggccagcgggctgaccctgtgcaaggagggctgtgaggccattgtggacacaggcacttccctcatggtgggcccggtggatgaggtgcgcgagctgcagaaggccatcggggccgtgccgctgattcagggcgagtacatgatcccctgtgagaaggtgtccaccctgcccgcgatcacactgaagctgggaggcaaaggctacaagctgtccccagaggactacacgctcaaggtgtcgcaggccgggaagaccctctgcctgagcggcttcatgggcatggacatcccgccacccagcgggccactctggatcctgggcgacgtcttcatcggccgctactacactgtgtttgaccgtgacaacaacagggtgggcttcgccgaggctgcccgcctctagttcccaaggcgtccgcgcgccagcacagaaacagaggagagtcccagagcaggaggcccctggcccagcggcccctcccacacacacccacacactcgcccgcccactgtcctgggcgccctggaagccggcggcccaagcccgacttgctgttttgttctgtggttttcccctccctgggttcagaaatgctgcctgcctgtctgtctctccatctgtttggtgggggtagagctgatccacagcacagatctgtttcgtgcattggaagaccccacccaagcttggcagccgagctcgtgtatcctggggctcccttcatctccagggagtcccctccccggccctaccaccgcccgctgggctgagcccctaccccacaccaaggccgtcctcccgggg

SEQ ID NO: 191686 - DNA, 957 bp, Homo Sapiens; identical to SEQ ID NO: 184209
  misc_feature (323)..(348): n is a, c, g, or t

SEQ ID NO: 191687 - DNA, 1206 bp, Homo Sapiens; identical to SEQ ID NO: 180230
  misc_feature (176)..(193): n is a, c, g, or t
  misc_feature (924)..(954): n is a, c, g, or t

SEQ ID NO: 191688 - DNA, 1206 bp, Homo Sapiens; identical to SEQ ID NO: 180230
  misc_feature (176)..(193): n is a, c, g, or t
  misc_feature (924)..(954): n is a, c, g, or t

SEQ ID NO: 191689 - DNA, 1194 bp, Homo Sapiens; identical to SEQ ID NO: 180232
  misc_feature (157)..(174): n is a, c, g, or t
  misc_feature (904)..(935): n is a, c, g, or t

SEQ ID NO: 191690 - DNA, 1208 bp, Homo Sapiens; identical to SEQ ID NO: 180233
  misc_feature (175)..(192): n is a, c, g, or t
  misc_feature (923)..(953): n is a, c, g, or t

SEQ ID NO: 191691 - DNA, 1277 bp, Homo Sapiens; identical to SEQ ID NO: 184210

SEQ ID NO: 191692 - DNA, 1205 bp, Homo Sapiens; identical to SEQ ID NO: 184211

SEQ ID NO: 191693 - DNA, 1460 bp, Homo Sapiens; identical to SEQ ID NO: 180235
  misc_feature (459)..(506): n is a, c, g, or t

SEQ ID NO: 191694 - DNA, 958 bp, Homo Sapiens
actttgtacaaaaaagttggcagtaatgtatcctatctctctttacattttggtctgtatactacattattaatgggttttgtgtactgtaaagaatttagctgtatcaaactagtgcatgaatagattctctcctgattatttatcacatagccccttagccagttgtatattattcttgtggtttgtgacccaattaagtcctactttacatatgctttaagaatcgatgggggatgcttcatgtgaacgtgggagttcagctgcttctcttgcctaagtattcctttcctgatcactatgcattttaaagttaaacatttttaagtatttcagatgctttagagagattttttttccatgactgcattttactgtacagattgctgcttctgctatatttgtgatataggaattaagaggatacacacgtttgtttcttcgtgcctgttttatgtgcacacattaggcattgagacttcaagcttttctttttttgtccacgtatctttgggtctttgataaagaaaagaatccctgttcattgtaagcacttttacggggcgggtggggaggggtgctctgctggtcttcaattaccaagaattctccaaaacaattttctgcaggatgattgtacagaatcattgcttatgacatgatcgctttctacactgtattacataaataaattaaataaaataaccccgggcaagacttttctttgaaggatgactacagacattaaataatcgaagtaattttgggtggggagaagaggcagattcaattttctttaaccagtctgaagtttcatttatgatacaaaagaagatgaaaatggaagtggcaatataaggggatgaggaaggcatgcctggacaaacccttcttttaagatgtgtcttcaatttgtataaaatggtgttttcatgtaaataaatacattcttggagga

SEQ ID NO: 191695 - DNA, 1199 bp, Homo Sapiens; identical to SEQ ID NO: 184215
  misc_feature (947)..(981): n is a, c, g, or t

SEQ ID NO: 191696 - DNA, 2412 bp, Homo Sapiens; identical to SEQ ID NO: 184216
  misc_feature (195)..(229): n is a, c, g, or t

SEQ ID NO: 191697 - DNA, 977 bp, Homo Sapiens
ctttgtacaaaaaagttgggtcaccccagagcagcgccacctgtccaagatgcagcagaacggctacgaaaatccaacctacaagttctttgagcagatgcagaactagacccccgccacagcagcctctgaagttggacagcaaaaccattgcttcactacccatcggtgtccatttatagaataatgtgggaagaaacaaacccgttttatgatttactcattatcgccttttgacagctgtgctgtaacacaagtagatgcctgaacttgaattaatccacacatcagtaatgtattctatctctctttacattttggtctctatactacattattaatgggttttgtgtactgtaaagaatttagctgtatcaaactagtgcatgaatagattctctcctgattatttatcacatagccccttagccagttgtatattattcttgtggtttgtgacccaattaagtcctactttacatatgctttaagaatcgatgggggatgcttcatgtgaacgtgggagttcagctgcttctcttgcctaagtattcctttcctgatcactatgcattttaaagttaaacatttttaagtatttcagatgctttagagagattttttttccatgactgcattttactgtacagattgctgcttctgctatatttgtgatataggaattaagaggatacacacgtttgtttcttcgtgcctgttttatgtgcacacattaggcattgagacttcaagcttttctttttttgtccacgtatctttgggtctttgataaagaaaagaatccctgttcattgtaagcacttttacggggcgggtggggaggggtgctctgctggtcttcaattaccaagaattctccaaaacattttctgcagatgattgtacagaatcatttgcttatgacatgatcgcctttctacactgtattacataaataaattaaataaaataccccc

SEQ ID NO: 191698 - DNA, 968 bp, Homo Sapiens
gctcaaagaactgtaggtggattttcgtagccgtctgctgcatcttggacaggtggcgctctctggggtgacagcggcgtcacctccaccacaccatgatgaatggatgtgtactgtttcttcttcagcatcaccaaaggtgatgacgatcactgtcgctatgacaacaccgcccaccatgagtccaatgattgcacctttgtttgaacccacatcttctgcaaagaacaccaatttttgatgatgaacttcatatcctgagtcatgtcggaattctgcatccatcttcacttcagagatctcctccgtcttgatatttgtcaacccagaaccttcgttttctgtgttggctggcacagagtcagccccaaaagaatgccacggctggagatcgtccaggctgaactctccattcacgggaaggagctccacggtggttttcgtttcggtcaaagatggcatgagagcatcgtttccgtaactgatccttggttcactaatcatgttggccaagacgtcatctgaatagttttgctctttctgaagcagctcatcaacttcatcctgaatctcctcggccactgcaggcacgttgtagagcagggagagagactgattcatgcgctcataaatcacacggaggtgtgtcataacctgggaccggatctgagcggctttcttgggatccaccatgcgcacatgctcgaaatgctttagggtgtgctgtctgtccttctgttctgcgcggacatacttctttagcatattgaacacgtgacgaggccgaggaggaacagcctgcagagcggtgatgtagttctccagggccaggcggcggcggtcattgagcatggcttccactctggccatgtgtgtctccaccagctgctgtctctcgttggctgcttcctgttccaaagattccactttctcctggaaatgctggatccaacttttttgtacaaagt

SEQ ID NO: 191699 - DNA, 2239 bp, Homo Sapiens; identical to SEQ ID NO: 180237
  misc_feature (412)..(463): n is a, c, g, or t
  misc_feature (567)..(600): n is a, c, g, or t

SEQ ID NO: 191700 - DNA, 1883 bp, Homo Sapiens; identical to SEQ ID NO: 184217
  misc_feature (1749)..(1779): n is a, c, g, or t

SEQ ID NO: 191701 - DNA, 1464 bp, Homo Sapiens; identical to SEQ ID NO: 184218
  misc_feature (258)..(268): n is a, c, g, or t
  misc_feature (604)..(633): n is a, c, g, or t

SEQ ID NO: 191702 - DNA, 1007 bp, Homo Sapiens
  misc_feature (470)..(480): n is a, c, g, or t
  misc_feature (816)..(845): n is a, c, g, or t
ggaggacggtacaaaatccattaggactttaacttatgtacaaaagtgggattttgattcctttttcattcaggcggcagtgtccctttttatatcatgctagggttgagacatacttgactaacttgggaaacagttcgatatattgacaaccgtcaacttaagaaaatcaacagcttttggccccagcgtccaagtgaacttttcatggagtgcagaatctcaaatggacaaaatactttgtctttttaaatactgaaaatttaattattagtactatgactgaaagattcttcatggctaaaaagctctgcatcaaactcaattcaggaggccttccctccccaccaccatcaacctcttcaaaacctactccctccctctaagtatctctcaacacagtatgtctggggctagatttcaaaacccacgtaatgaaaaagtcagttttacaagcctaattttgttgnnnnnnnnnnnatatcaattaacgttaaaaattgcatcaactatttaattcatgaggatctttcatattaaaatttaaccttaagattcaaccgccatgtgcttttataaaggaaacattttttagagacgtctgagctcacttttacatggtggtgcctactgccgttaatgtttgtgattttaaatcttaaacagccctgaattttgaaatgtagcctagtttgggattctgcaactacaactttacgggatgcctcaaatcaaaactaagagaaacttaacaagcctttacttcagaacctttaagcaagcaatgtcatttttgaaactaacaggtttgtgtgnnnnnnnnnnnnnnnnnnnnnnnnnnnnnnattataaaaggtacacttctgtttatatttaaacaacaaagaaaaaagcatctacacacttaaaaaattaattcaatattcctaaatctattttaactcattttaaaatactacatacagaagccagaatgcagagttaagaatggaataaggtggggccaa

SEQ ID NO: 191703 - DNA, 1089 bp, Homo Sapiens
  misc_feature (203)..(232): n is a, c, g, or t
  misc_feature (568)..(578): n is a, c, g, or t
ttgggtaattgtctaagtgtttttcttcgtggtccccttcttctccccaccttattccattcttaactctgcattctggcttctgtatgtagtattttaaaatgagttaaaataaatttaggaatattgaattaattttttaagtgtgtagatgcttttttctttgttgtttaaatataaacagaagtgtaccttttataatnnnnnnnnnnnnnnnnnnnnnnnnnnnnnncacacaaacctgttagtttcaaaaatgacattgcttgcttaaaggttctgaagtaaaggcttgttaagtttctcttagttttgatttgaggcatcccgtaaagttgtagttgcagaatcccaaactaggctacatttcaaaattcagggctgtttaagatttaaaatcacaaacattaacggcagtaggcaccaccatgtaaaagtgagctcagacgtctctaaaaaatgtttcctttataaaagcacatggcggttgaatcttaaggttaaattttaatatgaaagatcctcatgaattaaatagttgatgcaatttttaacgttaattgatatnnnnnnnnnnncaacaaaattaggcttgtaaaactgactttttcattacgtgggttttgaaatctagccccagacatactgtgttgagagatacttagagggagggagtaggttttgaagaggttgatggtggtggggagggaaggcctcctgaattgagtttgatgcagagctttttagccatgaagaatctttcagtcatagtactaataattaaattttcagtatttaaaaagacaaagtattttgtccatttgagattctgcactccatgaaaagttcacttggacgctggggccaaaagctgttgattttcttaagttgacggttgtcaatatatcgaactgttcccaagttagtcaagtatgtctcaacactagcatgatataaaaagggacactgcagctgaatgaaaaaggaatcaaaatccacttttgtacataagttaagtcctaattgggatttgtaccgtcctcccatattgttctccgaagataaaatgctacatgtgtaagtctgcct

SEQ ID NO: 191704 - DNA, 1167 bp, Homo Sapiens; identical to SEQ ID NO: 180239

SEQ ID NO: 191705 - DNA, 2824 bp, Homo Sapiens; identical to SEQ ID NO: 184219
  misc_feature (391)..(405): n is a, c, g, or t
  misc_feature (945)..(958): n is a, c, g, or t

SEQ ID NO: 191706 - DNA, 1290 bp, Homo Sapiens
  misc_feature (234)..(245): n is a, c, g, or t
tttatttatgaatttcataaaggactcaatgtgcaactgacatctgctagtgatgatctggtaatatacaacctgtccagtagccgaacagttgtttttattgtgttttctaaccgtaagagatcattaaaggcaaagcctatatgacgctgtacacacaaaaaaatggtcaccgtgggccatactaccaatgaaatggtaggtaaacaaatctttttctggtcaagagaaagnnnnnnnnnnnngaaacagcactctgcatgcttcactctacaagatgaatttccctagaaagaatccaatgaaaatggctgcaattacaacaagaagtgaaggaagaggactggtgacattatctctgaaggatgcagttgaggttgatccaggtttatccgaatgtgctacctttctgagccttaaaccttcatctctcaggtgccgattttcttctgatagcttcatcatttctccctgaagtcttttacactcttccattagtttccttgtttcggtatcattaagtgaaacactgtgtggttttggcataggtccatcttgcttagatgcattcagtggaacagctttgctaggttccatatcattcaatttatcattttcattgggcatttcaaatacgcatctcaatttggaatccattaattcatcaggttttgcctctttccacacagcttccatatctgaagtgtttggtggagcaaaaattgtctgtaccataaacttgtgtttactcttttcattcggatcatagtcaaagggctgtagcattactgaaacagtcacagttgaccctgggtcaataattccactgttgggcctcacacagtaccggcgaggtgctgtagtcttcactttgaaacacacttttctatccgatggatttcgcaatttaagatttgtagtgactacatctgtgaaggggcctttgaatttgaggtctgtgggcggatcgaggaccaggatctgctcgtgcttcgccatggcccctgaggcggacgccatcggagagacagcgcagagcgggggcgcgcccgcggcggcggtttgctgactgggggcgggggacgacggcggcgacggctcggccgagctctaggacgaggccaggctcgcggctcccgagccctaacgcctgccgctgtgtcaccggttcggtgggccacccgctgggtcagcagctccgggtcccacaactgactcaaccccacaccagccgccacggccacgcgcacttgcgagcctcggcgacccacgtgacggcctctgcgccaa

SEQ ID NO: 191707 - DNA, 801 bp, Homo Sapiens; identical to SEQ ID NO: 180241

SEQ ID NO: 191708 - DNA, 1088 bp, Homo Sapiens; identical to SEQ ID NO: 180244

SEQ ID NO: 191709 - DNA, 1602 bp, Homo Sapiens; identical to SEQ ID NO: 180245
  misc_feature (306)..(327): n is a, c, g, or t

SEQ ID NO: 191710 - DNA, 1367 bp, Homo Sapiens; identical to SEQ ID NO: 184225

SEQ ID NO: 191711 - DNA, 1021 bp, Homo Sapiens; identical to SEQ ID NO: 184227
  misc_feature (800)..(810): n is a, c, g, or t
  misc_feature (942)..(963): n is a, c, g, or t

SEQ ID NO: 191712 - DNA, 1141 bp, Homo Sapiens; identical to SEQ ID NO: 184228
  misc_feature (44)..(61): n is a, c, g, or t

SEQ ID NO: 191713 - DNA, 909 bp, Homo Sapiens; identical to SEQ ID NO: 184229
  misc_feature (298)..(308): n is a, c, g, or t
  misc_feature (441)..(462): n is a, c, g, or t

SEQ ID NO: 191714 - DNA, 1333 bp, Homo Sapiens; identical to SEQ ID NO: 184230
  misc_feature (1055)..(1065): n is a, c, g, or t
  misc_feature (1198)..(1219): n is a, c, g, or t

SEQ ID NO: 191715 - DNA, 1203 bp, Homo Sapiens; identical to SEQ ID NO: 180246
  misc_feature (1010)..(1024): n is a, c, g, or t

SEQ ID NO: 191716 - DNA, 928 bp, Homo Sapiens; identical to SEQ ID NO: 184231
  misc_feature (584)..(594): n is a, c, g, or t
  misc_feature (727)..(744): n is a, c, g, or t

SEQ ID NO: 191717 - DNA, 1436 bp, Homo Sapiens; identical to SEQ ID NO: 184232
  misc_feature (1199)..(1209): n is a, c, g, or t
  misc_feature (1342)..(1363): n is a, c, g, or t

SEQ ID NO: 191718 - DNA, 938 bp, Homo Sapiens
ttggcagcagcaccatggtagctcaacagaagaaccttgaaggctatgtgggatttgccaatctcccaaatcaagtatacagaaaatcggtgaagagaggttttgaattcacgcttatggtagtgggtgaatctggattgggaaagtcgacattaatcaactcattattcctcacagatttgtattctccagagtatccaggtccttctcatagaattaaaaagactgtacaggtggaacaatccaaagttttaatcaaagaaggtggtgttcagttgctgctcacaatagttgataccccaggatttggagatgcagtggataatagtaattgctggcagcctgttatcgactacattgatagtaaatttgaggactacctaaatgcagaatcacgagtgaacagacgtcagatgcctgataacagggtgcagtgttgtttatacttcattgctccttcaggacatggacttaaaccattggatattgagtttatgaagcgtttgcatgaaaaagtgaatatcatcccacttattgccaaagcagacacactcacaccagaggaatgccaacagtttaaaaaacagataatgaaagaaatccaagaacataaaattaaaatatacgaatttccagaaacagatgatgaagaagaaaataaacttgttaaaaagataaaggaccgtttacctcttgctgtggtaggtagtaatactatcattgaagttaatggcaaaagggtcagaggaaggcagtatccttggggtgttgctgaagttgaaaatggtgaacattgtgattttacaatcctaagaaatatgttgataagaacacacatgcaggacttgaaagatgttactaataatgtccactatgagaactacagaagcagaaaacttgcagctgtgacttataatggagttgataacacagaataa

SEQ ID NO: 191719 - DNA, 1995 bp, Homo Sapiens; identical to SEQ ID NO: 184233
  misc_feature (1220)..(1230): n is a, c, g, or t
  misc_feature (1599)..(1609): n is a, c, g, or t

SEQ ID NO: 191720 - DNA, 1407 bp, Homo Sapiens
  misc_feature (1262)..(1271): n is a, c, g, or t
actttgtacaaaaaagttggattattcctcccagatttgtattctccagagtatccaggtccttctcatagaattaaaaagactgtacaggtggaacaatccaaagttttaatcaaagaaggtggtgttcagttgctgctcacaatagttgataccccaggatttggagatgcagtggataatagtaattgctggcagcctgttatcgactacattgatagtaaatttgaggactacctaaatgcagaatcacgagtgaacagacgtcagatgcctgataacagggtgcagtgttgtttatacttcattgctccttcaggacatggacttaaaccattggatattgagtttatgaagcgtttgcatgaaaaagtgaatatcatcccacttattgccaaagcagacacactcacaccagaggaatgccaacagtttaaaaaacagataatgaaagaaatccaagaacataaaattaaaatatacgaatttccagaaacagatgatgaagaagaaaataaacttgttaaaaagataaaggaccgtttacctcttgctgtggtaggtagtaatactatcattgaagttaatggcaaaagggtcagaggaaggcagtatccttggggtgttgctgaagttgaaaatggtgaacattgtgattttacaatcctaagaaatatgttgataagaacacacatgcaggacttgaaagatgttactaataatgtccactatgagaactacagaagcagaaaacttgcagctgtgacttataatggagttgataacaacaagaataaagggcagctgactaagagccctctggcacaaatggaagaagaaagaagggagcatgtagctaaaatgaagaagatggagatggagatggagcaggtgtttgagatgaaggtcaaagaaaaagttcaaaaactgaaggactctgaagctgagctccagcggcgccatgagcaaatgaaaaagaatttggaagcacagcacaaagaattggaggaaaaacgtcgtcagttcgaggatgagaaagcaaactgggaagctcaacaacgtattttagaacaacagaactcttcaagaaccttggaaaagaacaagaagaaagggaagatcttttaaactctctattgaccaccagttaacgtattagttgccaatatgccagcttggacatcagtgtttgttggatccgtttgaccaatttgcaccagttttatccataatgatggatttaacagcatgacaaaaattannnnnnnnnngttcttgatggagattaagatgccttgaattgtctagggtgttctgtacttagaaagtaagagctctaagtacctttcctacattttctttttttattaacagatatcttcagtttaatgcaagagaacattttac

SEQ ID NO: 191721 - DNA, 1091 bp, Homo Sapiens; identical to SEQ ID NO: 184235

SEQ ID NO: 191722 - DNA, 1282 bp, Homo Sapiens; identical to SEQ ID NO: 184236

SEQ ID NO: 191723 - DNA, 1350 bp, Homo Sapiens; identical to SEQ ID NO: 180249
  misc_feature (1147)..(1187): n is a, c, g, or t

SEQ ID NO: 191724 - DNA, 2236 bp, Homo Sapiens; identical to SEQ ID NO: 184237

SEQ ID NO: 191725 - DNA, 973 bp, Homo Sapiens
gatgagcaatgctttttcatatatggaaaaactttgtacaaaaaagttgggtaatcatcgacaccttcgctgacctgcgtagtgagaagcagaagaaggaggagattcttaagacgacatgcttcatctgtggtctggagagggacaagtttgataacaagacagtgtcatttgaggaacacatcaagctggagcacaacatgtggaactacttgtacttcattgtgctggtccgcgtgaagaacaagaccgactacacgggccctgagagctacgtggcccagatgatcaagaacaagaacctggactggttcccccggatgcgggccatgtcccttgtcagcaatgagggcgagggggagcagaatgagattcggattctccaggacaagctcaactccaccatgaagctggtgtcccacctcactgcccagctcaacgagctcaaggagcagatgacggagcagcggaaacgcaggcaacgcctaggctttgtggatgtccagaactgcattagccgctgaggagagccaccgaaggccccaacaggggatgctcatcactggagactgcgactgggaagaacactgccccctccctcgggttgggtggcccagccagctggccagcctccactcccactctgccagacaccctgacacccacccaggctttgaagagcatggagggggagcctcagagctgacagtcctgcttagagcccttaaaaagacttgaaagttcactgggactcagtttaccttaatgccttagcagaagataaatcctacctagagacctttgttccttaaagcaataactgacaactctttgtagtcctccttgtgggtagttaagagtggggtcacccctttaactccaagcactacattttggcggctgccggcctctgggggaggtggcagttatgctgttactagtgatttttagggctttgttatttaacttattt

SEQ ID NO: 191726 - DNA, 1520 bp, Homo Sapiens; identical to SEQ ID NO: 180251
  misc_feature (993)..(1002): n is a, c, g, or t

SEQ ID NO: 191727 - DNA, 762 bp, Homo Sapiens
ttgggtccttgaggacgccgtgccgggtcagtgttagcctccagccctggttgtggaaggcgacagaagtcatggcgatgtttgagcagatgagagccaacgtgggcaagttgctcaagggtatcgacaggtacaatcctgagaacctggccaccctggagcgctatgtagagacgcaggccaaggaaaatgcctatgatctggaagccaacctggctgtcctgaagctgtaccagttcaacccagccttctttcagaccacggtcaccgcccagatcctgctgaaggccctcaccaacttgccgcacacagacttcaccctgtgcaagtgcatgatcgaccaggcacatcaagaagaacggccaatccgacagattttgtacctcggggacctgctggagacctgccatttccaggccttctggcaagccctggatgaaaacatggacctcttggaaggtataactggctttgaagactctgtccgaaagtttatctgccatgttgtgggtatcacttaccagcacattgaccgctggctgctggccgagatgctcggggatctgtcggacagccagctaaaggtgtggatgagcaaatacggctggagtgccgacgagtcggggcagatcttcatctgtagccaagaagagagcattaaacccaagaacattgtggagaagattgactttgacagtgtgtccagcatcatggcctcctcccagtaacttcaggtgtttaataaagatgtgttgactcagc

SEQ ID NO: 191728 - DNA, 1476 bp, Homo Sapiens; identical to SEQ ID NO: 180254

SEQ ID NO: 191729 - DNA, 1748 bp, Homo Sapiens; identical to SEQ ID NO: 180255

SEQ ID NO: 191730 - DNA, 1236 bp, Homo Sapiens; identical to SEQ ID NO: 184239

SEQ ID NO: 191731 - DNA, 2069 bp, Homo Sapiens; identical to SEQ ID NO: 180256
  misc_feature (1127)..(1169): n is a, c, g, or t
  misc_feature (1309)..(1356): n is a, c, g, or t
  misc_feature (1381)..(1455): n is a, c, g, or t
  misc_feature (1731)..(1752): n is a, c, g, or t

SEQ ID NO: 191732 - DNA, 923 bp, Homo Sapiens; identical to SEQ ID NO: 180257
  misc_feature (675)..(741): n is a, c, g, or t

SEQ ID NO: 191733 - DNA, 1436 bp, Homo Sapiens; identical to SEQ ID NO: 184240
  misc_feature (330)..(340): n is a, c, g, or t
  misc_feature (363)..(374): n is a, c, g, or t
  misc_feature (396)..(439): n is a, c, g, or t

SEQ ID NO: 191734 - DNA, 2941 bp, Homo Sapiens; identical to SEQ ID NO: 180258
  misc_feature (476)..(495): n is a, c, g, or t
  misc_feature (1700)..(1940): n is a, c, g, or t

SEQ ID NO: 191735 - DNA, 685 bp, Homo Sapiens; identical to SEQ ID NO: 184241

SEQ ID NO: 191736 - DNA, 1937 bp, Homo Sapiens; identical to SEQ ID NO: 184243

SEQ ID NO: 191737 - DNA, 1162 bp, Homo Sapiens
tttgtacaaaaaagttgggtcctacctttccagccatatcgccaacgtggagcgggtgcccttcgacgccgccaccctgcacacctccactgccatggccgcccagcacggcatggatgacgatggcacaggccagaaacagatctggagaatcgaaggttccaacaaggtgcccgtggaccctgccacatatggacagttctatggaggcgacagctacatcattctgtacaactaccgccatggtggccgccaggggcagataatctataactggcagggtgcccagtctacccaggatgaggtcgctgcatctgccatcctgactgctcagctggatgaggagctgggaggtacccctgtccagagccgtgtggtccaaggcaaggagcccgcccacctcatgagcctgtttggtgggaagcccatgatcatctacaagggcggcacctcccgcgagggcgggcagacagcccctgccagcacccgcctcttccaggtccgcgccaacagcgctggagccacccgggctgttgaggtattgcctaaggctggtgcactgaactccaacgatgcctttgttctgaaaaccccctcagccgcctacctgtgggtgggtacaggagccagcgaggcagagaagacgggggcccaggagctgctcagggtgctgcgggcccaacctgtgcaggtggcagaaggcagcgagccagatggcttctgggaggccctgggcgggaaggctgcctaccgcacatccccacggctgaaggacaagaagatggatgcccatcctcctcgcctctttgcctgctccaacaagattggacgttttgtgatcgaagaggttcctggtgagctcatgcaggaagacctggcaacggatgacgtcatgcttctggacacctgggaccaggtctttgtctgggttggaaaggattctcaagaagaagaaaagacagaagccttgacttctgctaagcggtacatcgagacggacccagccaatcgggatcggcggacgcccatcaccgtggtgaagcaaggctttgagcctccctcctttgtgggctggttccttggctgggatgatgattactggtctgtggaccccttggacagggccatggctgagctggctgcctgaggaggggcagggccc

SEQ ID NO: 191738 - DNA, 942 bp, Homo Sapiens
ttggcgcagcagcaggtagtgctcatagctctctttgtccagtgcttcggccttggtcccagcgccttcccacggagcagcactcttcaccctgcacagccttgttagcccaacagcatggtggtggaacaccccgagttcctcaaggcagggaaggagcctggcctgcagatctggcgtgtggagaagttcgatctggtgcccgtgcccaccaacctttatggagacttcttcacgggcgacgcctacgtcatcctgaagacagtgcagctgaggaacggaaatctgcagtatgacctccactactggctgggcaatgagtgcagccaggatgagagcggggcggccgccatctttaccgtgcagctggatgactacctgaacggccgggccgtgcagcaccgtgaggtccagggcttcgagtcggccaccttcctaggctacttcaagtctggcctgaagtacaagaaaggaggtgtggcatcaggattcaagcacgtggtacccaacgaggtggtggtgcagagactcttccaggtcaaagggcggcgtgtggtccgtgccaccgaggtacctgtgtcctgggagagcttcaacaatggcgactgcttcatcctggacctgggcaacaacatccaccagtggtgtggttccaacagcaatcggtatgaaagactgaaggccacacaggtgtccaagggcatccgggacaacgagcggagtggccgggcccgagtgcacgtgtctgaggagggcactgagcccgaggcgatgctccaggtgctgggccccaagccggctctgcctgcaggtaccgaggacaccgccaaggaggatgcggccaaccgcaagctggccaagctctacaaggtctccaatggtgcagggaccatgtccgtctccctcgtggctgatgagaaccccttcgcccagggggccctg

SEQ ID NO: 191739 - DNA, 1068 bp, Homo Sapiens
  misc_feature (94)..(124): n is a, c, g, or t
ttggtaattataattcttacatatgagacaagtttattttcattttcctggcctttaaaaaatattgattattgtccagctaaagcttcagccnnnnnnnnnnnnnnnnnnnnnnnnnnnnnnngattatggtaaggcagcatagcatagtgagaactaactaggagcggaaaattctatttgcgttttcatttaataatgtaatgttttgactgaactgtatttcctcatttgtaaaatagggaggttgaataaaatctctttggtataacatggttatctcatagtcatagatctgccttagagccctagaaagttgatgtaaaattacatgagtgttactaaaaccttcacttcttgtattttgtagtaataggcttaaggtctgaaaattgttcactgcgtttcttcaggttaattcctgtaccaatggtgggttttaaggaacttctccgaagactgaaggttcaagatcagatgactaagcagcatcaaaccagattagatatcatatctgaagatattagtgagctacaaaagaatcaaactacatctgtagccaaaattgcacaatacaagaggaaactcatggatctttcccatagaactttacaggtcctaatcaaacaggaaattcaaaggaagagtggttatgccattcaggctgatgaagagcagttgcgagttcagctggatacgattcagggtgaactaaatgcacctactcagttcaagggccgactaaatgaattgatgtctcaaatcaggatgcagaatcattttggagcagtcagatctgaagaaaggtattacatagatgcagatctgttacgagaaatcaagcagcatttgaaacaacaacaggaaggccttagccatttgattagcatcattaaagacgatctagaagatataaagctggtcgaacatggattgaatgaaaccatccacatcagaggtggtgtctttagttgacagttcacaaactttgtgtaaaggtttgtgaaatgcatccttcttactgcatccaaaccttccttaagaatgaaaccgacccaccatggaggg

SEQ ID NO: 191740 - DNA, 1067 bp, Homo Sapiens
tttgtacaaaaaagttggcacaaagcgtgaatctaaagaagaaaagttcaatctggaaacatcaatgctgccaagactattgcagatatcatccgaacatgtttgggacccaagtccatgatgaagatgcttttggacccaatgggaggcattgtgatgaccaatgatggcaatgccattcttcgagagattcaagtccagcatccagcggccaagtccatgatcgaaattagccggacccaggatgaagaggttggagatgggaccacatcagtaattattcttgcaggggaaatgctgtctgtagctgagcacttcctggagcagcagatgcacccaacagtggtgatcagtgcttaccgcaaggcattggatgatatgatcagcaccctaaagaaaataagtatcccagtcgacatcagtgacagtgatatgatgctgaacatcatcaacagctctattactaccaaagccatcagtcggtggtcatctttggcttgcaacattgccctggatgctgtcaagatggtacagtttgaggagaatggtcggaaagagattgacataaaaaaatatgcaagagtggaaaagatacctggaggcatcattgaagactcctgtgtcttgcgtggagtcatgattaacaaggatgtgacccatccacgtatgcggcgctatatcaagaaccctcgcattgtgctgctggattcttctctggaatacaagaaaggagaaagccagactgacattgagattacacgagaggaggacttcacccgaattctccagatggaggaagagtacatccagcagctctgtgaggacattatccaactgaagcccgatgtggtcatcactgaaaagggcatctcagatttagctcagcactaccttatgcgggccaatatcacagccatccgcagagtccggaagacagacaataatcgcattgctagagcctgtggggcccggatagtcagccgaccaaaggaactgagagaagatgatgttggaacaggagcaggcctgttggaaatcaaaaaattggagatgaatactttactttc

SEQ ID NO: 191741 - DNA, 1001 bp, Homo Sapiens
tttgtacaaaaaagttggctcagatttaccttcaaacactaccttatgcgggccaatatcacagccatccgcagagtccggaagacagacaataatcgcattgctagagcctgtggggcccggatagtcagccgaccagaggaactgagagaagatgatgttggaacaggagcaggcctgttggaaatcaagaaaattggagatgaatactttactttcatcactgactgcaaagaccccaaggcctgcaccattctcctccggggggctagcaaagagattctctcggaagtagaacgcaacctccaggatgccatgcaagtgtgtcgcaatgttctcctggaccctcagctggtgccagggggtggggcctccgagatggctgtggcccatgccttgacagaaaaatccaaggccatgactggtgtggaacaatggccatacagggctgttgcccaggccctagaggtcattcctcgtaccctgatccagaactgtggggccagcaccatccgtctacttacctcccttcgggccaagcacacccaggagaactgtgagacctggggtgtaaatggtgagacgggtactttggtggacatgaaggaactgggcatatgggagccattggctgtgaagctgcagacttataagacagcagtggagacggcagttctgctactgcgaattgatgacatcgtttcaggccacaaaaagaaaggcgatgaccagagccggcaaggcggggctcctgatgctggccaggagtgagtgctaggcaaggctacttcaatgcacagaaccagcagagtctccccttttcctgagccagagtgccaggaacactgtggacgtctttgttcagaagggatcaggttggggggcagcccccagtccctttctgtcccagctcagttttccaaaagacactgacatgtaattcttctctattgtaaggtttccatttaatttgcttccgatgattaaatctaagtcatttg

SEQ ID NO: 191742 - DNA, 1017 bp, Homo Sapiens
ttggggcagcgttttctgggcttctgtctggttctctctctccagaaggttctgccggttcccccagctctgggtacccggctctgcatcgcgtcgccatgatgggccatcgtccagtgctcgtgctcagccagaacacaaagcgtgaatccggaagaaaagttcaatctggaaacatcaatgctgccaagactattgcagatatcatccgaacatgtttgggacccaagtccatgatgaagatgcttttggacccaatgggaggcattgtgatgaccaatgatggcaatgccattcttcgagagattcaagtccagcatccagcggccaagtccatgatcgaaattagccggacccaggatgaagaggttggagatgggaccacatcagtaattattcttgcaggggaaatgctgtctgtagctgagcacttcctggagcagcagatgcacccaacagtggtgatcagtgcttaccgcaaggcattggatgatatgatcagcaccctaaagaaaataagtatcccagtcgacatcagtgacagtgatatgatgctgaacatcatcaacagctctattactaccaaagccatcagtcggtggtcatctttggcttgcaacattgccctggatgctgtcaagatggtacagtttgaggagaatggtcggaaagagattgacataaaaaaatatgcaagagtggaaaagatacctggaggcatcattgaagactcctgtgtcttgcgtggagtcatgattaacaaggatgtgacccatccacgtatgcggcgctatatcaagaaccctcgcattgtgctgctggattcttctctggaatacaagaaaggagaaagccagactgacattgagattacacgagaggaggacttcacccgaattctccagatggaggaagagtacatccagcagctctgtgaggacattatccaactgaagcccgatgtggtcatcactgaaaagggcatctcagatttagctcagcactaccttatgcggg

SEQ ID NO: 191743 - DNA, 970 bp, Homo Sapiens
gccaactttgtacaaaaaagttggatcagtgacagtgatatgatgctgaacatcatcaacagctctattactaccaaagccatcagtcggtggtcatctttggcttgcaacattgccctggatgctgtcaagatggtacagtttgaggagaatggtcggaaagagattgacataaaaaaatatgcaagagtggaaaagatacctggaggcatcattgaagactcctgtgtcttgcgtggagtcatgattaacaaggatgtgacccatccacgtatgcggcgctatatcaagaaccctcgcattgtgctgctggattcttctctggaatacaagaaaggagaaagccagactgacattgagattacacgagaggaggacttcacccgaattctccagatggaggaagagtacatccagcagctctgtgaggacattatccaactgaagcccgatgtggtcatcactgaaaagggcatctcagatttagctcagcactaccttatgcgggccaatatcacagccatccgcagagtccggaagacagacaataatcgcattgctagagcctgtggggcccggatagtcagccgaccagaggaactgagagaagatgatgttggaacaggagcaggcctgttggaaatcaagaaaattggagatgaatactttactttcatcactgactgcaaagaccccaaggcctgcaccattctcctccggggggctagcaaagagattctctcggaagtagaacgcaacctccaggatgccatgcaagtgtgtcgcaatgttctcctggaccctcagctggtgccagggggtggggcctccgagatggctgtggcccatgccttgacagaaaaatccaaggccatgactggtgtggaacatggccatacagggctgttgcccaggccctaaagtcattcctcgtaccctgatccaaactgtggggccagcaccatccgtc

SEQ ID NO: 191744 - DNA, 996 bp, Homo Sapiens
actttgtacaaaaaagttggcgcattgtgctgctggattcttctctggaatacaagaaaggagaaagccagactgacattgagattacacgagaggagggcttcacccgaattctccagatggaggaagagtacatccagcagctctgtgaggacattatccaactgaagcccgatgtggtcatcactgaaaagggcatctcagatttagctcagcactaccttatgcgggccaatatcacagccatccgcagagtccggaagacagacaataatcgcattgctagagcctgtggggcccggatagtcagccgaccagaggaactgagagaagatgatgttggaacaggagcaggcctgttggaaatcaagaaaattggagatgaatactttactttcatcactgactgcaaagaccccaaggcctgcaccattctcctccggggggctagcaaagagattctctcggaagtagaacgcaacctccaggatgccatgcaagtgtgtcgcaatgttctcctggaccctcagctggtgccagggggtggggcctccgagatggctgtggcccatgccttgacagaaaaatccaaggccatgactggtgtggaacaatggccatacagggctgttgcccaggccctagaggtcattcctcgtaccctgatccagaactgtggggccagcaccatccgtctacttacctcccttcgggccaagcacacccaggagaactgtgagacctggggtgtaaatggtgagacgggtactttggtggacatgaaggaactgggcatatgggagccattggctgtgaagctgcagacttataagacagcagtggagacagcagttctgctactgcgaattgatgacatcgtttcagccacaaaaagaaaggcgatgaccagagccggcaaggcggggtcctgatgctggccaggagtgagtgctaggcaagctacttcatgcacagaaccagcagagtctccctttt

SEQ ID NO: 191745 - DNA, 1828 bp, Homo Sapiens; identical to SEQ ID NO: 184248

SEQ ID NO: 191746 - DNA, 982 bp, Homo Sapiens
actttgtacaaaaaagttggggcaagatggggtcaaagtcagagtggtggtcatggtcctggaggtggcaagaaggatgacaaggacaagaaaaagaaatatgaacctcctgtaccaactagagtggggaaaaagaagaagaaaacaaagggaccagatgctgccagcaaactgccactggtgacacctcacactcagtgccggttaaaattactgaagttagagagaattaaagactatcttctcatggaggaagaattcattagaaatcaggaacaaatgaaaccattagaagaaaagcaagaggaggaaagatcaaaagtggatgatctgagggggaccccgatgtcagtaggaaccttggaagagattattgatgacaatcatgccatcgtgtctacatctgtgggctcagaacactacgtcagcattctttcatttgtagacaaggatctgctggaacctggctgctcggtcctgctcaaccacaaggtgcatgccgtgataggggtgctgatggatgacacggatcccctggtcacagtgatgaaggtagaaaaggccccccaggagacctatgcagatattggggggttggacaaccaaattcaggaaattaaggaatctgtggagcttcctctcacccatcctgaatattatgaagagatgggtataaagcctcctaagggggtcattctctatggtccacctggcacaggtaaaaccttgttagccaaagcagtagcaaaccaaacctcagccactttcttgagagtggttggctctgaacttattcagaagtacctaggtgatgggcccaaactcgtacgggaattgttccgagttgctgaaaacatgcaccgtccatcgtgtttattgatgaaattgacgccattgggacaaaagatatgactccaattctggtggtgagagagaaattcagcgaacaatgttggaactgctgaacaagttggatggattt

SEQ ID NO: 191747 - DNA, 1466 bp, Homo Sapiens
ctttgtacaaaaaagttggcaaagtcagagtggtggtcatggtcctggaggtggcaagaaggatgacaaggacaagaaaaagaaatatgaacctcctgtaccaactagagtggggaaaaagaagaagaaaacaaagggaccagatgctgccagcaaactgccactggtgacacctcacactcagtgccggttaaaattactgaagttagagagaattaaagactatcttctcatggaggaagaattcattagaaatcaggaacaaatgaaaccattagaagaaaagcaagaggaggaaagatcaaaagtggatgatctgagggggaccccgatgtcagtaggaaccttggaagagattattgatgacaatcatgccatcgtgtctacatctgtgggctcagaacactacgtcagcattctttcatttgtagacaaggatctgctggaacctggctgctcggtcctgctcaaccacaaggtgcatgccgtgataggggtgctgatggatgacacggatcccctggtcacagtgatgaaggtagaaaaggccccccaggagacctatgcagatattggggggttggacaaccaaattcaggaaattaaggaatctgtggagcttcctctcacccatcctgaatattatgaagagatgggtataaagcctcctaagggggtcattctctatggtccacctggcacaggtaaaaccttgttagccaaagcagtagcaaaccaaacctcagccactttcttgagagtggttggctctgaacttattcagaagtacctaggtgatgggcccaaactcgtacgggaattgttccgagttgctgaagaacatgcaccgtccatcgtgtttattgatgaaattgacgccattgggacaaaaagatatgactccaattctggtggtgagagagaaattcagcgaacaatgttggaactgctgaaccagttggatggatttgattctaggggagatgtgaaagttatcatggccacaaaccgaatagaaactttggatccagcacttatcagaccaggccgcattgacaggaagattgagttccccctgcctgatgaaaagacgaagaagcgcatctttcagattcacacaagcaggatgacgctggctgatgatgtaaccctggacgacctgatcatggctaaagatgacctctctggtgctgacatcaaggcaatctgtacagaagctggtctgatggccttaagagaacgtagaatgaaagtaacaaatgaagacttcaaaaaatctaaagaaaatgttctttataagaaacaggaaggcacccctgaggggctgtatctctaatgaaccatggctgtcatcaggaaaatggttgggagatttctcaatccctgaaagggatgaggttgggggagttgcccagaggaatccctgttcccactgatttttattagaaaacatcctgtgtcttttg

SEQ ID NO: 191748 - DNA, 890 bp, Homo Sapiens
ctttgtacaaaaaagttggctctatggtccacctggcacaggtaaaaccttgttagccaaagcagtagcaaaccaaacctcagccactttcttgagagtggttggctctgaacttattcagaagtacctaggtgatgggcccaaactcgtacgggaattgttccgagttgctgaagaacatgcaccgtccatcgtgtttattgatgaaattgacgccattgggacaaaaagatatgactccaattctggtggtgagagagaaattcagcgaacaatgttggaactgctgaaccagttggatggatttgattctaggggagatgtgaaagttatcatggccacaaaccgaatagaaactttggatccagcacttatcagaccaggccgcattgacaggaagattgagttccccctgcctgatgaaaagacgaagaagcgcatctttcagattcacacaagcaggatgacgctggctgatgatgtaaccctggacgacctgatcatggctaaagatgacctctctggtgctgacatcaaggcaatctgtacagaagctggtctgatggccttaagagaacgtagaatgaaagtaacaaatgaagacttcaaaaaatctaaagaaaatgttctttataagaaacaggaaggcacccctgaggggctgtatctctaatgaaccatggctgtcatcaggaaaatggttgggagatttctcaatccctgaaagggatgaggttgggggagttgcccagaggaatccctgttcccactgatttttattagcaaaacatcctgtgtcttttggagtacgatgtgtaagtgcccattgggtggcctgttggtcactgtgcagcagtctgcttcccaataaagcgtgctctttcacaaac

SEQ ID NO: 191749 - DNA, 868 bp, Homo Sapiens
ttggaaatttatttgacagtaactttcgtcatcagtttgattattgacatttgtatgatttccaatatatttcttacaagatgagctagaattggctacaataacatacgcagtttgctaaaattgatcctggttttgtcattctctcagattctggatgaaattgaagaacataacatcaaaatctatcacttacctgatgcagaatcagatgaagatgaagattttaaagagcagactagacttctcaaggctagcatcccattctctgtggttggatccaatcagttgattgaagccaaaggaaagaaggtcagaggccgcctctacccctggggtgttgtggaagtggagaacccagagcacaatgactttctgaagctgagaaccatgctcatcacccacatgcaggatctccaggaggtgacccaggaccttcattatgaaaacttccgttctgagagactcaagagaggcggcaggaaagtggagaatgaggacatgaataaagaccagatcttgctggaaaaagaagctgagctccgccgcatgcaagagatgattgcaaggatgcaggcgcagatgcagatgcagatgcagggcggggatggcgatggcggggctctcgggcaccacgtgtaaggtgatgtgcacatatcaagaagtcagagaaaacactttcctggataaaaaagaaaacattccagatgcatgatccagctgtgtgttttcaatccttgggagggtgccatccacattttaacagtacctgtgcctgagaatttaatttttaaaagactttgatgtgtttttgtatgaagtacttttaacgtatgtatttcattgctgtgtcacactctgtgttttg

SEQ ID NO: 191750 - DNA, 1283 bp, Homo Sapiens; identical to SEQ ID NO: 184252

SEQ ID NO: 191751 - DNA, 3181 bp, Homo Sapiens; identical to SEQ ID NO: 184253

SEQ ID NO: 191752 - DNA, 2005 bp, Homo Sapiens; identical to SEQ ID NO: 184254

SEQ ID NO: 191753 - DNA, 1195 bp, Homo Sapiens
ctttgtacaaaaaagttggctgtttcacaggcctaaagcctgaacaggtggagcggctgatcaaggagttctccatctacatgacaaaagatggccgcatctctgtggcaggggtcacctccagcaacgtgggctaccttgcccatgccattcaccaggtcaccaagtaatgtccctggtgcgaggaaacagagacaacctttctgtcttcagcctctgctattgagagcttcacacagacaatgagagagggtggatggtggtgagtggatcatttctttcagccacagtgtgtaacactcagcatttgaatgtttctcagaaaagaacatgtagtgacacagggcagaggcatccatggctggcgtctggaatattaaaccaaactctccccggtccttttttctccaacttttctcaaagagtttacatgtgcaagaaagtcatcgcaccaaaaaacctgtcaattatgccattgcaatatttcagaagctttaactgaagtgtcaggttcctcgtgagaaacagcacacgttagaggctttgagagaaggcctagttctgtcatgagtagtcggcctcgtgtctgtcctcccatcttggaacaaccttatcaacaggccgcactgcagaaatgatgttttatgaaaaccaatgaggctgctgccactccagcaagggaaataatgcagtttcctgtcttatttaagaaaaagagaaggctctcttttctcccttgtcattgccgttcttttccttacacgcaaagattttttaactattgcagattttcatcccattctactgcttgattgaccatcaactccatcctatcgagatttatttaagaatgaagaacataattttctgctgatgccgtaccctcacccttttcagcaaagaatagtggagagtaggaaactgtactttatctcggcatcctcttgaatgatagtgcaagtttctccagttgggatgttgtctctgcccggttggacctcctccctttgttgaatgtggtgtgcagcctctcatctcacactgtgagtccagcggcgcagggtggtaccaggaaagaggatattctaggctttgcgtgctgctagctgggttcaggcttcacccactggaaagaaccaccatctgctctaaccatgtagacttattgcggcctggtttctctgtacaataaaat

SEQ ID NO: 191754 - DNA, 1231 bp, Homo Sapiens
ttggccaatatctgagttaaaatactggggaagagctgattcccagggttctggttacctttgttacttatcaaatgatgacgatcctgtggcatttcagataaaccatttcctttaaagctgcaaagtcgtctcttggctgtttttctctttagaaaataccagagcagagtgttcttcttctgcatgcctgcgcccacaatcccacgggagtggacccgcgtccggaacagtggaaggaaatagcaacagtggtgaagaaaaggaatctctttgcgttctttgacatggcctaccaaggctttgccagtggtgatggtgataaggatgcctgggctgtgcgccacttcatcgaacagggcattaatgtttgtctctgccaatcatatgccaagaacatgggcttatatggtgagcgtgtaggagccttcactatggtctgcaaagatgcggatgaagccaaaagggtagagtcacagttgaagatcttgatccgtcccatgtattccaaccctcccctcaatggggcccggattgctgctgccattctgaacaccccagatttgcgaaaacaatggctgcaagaagtgaaaggcatggctgaccgcatcattggcatgcggactcaactggtctccaacctcaagaaggagggttccacccacaattggcaacacatcaccgaccaaattggcatgttctgtttcacagggctaaagcctgaacaggtggagcggctgatcaaggagttctccatctacatgacaaaagatggccgcatctctgtggcaggggtcacctccagcaacgtgggctaccttgcccatgccattcaccaggtcaccaagtaatgtccctggtgcgaggaaacagagacaacctttctgtcttcagcctctgctattgagagcttcacacagacaatgagagagggtggatggtggtgagtggatcatttctttcagccacagtgtgtaacactcagcatttgaatgtttctcagaaaagaacatgtagtgacacagggcagaggcatccatggctggcgtctggaatattaaaccagactctcccctgtccttttttctccaacttttctcagagagtttacatgtgcaagaaagtcatcgcaccaaaagacctgtcaattatgccattgcgatatttcagagagctgtaactgaagtgtcacgttcctcgtgagaaacagcacacgttagacgctttgaga

SEQ ID NO: 191755 - DNA, 1485 bp, Homo Sapiens; identical to SEQ ID NO: 184257
  misc_feature (877)..(895): n is a, c, g, or t

SEQ ID NO: 191756 - DNA, 1453 bp, Homo Sapiens; identical to SEQ ID NO: 184259
  misc_feature (464)..(747): n is a, c, g, or t

SEQ ID NO: 191757 - DNA, 1339 bp, Homo Sapiens; identical to SEQ ID NO: 184260

SEQ ID NO: 191758 - DNA, 1023 bp, Homo Sapiens; identical to SEQ ID NO: 184262

SEQ ID NO: 191759 - DNA, 1586 bp, Homo Sapiens; identical to SEQ ID NO: 184263

SEQ ID NO: 191760 - DNA, 1106 bp, Homo Sapiens; identical to SEQ ID NO: 184264

SEQ ID NO: 191761 - DNA, 2584 bp, Homo Sapiens; identical to SEQ ID NO: 184265

SEQ ID NO: 191762 - DNA, 876 bp, Homo Sapiens; identical to SEQ ID NO: 184266

SEQ ID NO: 191763 - DNA, 1147 bp, Homo Sapiens; identical to SEQ ID NO: 184267

SEQ ID NO: 191764 - DNA, 975 bp, Homo Sapiens; identical to SEQ ID NO: 180264

SEQ ID NO: 191765 - DNA, 807 bp, Homo Sapiens
  misc_feature (726)..(742): n is a, c, g, or t
ttgggacgtgggctgcggcgggcccgcggcgtcgggcggtgcggatgtcgggctgggcggacgagcgcggcggcgagggcgacgggcgcatctacgtggggaaccttccgaccgacgtgcgcgagaaggacttggaggacctgttctacaagtacggccgcatccgcgagatcgagctcaagaaccggcacggcctcgtgcccttcgccttcgtgcgcttcgaggacccccgagatgcagaggatgctatttatggaagaaatggttatgattatggccagtgtcggcttcgtgtggagttccccaggacttatggaggtcggggtgggtggccccgtggtgggaggaatgggcctcctacaagaagatctgatttccgagttcttgtttcaggacttcctccgtcaggcagctggcaggacctgaaggatcacatgcgagaagctggggatgtctgttatgctgatgtgcagaaggatggagtggggatggtcgagtatctcagaaaagaagacatggaatatgccctgcgtaaactggatgacaccaaattccgctctcatgagggtgaaacttcctacatccgagtttatcctgagagaagcaccagctatggctactcacggtctcggtctgggtcaaggggccgtgactctccataccaaagcaggggttccccacactacttctctcctttcaggccctactgagacaggtgatgggaannnnnnnnnnnnnnnnnagttaactgagctgctttgtgctcagaatctacattccagattgaggatttagtgtcttaggaaa

SEQ ID NO: 191766 - DNA, 942 bp, Homo Sapiens; identical to SEQ ID NO: 184272

SEQ ID NO: 191767 - DNA, 3080 bp, Homo Sapiens; identical to SEQ ID NO: 184273

SEQ ID NO: 191768 - DNA, 1194 bp, Homo Sapiens; identical to SEQ ID NO: 180266
  misc_feature (204)..(217): n is a, c, g, or t

SEQ ID NO: 191769 - DNA, 952 bp, Homo Sapiens; identical to SEQ ID NO: 184274

SEQ ID NO: 191770 - DNA, 1971 bp, Homo Sapiens; identical to SEQ ID NO: 184275
  misc_feature (1402)..(1424): n is a, c, g, or t

SEQ ID NO: 191771 - DNA, 785 bp, Homo Sapiens; identical to SEQ ID NO: 184276
  misc_feature (603)..(625): n is a, c, g, or t

SEQ ID NO: 191772 - DNA, 1774 bp, Homo Sapiens; identical to SEQ ID NO: 184278

SEQ ID NO: 191773 - DNA, 1167 bp, Homo Sapiens
taaagcaagtaacttttatatcatccttaaaaagaaccaaggaaaattcacaacatatgtgaaacacaacagctgtggtttaggaggtaaacaaaggaccaacatagcctgaaatgcaacagcctttgagtgacttgagccgcatgtgactggggttctgttaaaagggcaggctcctccctcctagccctgaagccccaggaacatgccttgaaagacaagctctctaatactcaacttgcagggtctcgccctaacatccaagacttggtagcatctcctttctcccaaaacccagctggaactcaactaatcctaaacgaaaactcaagaacagcacaccagatgccacctgttgtttgtcagggtctcaaactccagaggaaatgcatttgcctgtcatggttttcctctctaagggcacctgtctgaacttggagctgtgcttccactggtgcctcatggggcctgggcctactctccacctgaattcacacttttctctataaggtatcaggtggggaataagtccaagaaggtgacaagaggctcccgagcaacagagcttgctcattcctggcaggcatctcccacaatgccccagagggctggcgaggccgggacagcataaggacagagaaagggcagaggggtgcttggaagtgctcatcactcaggggagctggcaggcccgggatgacaggcagcctgaacagtgctggaacaaagacagccaccctgcgccccttgtcgagcagctgctggtgatgggaagcagcacgtcggcaccacctccttcgttgcaggaaatgttttgtatcgggccaatgacttcagttttccttgcctggagatgccttcatgaaggaaggggacagggaatacaggtgggcatgctgcagttggcatctctggggctgccaaatcttgagttcacttggggccaaggcactccacaatcccattccccttcatgccatcgaagaagaagaagttgttgtgaggagggtcccgctgagacagggccttcacaatttcctgtgccaaaatccctccaaccaccgcacacactggggccatctcggagaagcagtacctgacaaagtcctcaggaagcaggtcaggactaatacccagggagtcaagcccaacttttttgtacaaagt

SEQ ID NO: 191774 - DNA, 1701 bp, Homo Sapiens; identical to SEQ ID NO: 184281
  misc_feature (229)..(248): n is a, c, g, or t
  misc_feature (1545)..(1558): n is a, c, g, or t

SEQ ID NO: 191775 - DNA, 1653 bp, Homo Sapiens; identical to SEQ ID NO: 184283

SEQ ID NO: 191776 - DNA, 988 bp, Homo Sapiens
ttggcctccggctgccggtccgcctgggccagacgcgcgagcgcaagcagcgggttagtggtcgcgcgcccgacctccgcagtcccagccgagccgcgacccttccggccgtccccaccccacctcgccgccatgcgcctccgccgcctagcgctgttcccgggtgtggcgctgcttcttgccgcggcccgcctcgccgctgcctccgacgtgctagaactcacggacgacaacttcgagagtcgcatctccgacacgggctctgcgggcctcatgctcgtcgagttcttcgctccctggtgtggacactgcaagagacttgcacctgagtatgaagctgcagctaccagattaaaaggaatagtcccattagcaaaggttgattgcactgccaacactaacacctgtaataaatatggagtcagtggatatccaaccctgaagatatttagagatggtgaagaagcaggtgcttatgatggacctaggactgctgatggaattgtcagccacttgaagaagcaggcaggaccagcttcagtgcctctcaggactgaggaagaatttaagaaattcattagtgataaagatgcctctatagtaggttttttcgatgattcattcagtgaggctcactccgagttcctaaaagcagccagcaacttgagggataactaccgatttgcacatacgaatgttgagtctctggtgaacgagtatgatgataatggagagggtatcatcttatttcgtccttcacatctcactaacaagtttgaggacaagactgtggcatatacagagcaaaaaatgaccagtggcaaaattaaaaagtttatccaggaaaacatttttggtatctgccctcacatgacagaagacaataaaagatttgatacagggcaaggacttacttattgcttactatgatgtggactatgaaagaacgctaaaagttccaactactggaaaaacagggtaatgatgg

SEQ ID NO: 191777 - DNA, 818 bp, Homo Sapiens
ctttgtacaaaaaagttgggtttgtcatgcaggaggagttctcgcgtgatgggaaggctctggagaggttcctgcaggattactttgatggcaatctgaagagatacctgaagtctgaacctatcccagagagcaatgatgggcctgtgaaggtagtggtagcagagaattttgatgaaatagtgaataatgaaaataaagatgtgctgattgaattttatgccccttggtgtggtcattgtaagaacctggagcccaagtataaagaacttggcgagaagctcagcaaagacccaaatatcgtcatagccaagatggatgccacagccaatgatgtgccttctccatatgaagtcagaggttttcctaccatatacttctctccagccaacaagaagctaaatccaaagaaatatgaaggtggccgtgaattaagtgattttattagctatctacaaagagaagctacaaacccccctgtaattcaagaagaaaaacccaagaagaagaagaaggcacaggaggatctctaaagcagtagccaaacaccactttgtaaaaggactcttccatcagagatgggaaaaccattggggaggactaggacccatatgggaattattacctctcagggccgagaggacagaatggatataatctgaatcctgttaaattttctctaaactgtttcttagctgcactgtttatggaaataccaggaccagtttatgtttgtggttttgggaaaaattatttgtgttgggggaaatgttgtgggggtggggttgagttgggggtattttctaattttttttgta

SEQ ID NO: 191778 - DNA, 1034 bp, Homo Sapiens
ctttgtacaaaaaagttgggcgcgcgcccgacctccgcagtcccagccgagccgcgacccttccggccgtccccaccccacctcgccgccatgcgcctccgccgcctagcgctgttcccgggtgtggcgctgcttcttgccgcggcccgcctcgccgctgcctccgacgtgctagaactcacggacgacaacttcgagagtcgcatctccgacacgggctctgcgggcctcatgctcgtcgagttcttcgctccctggtgtggacactgcaagagacttgcacctgagtatgaagctgcagctaccagattaaaaggaatagtcccattagcaaaggttgattgcactgccaacactaacacctgtaataaatatggagtcagtggatatccaaccctgaagatatttagagatggtgaagaagcaggtgcttatgatggacctaggactgctgatggaattgtcagccacttgaagaagcaggcaggaccagcttcagtgcctctcaggactgaggaagaatttaagaaattcattagtgataaagatgcctctatagtaggttttttcgatgattcattcagtgaggctcactccgagttcctaaaagcagccagcaacttgagggataactaccgatttgcacatacgaatgttgagtctctggtgaacgagtatgatgataatggagagggtatcatcttatttcgtccttcacatctcactaacaagtttgaggacaagactgtggcatatacagagcaaaaaatgaccagtggcaaaattaaaaagtttatccaggaaaacatttttggtatctgccctcacatgacagaagacaataaagatttgatacagggcaaggacttacttattgcttactatgatgtggactatgaaaagaacgctaaaggttccaactactggagaaacagggtaatgatggtggcaaagaaattcctggatgctgggcacaaactcaactttgctgtagctagccgcaaaacctttagccatgaactttctgattttgg

SEQ ID NO: 191779 - DNA, 964 bp, Homo Sapiens; identical to SEQ ID NO: 184284
  misc_feature (584)..(646): n is a, c, g, or t
  misc_feature (686)..(741): n is a, c, g, or t

SEQ ID NO: 191780 - DNA, 1642 bp, Homo Sapiens; identical to SEQ ID NO: 184285

SEQ ID NO: 191781 - DNA, 3137 bp, Homo Sapiens; identical to SEQ ID NO: 184288

SEQ ID NO: 191782 - DNA, 2275 bp, Homo Sapiens; identical to SEQ ID NO: 184290
  misc_feature (99)..(108): n is a, c, g, or t
  misc_feature (1293)..(1301): n is a, c, g, or t
  misc_feature (1311)..(1559): n is a, c, g, or t

SEQ ID NO: 191783 - DNA, 1482 bp, Homo Sapiens; identical to SEQ ID NO: 184291

SEQ ID NO: 191784 - DNA, 791 bp, Homo Sapiens
actttgtacaaaaaagttggcagacgccactttgtacaaaaaagttggccgaggtaaaccgtgtactattagccatggtcaaccccaccgtgttcttcgacattgccgtcgacggcgagcccttgggccgcgtctcctttgagctgtttgcagacaaggtcccaaagacagcagaaaattttcgtgctctgagcactggagagaaaggatttggttataagggttcctgctttcacagaattattccagggtttatgtgtcagggtggtgacttcacacgccataatggcactggtggcaagtccatctatggggagaaatttgaagatgagaacttcatcctaaagcatacgggtcctggcatcttgtccatggcaaatgctggacccaacacaaatggttcccagtttttcatctgcactgccaagactgagtggttggatggcaagcatgtggtgtttggcaaagtgaaagaaggcatgaatattgtggaggccatggagcgctttgggtccaggaatggcaagaccagcaagaagatcaccattgctgactgtggacaactcgaataagtttgacttgtgttttatcttaaccaccagatcattccttctgtagctcaggagagcacccctccaccccatttgctcgcagtatcctagaatctttgtgctctcgctgcagttccctttgggttccatgttttccttgttccctcccatgcctagctggattgcagagttaagtttatgattatgaaataaaaactaaataacaattgtcctcgtttg

SEQ ID NO: 191785 - DNA, 1393 bp, Homo Sapiens; identical to SEQ ID NO: 180268
  misc_feature (282)..(305): n is a, c, g, or t
  misc_feature (1022)..(1035): n is a, c, g, or t

SEQ ID NO: 191786 - DNA, 728 bp, Homo Sapiens
cttaaaaataccaactttgtacaaaaaagttggacccaccgtgtttcttcgacattgccgtcgacggcgagcccttgggccgcgtctcctttgagctgtttgcagacaaggtcccaaagacagcagaaaattttcgtgctctgagcactggagagaaaggatttggttataagggttcctgctttcacagaattattccagggtttatgtgtcagggtggtgacttcacacgccataatggcactggtggcaagtccatctatggggagaaatttgaagatgagaacttcatcctaaagcatacgggtcctggcatcttgtccatggcaaatgctggacccaacacaaatggttcccagtttttcatctgcactgccaagactgagtggttggatggcaagcatgtggtgtttggcaaagtgaaagaaggcatgaatattgtggaggccatggagcactttgggtccaggaatggcaagaccagcaagaagatcaccattgctgactgtggacaactcgaataagtttgacttgtgttttatcttaaccaccagatcattccttctgtagctcaggagagcacccctccaccccatttgctcgcagtatcctagaatctttgtgctctcgctgcagttccctttgggttccatgttttccttgttccctcccatgcctagctggattgcagagttaagtttatgattatgaaataaaaactaaataac

SEQ ID NO: 191787 - DNA, 987 bp, Homo Sapiens; identical to SEQ ID NO: 184292
  misc_feature (243)..(256): n is a, c, g, or t

SEQ ID NO: 191788 - DNA, 942 bp, Homo Sapiens
ctttgtacaaaaaagttggcacagctcccgtcccgttaccgcctcctggccggcctcgcgcctttcaccggcaccttgcgtcggtcgcgccgcggggcctgctcctgccgcgcgcacccccggggcttcggctccggcacgggtcgcgcccagctttcctgcacctgaggccgccggccagccgccgccatgggtgcctacctctcccagcccaacacggtgaagtgctccggggacggggtcggcgccccgcgcctgccgctgccctacggcttctccgccatgcaaggctggcgcgtctccatggaggatgctcacaactgtattcctgagctggacagtgagacagccatgttttctgtctacgatggacatggaggggaggaagttgccttgtactgtgccaaatatcttcctgatatcatcaaagatcagaaggcctacaaggaaggcaagctacagaaggctttagaagatgccttcttggctattgacgccaaattgaccactgaagaagtcattaaagagctggcacagattgcagggcgacccactgaggatgaagatgaaaaagaaaaagtagctgatgaagatgatgtggacaatgaggaggctgcactgctgcatgaagaggctaccatgactattgaagagctgctgacacgctacgggcagaactgtcacaagggccctccccacagcaaatctggaggtgggacaggcgaggaaccagggtcccagggcctcaatggggaggcaggacctgaggactcaactagggaaactccttcacaagaaaatggccccacagccaagcctacacaggcttttcctccaactcggaacgtgggactgaggcagccaagttggtgagcctggcattcccactggtgaggctgggccttcctgctcttcagcctctgacaagctgcctcgagttgc

SEQ ID NO: 191789 - DNA, 1493 bp, Homo Sapiens
aattgatgagcaatgcttttttatccatagaaaactttgtacaaaaaagttggctctccttgcgtcggtcgcgccgcggggcctgctcctgccgcgcgcacccccggggcttcggctccggcacgggtcgcgcccagctttcctgcacctgaggccgccggccagccgccgccatgggtgcctacctctcccagcccaacacggtgaagtgctccggggacggggtcggcgccccgcgcctgccgctgccctacggcttctccgccatgcaaggctggcgcgtctccatggaggatgctcacaactgtattcctgagctggacagtgagacagccatgttttctgtctacgatggacatggaggggaggaagttgccttgtactgtgccaaatatcttcctgatatcatcaaagatcagaaggcctacaaggaaggcaagctacagaaggctttagaagatgccttcttggctattgacgccaaattgaccactgaagaagtcattaaagagctggcacagattgcagggcgacccactgaggatgaagatgaaaaagaaaaagtagctgatgaagatgatgtggacaatgaggaggctgcactgctgcatgaagaggctaccatgactattgaagagctgctgacacgctacgggcagaactgtcacaagggccctccccacagcaaatctggaggtgggacaggcgaggaaccagggtcccagggcctcaatggggaggcaggacctgaggactcaactagggaaactccttcacaagaaaatggccccacagccaaggcctacacaggcttttcctccaactcggaacgtgggactgaggcaggccaagttggtgagcctggcattcccactggtgaggctgggccttcctgctcttcagcctctgacaagctgcctcgagttgctaagtccaagttctttgaggacagtgaggatgagtcagatgaggcggaggaagaagaggaagacagtgaggaatgcagcgaggaagaggatggctacagcagtgaggaggcagagaatgaggaagatgaggatgacaccgaggaggctgaagaggacgatgaagaagaagaagaagagatgatggtgccagggatggaaggcaaagaggagcctggctctgacagtggtacaacagcggtggtggccctgatacgagggaagcagttgattgtagccaacgcaggagactctcgctgtgtggtatctgaggctggcaaagctttagacatgtcctatgatcacaaaccagaggatgaagtagaactagcacgcatcaagaatgctggtggcaaggtcaccatgggatgggcgagtcaacgggggcctcaacctctccagagccattggggaccacttctataagagaaacaagaacctgccacctgaggaacagatgatttcagcccttcctgacatcaaggtgctgactctcactgacgaccatgaattcatggtcattgcctg

SEQ ID NO: 191790 - DNA, 1662 bp, Homo Sapiens; identical to SEQ ID NO: 180270
  misc_feature (190)..(198): n is a, c, g, or t

SEQ ID NO: 191791 - DNA, 2302 bp, Homo Sapiens; identical to SEQ ID NO: 180273
  misc_feature (222)..(247): n is a, c, g, or t

SEQ ID NO: 191792 - DNA, 1049 bp, Homo Sapiens
  misc_feature (894)..(943): n is a, c, g, or t
actttgtacaaaaaagttggcactttttaaaccgtgcagccggagaccagcctacagccgcctgcatctgtatccagcgccaggtcccgccagtcccagctgcgcgcgccccccagtcccgcacccgttcggcccaggctaagttagccctcaccatgccggtcaaaggaggcaccaagtgcatcaaatacctgctgttcggatttaacttcatcttctggcttgccgggattgctgtccttgccattggactatggctccgattcgactctcagaccaagagcatcttcgagcaagaaactaataataataattccagcttctacacaggagtctatattctgatcggagccggcgccctcatgatgctggtgggcttcctgggctgctgcggggctgtgcaggagtcccagtgcatgctgggactgttcttcggcttcctcttggtgatattcgccattgaaatagctgcggccatctggggatattcccacaaggatgaggtgattaaggaagtccaggagttttacaaggacacctacaacaagctgaaaaccaaggatgagccccagcgggaaacgctgaaagccatccactatgcgttgaactgctgtggtttggctgggggcgtggaacagtttatctcagacatctgccccaagaaggacgtactcgaaaccttcaccgtgaagtcctgtcctgatgccatcaaagaggtcttcgacaataaattccacatcatcggcgcagtgggcatcggcattgccgtggtcatgatatttggcatgatcttcagtatgatcttgtgctgtgctatccgcaggaaccgcgagatggtctagagtcagcttacatccctgagcaggaaagtttacccatgaagattggtgggannnnnnnnnnnnnnnnnnnnnnnnnnnnnnnnnnnnnnnnnnnnnnnnnnccactaattttagtattcattctgcattgctagataaaagctgaagttactttatgtttgtcttttaatgcttcattcaatattgacatttgtagttgagcggggg

SEQ ID NO: 191793 - DNA, 1168 bp, Homo Sapiens
  misc_feature (849)..(899): n is a, c, g, or t
ctttgtacaaaaaagttggcatctgtatcccccgccaggtcccgccagtcccagctgcgcgcgccccccagtcccgcacccgttcggcccaggctaagttagccctcaccatgccggtcaaaggaggcaccaagtgcatcaaatacctgctgttcggatttaacttcatcttctggcttgccgggattgctgtccttgccattggactatggctccgattcgactctcagaccaagagcatcttcgagcaagaaactaataataataattccagcttctacacaggggtctatattctgatcggagccggcgccctcatgatgctggtgggcttcctgggctgctgcggggctgtgcaggagtcccagtgcatgctgggactgttcttcggcttcctcttggtgatattcgccattgaaatagctgcggccatctggggatattcccacaaggatgaggtgattaaggaagtccaggagttttacaaggacacctacaacaagctgaaaaccaaggatgagccccagcgggaaacgctgaaagccatccactatgcgttgaactgctgtggtttggctgggggcgtggaacagtttatctcagacatctgccccaagaaggacgtactcgaaaccttcaccgtgaagtcctgtcctgatgccatcaaagaggtcttcgacaataaattccacatcatcggcgcagtgggcatcggcattgccgtggtcatgatatttggcatgatcttcagtatgatcttgtgctgtgctatccgcaggaaccgcgagatggtctagagtcagcttacatccctgagcaggaaagtttacccatgaagattggtgggannnnnnnnnnnnnnnnnnnnnnnnnnnnnnnnnnnnnnnnnnnnnnnnnnnccactaattttagtattcattctgcattgctagataaaagctgaagttactttatgtttgtcttttaatgcttcattcaatattgacatttgtagttgagcggggggtttggtttgctttggtttatattttttcagttgtttgtttttgcttgttatattaagcagaaatcctgcaatgaaaggaactatatttgctagactctatacaatatattgtacataaaagaatttttttgtctttaaatacatacaaatgtctatcaactt

SEQ ID NO: 191794 - DNA, 699 bp, Homo Sapiens; identical to SEQ ID NO: 180274
  misc_feature (44)..(59): n is a, c, g, or t
  misc_feature (542)..(592): n is a, c, g, or t

SEQ ID NO: 191795 - DNA, 1085 bp, Homo Sapiens
  misc_feature (707)..(757): n is a, c, g, or t
  misc_feature (859)..(913): n is a, c, g, or t
tttgtacaaaaaagttggaacttcatccccctggattgccgggattgctgtccttgccattggactatggctccgattcgactctcagaccaagagcatcttccagcaagaaactaataataataattccagcttctacacaggagtctatattctgatcggagccggcgccctcatgatgctggtgggcttcctgggctgctgcggggctgtgcaggagtcccagtgcatgctgggactgttcttcggcttcctcttggtgatattcgccattgaaatagctgcggccatctggggatattcccacaaggatgaggtgattattgaagtccaggagttttacaaggacacctacaacaagctgaaaaccaaggatgagccccagcgggaaacgctgaaagccatccactatgcgttgaactgctgtggtttggctgggggcgtggaacagtttatctcagacatctgccccaagaaggacgtactcgaaaccttcaccgtgaagtcctgtcctgatgccatcaaagaggtcttcgacaataaattccacatcatcggcgcagtgggcatcggcattgccgtggtcatgatatttggcatgatcttcagtatgatcttgtgctgtgctatccgcaggaaccgcgagatggtctagagtcagcttacatccctgagcaggaaagtttacccatgaagattggtgggannnnnnnnnnnnnnnnnnnnnnnnnnnnnnnnnnnnnnnnnnnnnnnnnnnccactaattttagtattcattctgcattgctagataaaagctgaagttactttatgtttgtcttttaatgcttcattcaatattgacatttgtagttgagcnnnnnnnnnnnnnnnnnnnnnnnnnnnnnnnnnnnnnnnnnnnnnnnnnnnnnnnatattaagcagaaatcctgcaatgaaaggtactatatttgctagactctagacaagatattgtacataaaagaatttttttgtctttaaatagatacaaaatgtctatcaactttaatcaagttgttacttatattgaggacaattttgatacataataaaaaaattatgac

SEQ ID NO: 191796 - DNA, 889 bp, Homo Sapiens; identical to SEQ ID NO: 184295
  misc_feature (179)..(233): n is a, c, g, or t
  misc_feature (335)..(385): n is a, c, g, or t

SEQ ID NO: 191797 - DNA, 1048 bp, Homo Sapiens
  misc_feature (874)..(925): n is a, c, g, or t
ttggaaaagtggcagggagtggctgcctgcaaagaccccaagacggcttgaagaaggacgccaggtcccgccagtcccagctgcgcgcgccccccagtcccgcacccgttcggcccaggctaagttagccctcaccatgccggtcaaaggaggcaccaagtgcatcaaatacctgctgttcggatttaacttcatcttctggcttgccgggattgctgtccttgccattggctatggctccgattcgactctcagaccaagagcatcttcgagcaagaaactaataataataattccagcttctacacaggagtctatattctgatcggagccggcgccctcatgatgttggtgggcttcctgggctgctgcggggctgtgcaggagtcccagtgcatgctgggactgttcttcggcttcctcttggtgatattcgccattgaaatagctgcggccatctggggatattcccacaaggatgaggtgattaaggaagtccaggagttttacaaggacacctacaacaagctgaaaaccaaggatgagccccagcgggaaacgctgaaagccatccactatgcgttgaactgctgtggtttggctgggggcgtggaacagtttatctcagacatctgccccaagaaggacgtactcgaaaccttcaccgtgaagtcctgtcctgatgccatcaaagaggtcttcgacaataaattccacatcatcggcgcagtgggcatcggcattgccgtggtcatgatatttggcatgatcttcagtatgatcttgtgctgtgctatccgcaggaaccgcgagatggtctagagtcagcttacatccctgagcaggaaagtttacccatgaagattggtgggannnnnnnnnnnnnnnnnnnnnnnnnnnnnnnnnnnnnnnnnnnnnnnnnnnncactaattttaataattcattctgcatttgctagataaaagctgaattactttatgttttgtcttttaatgcttcattcaaatattgacatttgtatttgaccgggggtttgggtttgctttg

SEQ ID NO: 191798 - DNA, 1118 bp, Homo Sapiens
ctttgtacaaaaaagttgggaaaaccttcctattaaaaattcaggccctttttggacaatttttaaaatttgtatctttactagaacatgagaatctttttcccttggaagcttgaattataaatgtggtgtttggcctgcctcagcagcaccagttgactgctcgtgtgccagcggtgtggggaggacggggcaggacgctgcagctctctccagccctgttggcatcctcagtgcctgcaggcctctcgctgcctgttgggctgtctggggggtggccatttagggatcgtggggacggggtccaccccaagaagaaagaaaggcccgtccacaggcccggctctgggccacgtgccccggaagcaggtgtgtccagagtcagctgagggctctccccacaccacccagcaggcgctggtgctccttctgcctcatgggaccagtccagcttccagccgctctggctcgagggtggtctgagcacttccttctgagtgggcttctctgggagctctccagtggcactgctggacctgcccacgtttctgtaaaatcaggatacgtggctttagtaagcagaccaagcgcttcgtggcagggaaagcagcgtgcggggaagtcactgaaaagtgctgcctaaggaagtttggaaatagtccccgttccagattgccttgaattttaaaacattttgctttgggaaagtaggtcagcagcacctaagatcaaggatgcgttccattttcacacttcacagtcatgaaaactgagaagactgtcttcagcgtgaactaaagttcacaggcagatcactgatccagaacacttcaagaactcgtcaaacagctcgataagcctttttgactgtgtacatctgtaccgggaataacattcctaggctgaaatttccacaaagaataaacctgtacccagttcttcaggctgatttccctgacctcttgggcatttgtatttgtagtaaagtattgcagagattcctaagtattttatagcagccatcaaaattgggactttgtattgtttattcataaaagacacttggtaatagacttcagtgaactctgtatgaatgcagtagtgtgcgtgcaaaatcc

SEQ ID NO: 191799 - DNA, 1168 bp, Homo Sapiens
ttctgcagtgtgaagggaaaactcctggtctttgggtaagtagcacaggtttactcttatgattaaatacacattttatcccagttttgtcagagtactcgagagttagattgatggtcatcttagttctttctgtagccttaattccaaaggtttaagagcagctataagcacaaagtaaggttattttgtttaatagtagccatccactgtggaactagccaaccactgtggaaagaaatacttgccttaaatttcttttcttcgccgagcatcaggaagtaagtgcttatctcttaggatctgttagagttcttgtttctagtaaattttatttcagttttaaagtttaaagtggtttgacttcaaaaaaggttaagcactgtatgagagcctgcttacaatgcccgttgttgctatagcctcagtaaatcttcttataaagcttggtttgtatggctttctaagattttgtttctggttgaatgaatgaagttatgattcaagtttattttgtttcaggcctgtttaaagaagaaaacccgtatgctagatttgaaaacaactaaagcgctccagcacatcagtcccgacgcttcctgtgaggtgcacgctccgcagcccagcccagccgggagaccacgtggccattgcggtctcctgaccttggccagtgaacctgccagccttccaggacaggcggccggagagctgcccctgaaggacagtcctctcgtcttgcagactggtgaccttctattccctgttcatctctgtttctagatttagtcacttgaaataagaaatctttggggtttgggcttttttatactcttctcagtttgtgaaacgctaactgcacacgaagccgcctgacggcacccagcgctgtggctgtcattctcccagggcagaaccctgcgtttctctctgtccactaacaagcttcacacgcaacacagggaagtcggtttgacttttgtcatgaggagaactgaccagccctcatcattccccataaaaccacggacagcgtctgtgtgcgcatcttgagtcttcacacctgttgactcacacggcttttgctgatgacacggggctcagagtacacagtctgataaggacttaacgtcctaacctcaattgtattaaatagcattggggaata

SEQ ID NO: 191800 - DNA, 1828 bp, Homo Sapiens; identical to SEQ ID NO: 184296
  misc_feature (192)..(210): n is a, c, g, or t

SEQ ID NO: 191801 - DNA, 676 bp, Homo Sapiens
ccaactttgtacaaaaaagttgggaaagtaggtcagcagcacctaagatcaaggatgcgttccattttcacacttcacagtcatgaaaactgagaagactgtcttcagcgtgaactaaagttcacaggcagatcactgatccagaacacttcaagaactcgtcaaacagctcgataagcctttttgactgtgtacatctgtaccgggaataacattcctaggctgaaatttccacaaagaatagaacctgtacccagttcttcaggctgatttccctgacctcttgggcatttgtatttgtagtaaagtattgcagagattcctaagtattttatagcagccatcaaaattggactttgtattgtttattcataaaagacacttggtaatagacttcagtgaactctgtatgaatgcagtagtgtgcgtgcaaaatccgcttcctgagcgtagggtgctgagctggcgctagggctcggttgtgaaatacagcgtagtcagcccttgcgctcagtgtagaaacccacgtctgtaaggtcggtcttcgtccatctgcttttttctgaaatacactaagagcagccacaaaactgtaacctcaaggaaaccataaagcttggagtgccttaatttttaaccagtttccaataaaatggtttactacctgcgtgtgttt

SEQ ID NO: 191802 - DNA, 808 bp, Homo Sapiens
actttgtacaaaaaagttggaacctttttaaaaaaatttattggattttcctccctgcttaaaagatttcaccagaaaaccttcatataaaaattcaggccctttttggacaatttttaaaatttgtatctttactagaacatgagaatctttttcccttggaagcttgaattataaatgtggtgtttggcctgcctcagcagcaccagttgactgctcgtgtgccagcggtgtggggaggacggggcaggacgctgcagctctctccagccctgttggcatcctcagtgcctgcaggcctctcgctgcctgttgggctgtctggggggtggccatttagggatcgtggggacggggtccaccccaagaagaaagaaaggcccgtccacaggcccggctctgggccacgtgccccggaagcaggtgtgtccagagtcagctgagggctctccccacaccacccagcaggcgctggtgctccttctgcctcatgggaccagtccagcttccagccgctctggctcgagggtggtctgaccacttccttctgagtgggcttctctgggagctctccagtggccactgctggacctgccccacgtttctgtaaaatcaggatacgtggctttagtaaagcagaccaagcgcttcgtggcatgggaaagcagcgtgcggggaagtcactgaaaagtgctgcctaaagaattttggaaatagtccctgtttcagattgccttgaattttaaaactttttgctttggaaagtaggtcagcagcacctaagattcaaaggatgcgttccattttc

SEQ ID NO: 191803 - DNA, 1953 bp, Homo Sapiens; identical to SEQ ID NO: 184298

SEQ ID NO: 191804 - DNA, 1192 bp, Homo Sapiens; identical to SEQ ID NO: 184299

SEQ ID NO: 191805 - DNA, 1004 bp, Homo Sapiens
  misc_feature (299)..(354): n is a, c, g, or t
aaagggtggaggcaggggcatatcccatccagggaggagggaaggggaatccaggggcagggccagcctctggggcagagccagagcctgggcccagatgctgtggcagaagcagcagtagcactggtgccagcagctgtggttgtagctgctccactgggccgagaaagggctgctgcactggtggatggaggagccacagcctctcctgagctggggggaggcgggacaggtggaaaggggcccatggggggccacagtgggaacatgcctggaggaaaaggaggcaggaggccctnnnnnnnnnnnnnnnnnnnnnnnnnnnnnnnnnnnnnnnnnnnnnnnnnnnnnnnnccctgatccgcaggctccgggggtggtggtgactgcgctggcagcgatgcacgaaggacatccatacggcaggtggggcaggtctgctgccgctggaaccaggagcgcaggcagctggtatggaaaatgtggttgcagggcagtctcttggcaccagtcaccatctcttctcggcagatgatgcagacattgtccattgcctggagctcctctggggtggcatctggatacagggtgttcatgttgcggatggctcggcgagacatgatggcatctgtcacagctttcttgaactgtctcatggccaggtacatgggccggatggcaaagagtgggaaggtgtgcaccttgatcatgatggtcatgaaggccatgtacagcagaaccttgatgaagcctgtaaacagctctgtgtagagcatgtacacagccttgttgtcccaggggttctcactctggaggtccacggagtgcagcacatacttgatgaagatggtgagcaccatcgtcatcaggatggcatactcaaagccaaacaccagctgcacagaggccccacgggtcaggatgctgtgataggcgtggctgacgaagaggaagtccaggatgcccaggaggaacataagagctgtggggacccccacacccaa

SEQ ID NO: 191806 - DNA, 638 bp, Homo Sapiens
ccaactttgtacaaaaaagttgggttatttgcctcctctcagttactcctgaatattctgatttcatacgtacccagggagcatgctgttttgtcaatcaatataaaatattgatgaggtctcccccacccccaggaggttatatgattgctcttctctttataataagagaaacaaattcttattgtgaatcttaacatgctttttagctgtggctatgatggattttattttttcctaggtcaagctgtgtaaaagtcatttatgttatttaaatgatgtactgtactgctgtttacatggacgttttgtgcgggtgctttgaagtgccttgcatcagggattaggagcaattaaattattttttcacgggactgtgtaaagcatgtaactaggtattgctttggtatataactattgtagctttacaagagattgttttatttgaatggggaaaataccctttaaattatgacggacatccactaaagatgggtttgaggattttccaagcgtgtaataatgatgtttttcctaacatgacagatgagtagtaaatgttgatatatcctatacatgacagtgtcagactttttctttaaataatattgaaagattttaaaattcatttgaaagtc

SEQ ID NO: 191807 - DNA, 1677 bp, Homo Sapiens; identical to SEQ ID NO: 184303
  misc_feature (1260)..(1285): n is a, c, g, or t

SEQ ID NO: 191808 - DNA, 2589 bp, Homo Sapiens; identical to SEQ ID NO: 184306
  misc_feature (113)..(144): n is a, c, g, or t
  misc_feature (1551)..(1599): n is a, c, g, or t
  misc_feature (1969)..(1977): n is a, c, g, or t

SEQ ID NO: 191809 - DNA, 1446 bp, Homo Sapiens; identical to SEQ ID NO: 184307
  misc_feature (542)..(590): n is a, c, g, or t
  misc_feature (958)..(966): n is a, c, g, or t

SEQ ID NO: 191810 - DNA, 3058 bp, Homo Sapiens; identical to SEQ ID NO: 184308
  misc_feature (2868)..(2899): n is a, c, g, or t

SEQ ID NO: 191811 - DNA, 1625 bp, Homo Sapiens; identical to SEQ ID NO: 184309

SEQ ID NO: 191812 - DNA, 1014 bp, Homo Sapiens
actttgtacaaaaaagttgggaaaggtaaaacaattagtcaaaatattattgccatcattctacctgtgttatgaaactacttattcatagttaattctcattaacacttacatttccataaagaaaactcaagtattaataaaagagactttactggcttaagagggctgtgaaagatttttgatagtgaatcatgaccctaagggagagatttgtgtgataaaagtattgtatataatagatcagcgatttttgtaaggcaaacagaatttgtaagttggcagatcttcctaagttgcaaaatgtaatgatgagcttggtggagaagaatgagtcgttcttggaatacctatgtgcagccactacccatctcaatgtcaccttgtttgcattcttggatagcttgtatatgtagtagtttgatgaataatttaaagaaaaacacctaaaatttgaaaaatgattgtaggatcaaaaaaggcagatgaaattacttaatactcagtgttttggagagtattccttttagtttgttggttggctggtttgaacgatagaaatatgcagcatgcaatatatgcttatatttcattttaatttctgatatataatgaacttcttgggagaggtactgaatctttgatgttttttgtcattgttctcaagtgcaatataacaatgtaaccaaatctagataatttcaaagttgtcattaatttagtaagcctaatataaacaaatatttgtattatttttgttagcaggaaagagtgattaagtgaggttatttacccctaaatggtccattctgcattgtatttcacgctggaaatgaattattctttaccagttttgaaacactttgaaatatcctaagtaacttggaagctgtgtagtatatcaaattaatttgctacctaataacatagaaagtaaatatctttgtggtcacccacattgggtgagacagaaaatgaatctgttctaaaatttgtaatttgctaacttgattt

SEQ ID NO: 191813 - DNA, 1215 bp, Homo Sapiens; identical to SEQ ID NO: 184310
  misc_feature (1002)..(1033): n is a, c, g, or t

SEQ ID NO: 191814 - DNA, 1156 bp, Homo Sapiens; identical to SEQ ID NO: 184312
  misc_feature (287)..(359): n is a, c, g, or t

SEQ ID NO: 191815 - DNA, 2732 bp, Homo Sapiens; identical to SEQ ID NO: 184313
  misc_feature (323)..(366): n is a, c, g, or t

SEQ ID NO: 191816 - DNA, 1580 bp, Homo Sapiens
cttttcctataaaaagccaactttgtacaaaaaagttgggattccttttgttacctggctagcagggaaaaggggtcgaggccggtcctgacctgttacaatgaagactgacttgctatgtgggattacaccagaagcttgcagtggagtaatggtaaggaaatcaagcaaccttaaatatgtcggctgtataggagcatattctattgcagaagaccttcctatgaagatcatggaatcaaatacgggacattgaactaatacttggactttgatatgaatttctttaacaattttctctgcagtgcaagttattaaactaaagctactctattttcaaaatgtgttccaacagaaatccttcataactcctagcatggtatcttaataaagaataaagttcttttaaaaatctgctctaagtagatttttccccttttttaaattaaggatcccaacagtggtattttgaaatattctcttgaatttgtgcatttaaattttattgcagtggtatagatgaatgccactgatggtatccttaaattttatttctgctcaccaaggttaatcatgattgtctatatcttttttatagtgatcacttttgaattgtgttcagatatgcagtttcaggtgtaatcatcagagctggttagtcaggcattccagatagtggttcttttcagaacctttttaaaagggttggttaactacctcagtagcagaggattgaactataccctgtctgtactgtacatagaaaatctttgtagataaaagcaaggcttgttaaatatgatatgagggtaagattttaatataccaaatgtaacattcttagttgcctttagtttcagaggcttgtaagacttcctcatgaccatcataacaggccttgcttttgtcgtattttgtggctgaaaaagcagccttgcttcttcagatattgtagttatttggatgtataatagtttagcaagatgttacttttgtaagacatcagatgttcaaaaaagtgcatccgaacttgtactaaatactgcagtgtccctttataaaaagtcagactaaaactgacaattgtacagcgaagcctgacatttggatattttgaagttttttcataaatcatagaaattagtatatggctgtagtttagctttttaggtaaaaggtatgtttcattagtgcatttcttcctgctgatcactgtaaacatgtgaatcagctttccatttcttatgcaggtcatgataacttgtagagtagagtacaatcatttgtgctatgtttttaattttctaaagcaccttgatgacagtgagtgtccagtggtgaagcatcctctattgaaccaccctcaaaaatttttttgccaagtcctaagttgatagcttaaagtaaaaagtgaaaattatagtttcattaggacttggtgtaaagaaatcccctccccccttccccaaagggatactgcagttatatcacatacccaataggcaccacgatgaagatcaagagcttatacttaattaaggttttatacactccagttccccagtaaatgcaaatttaac

SEQ ID NO: 191817 - DNA, 2500 bp, Homo Sapiens; identical to SEQ ID NO: 184315
  misc_feature (2324)..(2343): n is a, c, g, or t

SEQ ID NO: 191818 - DNA, 914 bp, Homo Sapiens; identical to SEQ ID NO: 184318

SEQ ID NO: 191819 - DNA, 4244 bp, Homo Sapiens; identical to SEQ ID NO: 184319
  misc_feature (2382)..(2441): n is a, c, g, or t

SEQ ID NO: 191820 - DNA, 1278 bp, Homo Sapiens
cttttaaaagccaactttgtacaaaaaagttggctcatagatgcggagaagggaggcagcctggtggtgggggacttcgagatcgcagccaagtacgtgtgtcggaccctggagacacagccgcagagcagccccttctcatgcatggacctcacctacgtcagcctgctactccaggagttcggctttcccaggagcaaagtgctgaagctcactcggaaaattgacaatgttgagaccagctgggctctgggggccatttttcattacatcgactccctgaacagacagaagagtccagcctcatagtggccgagccatccctgtccccgtcagcagtgtctgtgtgtctgcataaaccctcctgtcctggacgtgacttcatcctgaggagccacagcacaggccgtgctggcactttctgcacactggctctgggacttgcagaaggcctggtgctgccctggcatcagcctcttccagtcacatctggccagagggctgtctggacctgggccctgctcaatgccacctgtctgcctgggctccaagtgggcaggaccaggacagaaccacaggcacacactgagggggcagtgtggctccctgcctgtcccatccccatgccccgtccgcggggctgtggctgctgctgtgcatgtccctgcgatgggagtcttgtctcccagcctgtcagtttcctccccagggcagagctccccttcctgcaagagtctgggaggcggtgcaggctgtcctggctgctctggggaagccgagggacagccataacacccccgggacagtaggtctgggcggcaccactgggaactctggacttgagtgtgtttgcctcttccttgggtatgaatgtgtgagttcacccagaggcctgctctcctcacacattgtgtggtttggggttaatgatggagggagacacctcctcatagacggcaggtgcccacctttcagggagtctcccagcatgggcggatgccgggcatgagctgctgtaaactatttgtggctgtgctgcttgagtgacgtctctgtcgtgtgggtgccaagtgcttgtgtagaaactgtgttctgagccccctttctggacaccaactgtgtcctgtgaatgtatcgctactgtgagctgttcccgcctagccagggccatgtcttatgtgcagctgtgccacgggtcagctgagccacagtcccagaaccaagctctcggtgtctcgggccaccatccgccacctcgggctgaccccaccttcctcc

SEQ ID NO: 191821 - DNA, 966 bp, Homo Sapiens; identical to SEQ ID NO: 184321

SEQ ID NO: 191822 - DNA, 943 bp, Homo Sapiens
ttggctccacgtgcatggggcggagcccaggccctagggaatcgtggggtcgtatcccgcgggtggaggccggggtggcgccggccggggcgggggagcccaaaagaccggctgccgcctgctccccggaaaagggcactcgtctccgtgggtgtggcggagcgcgcggtgcatggaatgggctatgtgaatgaaaaaaggtatccgttatgaaacttccagaaaaacgagctacatttttcagccgcagcacggtccttggcaaacaaggatgagaaaaatatccaaccacgggagcctgcgggtggcgaaggtggcataccccctggggctgtgtgtgggcgtgttcatctatgttgcctacatcaagtggcaccgggccaccgccacccaggccttcttcagcatcaccagggcagccccgggggcccggtggggtcagcaggcccacagccccctggggacagctgcagacgggcacgaggtcttctacgggatcatgtttgatgcaggaagcactggcacccgagtacacgtcttccagttcacccggccccccagagaaactcccacgttaacccacgaaaccttcaaagcactgaagccaggtctttctgcctatgctgatgatgttgaaaagagcgctcagggaatccgggaactactggatgttgctaaacaggacattccgttcgacttctggaaggccacccctctggtcctcaaggccacagctggcttacgcctgttacctggagaaaaggcccagaagttactgcagaaggtgaaagaagtatttaaagcatcgcctttccttgtaggggatgactgtgttttccatcatgaacggaacagatgaaaggcgtttcggcgtggatcaccatcaacttcctgacaggcagcttgaaaactccaggagggagcagcgtggggcatgctggga

SEQ ID NO: 191823 - DNA, 940 bp, Homo Sapiens
ttgggtccccagcggcaagcctgcacgagctgtgtgctgccagagtgtcagaggtccttcaaaacagagtgcacaggacggaggaagtgaagcatgtggacttctatgctttctcctactattacgaccttgcagctggtgtgggcctcatagatgcggagaagggaggcagcctggtggtgggggacttcgagatcgcagccaagtacggtgggagtcacctggagcgtgaagggacgtgtctcatccccagtgtgtcggaccctggagacacagccgcagagcagccccttctcatgcatggacctcacctacgtcagcctgctactccaggagttcggctttcccaggagcaaagtgctgaagctcactcggaaaattgacaatgttgagaccagctgggctctgggggccatttttcattacatcgactccctgaacagacagaagagtccagcctcatagtggccgagccatccctgtccccgtcagcagtgtctgtgtgtctgcataaaccctcctgtcctggacgtgacttcatcctgaggagccacagcacaggccgtgctggcactttctgcacactggctctgggacttgcagaaggcctggtgctgccctggcatcagcctcttccagtcacatctggccagagggctgtctggacctgggccctgctcaatgccacctgtctgcctgggctccaagtgggcaggaccaggacagaaccacaggcacacactgagggggcagtgtggctccctgcctgtcccatccccatgccccgtccgcggggctgtggctgctgctgtgcatgtccctgcgatgggagtcttgtctcccagcctgtcagtttcctccccagggcagagctccccttcctgcaagagtctgggaaggcggtgcacgctgtcctggctgctctggggaagccgaggga

SEQ ID NO: 191824 - DNA, 2473 bp, Homo Sapiens; identical to SEQ ID NO: 180277

SEQ ID NO: 191825 - DNA, 1433 bp, Homo Sapiens; identical to SEQ ID NO: 184324
  misc_feature (306)..(337): n is a, c, g, or t
  misc_feature (1153)..(1192): n is a, c, g, or t

SEQ ID NO: 191826 - DNA, 633 bp, Homo Sapiens
ttgtacaaaaaagttggaaaagtaaaaggccaacatttaattattttgcaaagcaacctaagagctaaagatgtaatttttcttgcaattgtaaatcttttgtgtctcctgaagacttcccttaaaattagctctgagtgaaaaatcaaaagagacaaaagacatcttcgaatccatatttcaagcctggtagaattggcttttctagcagaacctttccaaaagttttatattgagattcataacaacaccaagaattgattttgtagccaacattcattcaatactgttatatcagaggagtaggagagaggaaacatttgacttatctggaaaagcaaaatgtacttaagaataagaataacatggtccattcacctttatgttatagatatgtctttgtgtaaatcatttgttttgagttttcaaagaatagcccattgttcattcttgtgctgtacaatgaccactgttattgttactttgacttttcagagcacacccttcctctggtttttgtatatttattgatggatcaataataatgaggaaagcatgatatgtatattgctgagttgaaagcacttattggaaaatattaaaaggctaacattaaaagactaaaggaaacag

SEQ ID NO: 191827 - DNA, 2326 bp, Homo Sapiens; identical to SEQ ID NO: 180278
  misc_feature (511)..(523): n is a, c, g, or t
  misc_feature (547)..(573): n is a, c, g, or t

SEQ ID NO: 191828 - DNA, 1100 bp, Homo Sapiens
  misc_feature (879)..(929): n is a, c, g, or t
ttgggtatgacaaacttcactctatttctccctatttatggataacaagtggaaagcttttgcagcaattgtgtgttctggagacaagcacatggtgggtggtgatcttacaaatacgggttcatcactgattccacctccacacagataggaatgatgtcacaggtggaagaagagacccaaatcattctgaaggctcaactactttactggaaggttatacctctcattacccacacacgaaggaaagcaggaccttcatcccagtgacctcagctaagactgggtcctttggagttactgcagttactgttggagattccaactctaatgtcaatcgttccttatcaggagaccaagacacattccaccccagtggggggtcccataccactcatggatctgaatcagatggacactcacatgggagtcaagaaggtggagcaaacacaacctctggtcctataaggacaccccaaattccagaatggctgatcatcttggcatccctcttggccttggctttgattcttgcagtttgcattgcagtcaacagtcgaagaaggtgtgggcagaagaaaaagctagtgatcaacagtggcaatggagctgtggaggacagaaagccaagtggactcaacggagaggccagcaagtctcaggaaatggtgcatttggtgaacaaggagtcgtcagaaactccagaccagtttatgacagctgatgagacaaggaacctgcagaatgtggacatgaagattggggtgtaacacctacaccattatcttggaaagaaacaaccgttggaaacataaccattacagggagctgggacacttaacagatgcaatgtgctactgattgtttcattgcgaatcnnnnnnnnnnnnnnnnnnnnnnnnnnnnnnnnnnnnnnnnnnnnnnnnnnnaaagtcaggtccaatttgtaaaaacagcattgctttctgaaattagggcccaattaataatcagcaagaatttgatcgttccagttcccacttggaggcctttcatccctcgggtgtgctatggatggcttctacaaaactacacatatgtattcctgatcgccaaccttt

SEQ ID NO: 191829 - DNA, 1170 bp, Homo Sapiens
  misc_feature (174)..(224): n is a, c, g, or t
  misc_feature (935)..(969): n is a, c, g, or t
ttgggtttatgacagctgatgagacaaggaacctgcagaatgtggacatgaagattggggtgtaacacctacaccattatcttggaaagaaacaaccgttggaaacataaccattacagggagctgggacacttaacagatgcaatgtgctactgattgtttcattgcgaatcnnnnnnnnnnnnnnnnnnnnnnnnnnnnnnnnnnnnnnnnnnnnnnnnnnnaaagtcaggtccaatttgtaaaaacagcattgctttctgaaattagggcccaattaataatcagcaagaatttgatcgttccagttcccacttggaggcctttcatccctcgggtgtgctatggatggcttctaacaaaaactacacatatgtattcctgatcgccaacctttcccccaccagctaaggacatttcccagggttaatagggcctggtccctgggaggaaatttgaatgggtccattttgcccttccatagcctaatccctgggcattgctttccactgaggttgggggttggggtgtactagttacacatcttcaacagaccccctctagaaatttttcagatgcttctgggagacacccaaagggtgaagctatttatctgtagtaaactatttatctgtgtttttgaaatattaaaccctggatcagtcctttgatcagtataattttttaaagttactttgtcagaggcacaaaagggtttaaactgattcataataaatatctgtacttcttcgatcttcaccttttgtgctgtgattcttcagtttctaaaccagcactgtctgggtccctacaatgtatcaggaagagctgagaatggtaaggagactcttctaagtcttcatctcagagaccctgagttcccactcagacccactcagccaaatctcatggaagaccaaggagggcagcactgnnnnnnnnnnnnnnnnnnnnnnnnnnnnnnnnnnngacactgtccaaaggttttccatcctgtcctggaatcagagttggaagctgaggagcttcagcctcttttatggtttaatggccacctgttctctcctgtgaaaagctttgcaaagtcacattaagtttgcatgacctgttatccctggggccctatttcatagaggctggccctattagtgatttccaaaaacaatatgg

SEQ ID NO: 191830 - DNA, 1893 bp, Homo Sapiens; identical to SEQ ID NO: 184325
  misc_feature (1574)..(1626): n is a, c, g, or t

SEQ ID NO: 191831 - DNA, 2717 bp, Homo Sapiens; identical to SEQ ID NO: 184326
  misc_feature (900)..(950): n is a, c, g, or t
  misc_feature (1660)..(1692): n is a, c, g, or t
  misc_feature (2508)..(2547): n is a, c, g, or t

SEQ ID NO: 191832 - DNA, 451 bp, Homo Sapiens
taatgccaactttgtacaaaaaagttggctgaagacttcccttaaaattagctctgagtgaaaaatcaaaagagacaaaagacatcttcgaatccatatttcaagcctggtagaattggcttttctagcagaacctttccaaaagttttatattgagattcataacaacaccaagaattgattttgtagccaacattcattcaatactgttatatcagaggagtaggagagaggaaacatttgacttatctggaaaagcaaaatgtacttaagaataagaataacatggtccattcacctttatgttatagatatgtctttgtgtaaatcatttgttttgagttttcaaagaatagcccattgttcattcttgtgctgtaccatgaccactgttattgttactttgacttttcagagcacacccttcctctggtttttgtatatttattga

SEQ ID NO: 191833 - DNA, 1019 bp, Homo Sapiens
ccttaaaatgccaactttgtacaaaaaagttgggaaaagcacccagccactccaggacaaggttcaaaatggttacaacagcctctacctgtcgccccagggagaaaggggtagtgatacaagtctcatagccagagatggttttccactccttctagatattcccaaaaagaggctgagacaggaggttattttcaattttattttggaattaaatacttttttccctttattactgttgtagtccctcacttggatatacctctgttttcacgatagaaataagggaggtctagagcttctattccttggccattgtcaacggagagctggccaagtcttcacaaacccttgcaacattgcctgaagtttatggaataagatgtattctcactcccttgatctcaagggcgtaactctggaagcacagcttgactacacgtcatttttaccaatgattttcaggtgacctgggctaagtcatttaaactgggtctttataaaagtaaaaggccaacatttaattattttgcaaagcaacctaagagctaaagatgtaatttttcttgcaattgtaaatcttttgtgtctcctgaagacttcccttaaaattagctctgagtgaaaaatcaaaagagacaaaagacatcttcgaatccatatttcaagcctggtagaattggcttttctagcagaacctttccaaaagttttatattgagattcataacaacaccaagaattgattttgtagccaacattcattcaatactgttatatcagaggagtaggagagaggaaacatttgacttatctggaaagcaaatgtacttaaaaataagaataacatggtccattcacctttatgttatagatatgtctttgtgtaaatcatttgttttgagttttcaaagaatagcccattgttcattcttgtgctgtacaatgaccactgttaatggttactttgacttttcaaagcacaccccttcctctggtttttgtatattattgatggat

SEQ ID NO: 191834 - DNA, 1189 bp, Homo Sapiens; identical to SEQ ID NO: 184327
  misc_feature (193)..(225): n is a, c, g, or t
  misc_feature (1036)..(1080): n is a, c, g, or t

SEQ ID NO: 191835 - DNA, 784 bp, Homo Sapiens
tttgtacaaaaaagttggctaacacgtgcgcgagtcgggggctcgcacgaaagccgccgtggcgcaatgaaggtgaaggccggcgcgctcgccggccgaggtgggatcccgaggcctctccagtccgccgagggcgcaccaccggcccgtctcgcccgccgcgccggggaggtggagcacgagcgcacgtgttaggacccgaaagatggtgaactatgcctgggcagggcgaagccagaggaaactctggtggaggtccgtagcggtcctgacgtgcaaatcggtcgtccgacctgggtataggggcgaaagactaatcgaaccatctagtagctggttccctccgaagtttccctcaggatagctggcgctctcgcagacccgacgcacccccgccacgcagttttatccggtaaagcgaatgattagaggtcttggggccgaaacgatctcaacctattctcaaactttaaatgggtaagaagcccggctcgctggcgtggagccgggcgtggaatgcgagtgcctagtgggccacttttggtaagcagaactggcgctgcgggatgaaccgaacgccgggttaaggcgcccgatgccgacgctcatcagaccccagaaaaggtgttggttgatatagacagcaggacggtggccatggaagtcggaatccgctaaggagtgtgtaacaactcacctgccgaatcaactagccctgaaaatggatggcgctggagcgtcgggcccatacccggccgtcgccggcagtcgagagtggacggga

SEQ ID NO: 191836 - DNA, 953 bp, Homo Sapiens
gtatggcccgacgctccagcgccatccattttcagggctagttgattcggcaggtgagtggtacacactccttagcggaatcccgactttccatggccaccgtctgctgtctatatcaaccaacaccttttctgggggtctgatgagcgtcggcatcgggcgccttaacccggcgttcggttcatcccgcagcgccagttctgcttaccaaaagtggcccactaggcactcgcattccacgcccggctccacgccagcgagccgggcttcttacccatttaaagtttgagaataggttgagatcgtttcggccccaagacctctaatcattcgctttaccggataaaactgcgtggcgggggtgcgtcgggtctgcgagagcgccagctatcctgagggaaacttcggagggaaccagctactagatggttcgattagtctttcgcccctatacccaggtcggacgaccgatttgcacgtcaggaccgctacggacctccaccagagtttcctctggcttcgccctgcccaggcatagttcaccatctttcgggtcctaacacgtgcgctcgtgctccacctccccggcgcggcgggcgagacgggccggtggtgcgccctcggcggactggagaggcctcgggatcccacctcggccggcgagcgcgccggccttcaccttcattgcgccacggcggctttcgtgcgagcccccgactcgcgcacgtgttagactccttggtccgtgttacaagacgggtcgggtgggtagccgacgtcgccgccgaccccgtgcgctcgctccgccgtccccctcttcgggggacgcgcgcgtggccccgagagaacctcccccgggccggacggcgcgacccgcccggggcgcattggggacagtccgccccgccccccgacccgcgcgcggcacccctttcggtcgccggggcccaact

SEQ ID NO: 191837 - DNA, 1376 bp, Homo Sapiens; identical to SEQ ID NO: 180280
  misc_feature (427)..(466): n is a, c, g, or t
  misc_feature (1198)..(1216): n is a, c, g, or t

SEQ ID NO: 191838 - DNA, 1403 bp, Homo Sapiens; identical to SEQ ID NO: 180281
  misc_feature (121)..(160): n is a, c, g, or t
  misc_feature (887)..(895): n is a, c, g, or t

SEQ ID NO: 191839 - DNA, 1602 bp, Homo Sapiens
  misc_feature (1275)..(1285): n is a, c, g, or t
ttgggttggcgccgccgaagaagcatcgttaaagtctctcttcaccctgccgtcatgtctaagtcagagtctcctaaagagcccgaacagctgaggaagctcttcattggagggttgagctttgaaacaactgatgagagcctgaggagccattttgagcaatggggaacgctcacggactgtgtggtaatgagagatccaaacaccaagcgctccaggggctttgggtttgtcacatatgccactgtggaggaggtggatgcagctatgaatgcaaggccacacaaggtggatggaagagttgtggaaccaaagagagctgtctccagagaagattctcaaagaccaggtgcccacttaactgtgaaaaagatatttgttggtggcattaaagaagacactgaagaacatcacctaagagattattttgaacagtatggaaaaattgaagtgattgaaatcatgactgaccgaggcagtggcaagaaaaggggctttgcctttgtaacctttgacgaccatgactccgtggataagattgtcattcagaaataccatactgtgaatggccacaactgtgaagttagaaaagccctgtcaaagcaagagatggctagtgcttcatccagccaaagaggtcgaagtggttctggaaactttggtggtggtcgtggaggtggtttcggtgggaatgacaacttcggtcgtggaggaaacttcagtggtcgtggtggctttggtggcagccgtggtggtggtggatatggtggcagtggggatggctataatggatttggtaatgatggaagcaattttggaggtggtggaagctacaatgattttgggaattacaacaatcagtcttcaaattttggacccatgaagggaggaaattttggaggcagaagctctggcccctatggcggtggaggccaatactttgcaaaaccacgaaaccaaggtggctatggcggttccagcagcagcagtagctatggcagtggcagaagattttaattaggaaacaaagcttagcaggagaggagagccagagaagtgacagggaagctacaggttacaacagatttgtgaactcagccaagcacagtggtggcagggcctagctgctacaaagaagacatgttttagacaaatactcatgtgtatgggcaaaaaactcgaggactgtatttgtgactaattgtataacaggttattttagtttctgttctgtggaaagtgtaaagcattccaacaaagggttttaatgtagannnnnnnnnnngcaccccatgctgttgattgctaaatgtaacagtctgatcgtgacgctgaataaatgtcttttttttaatgtgctgtgtaaagttagtctactcttaagccatcttggtaaatttccccaacagtgtgaagttagaattccttcagggtgatgccaggttctatttggaatttatatacaacctgcttgggtggagaagccattgtcttcggaaaccttggtgtagttgaactgatagttactgttgtgacctgaagttcaccattaaaaagaattacccaagcaaatcatggaatggttataaaagtgattgttgg

SEQ ID NO: 191840 - DNA, 1000 bp, Homo Sapiens
  misc_feature (809)..(865): n is a, c, g, or t
agccacatgattttcttaatattttcttttctctatcttactttatcgtaagaatacagtgagacacgttcatcagcttgttcttttctgcccgcggacgccactgaagaagcatcgttaaagtctctcttcaccctgccgtcatgtctaagtcagagtctcctaaagagcccgaacagctgaggaagctcttcattggagggttgagctttgaaacaactgatgagagcctgaggagccattttgagcaatggggaacgctcacggactgtgtggtaatgagagatccaaacaccaagcgctccaggggctttgggtttgtcacatatgccactgtggaggaggtggatgcagctatgaatgcaaggccacacaaggtggatggaagagttgtggaaccaaagagagctgtctccagagaagattctcaaagaccaggtgcccacttaactgtgaaaaagatatttgttggtggcattaaagaagacactgaagaacatcacctaagagattattttgaacagtatggaaaaattgaagtgattgaaatcatgactgaccgaggcagtggcaagaaaaggggctttgcctttgtaacctttgacgaccatgactccgtggataagattgtcattcagaaataccatactgtgaatggccacaactgtgaagttagaaaagccctgtcaaagcaagagatggctagtgcttcatccagccaaagaggtcgaagtggttctggaaactttggtggtggtcgtggaggtggtttcggtgggaatgacaacttcggtcgtggaggaaacttnnnnnnnnnnnnnnnnnnnnnnnnnnnnnnnnnnnnnnnnnnnnnnnnnnnnnnnnnggatggctataatggatttggtaatgatggaagcaattttggaggtggtggaagctacaatgattttgggaattacaacaatcagtcttcaaattttggacccatgaacggaggaaattttggaggcagaagctc

SEQ ID NO: 191841 - DNA, 1269 bp, Homo Sapiens; identical to SEQ ID NO: 184331
  misc_feature (310)..(366): n is a, c, g, or t
  misc_feature (865)..(875): n is a, c, g, or t

SEQ ID NO: 191842 - DNA, 912 bp, Homo Sapiens
  misc_feature (706)..(762): n is a, c, g, or t
ccaactttgtacaaaaaagtggctctcttcaccctgccgtcatgtctaagtcagagtctcctaaagagcccgaacagctgaggaagctcttcattggagggttgagctttgaaacaactgatgagagcctgaggagccattttgagcaatggggaacgctcacggactgtgtggtaatgagagatccaaacaccaagcgctccaggggctttgggtttgtcacatatgccactgtggaggaggtggatgcagctatgaatgcaaggccacacaaggtggatggaagagttgtggaaccaaagagagctgtctccagagaagattctcaaagaccaggtgcccacttaactgtgaaaaagatatttgttggtggcattaaagaagacactgaagaacatcacctaagagattattttgaacagtatggaaaaattgaagtgattgaaatcatgactgaccgaggcagtggcaagaaaaggggctttgcctttgtaacctttgacgaccatgactccgtggataagattgtcattcagaaataccatactgtgaatggccacaactgtgaagttagaaaagccctgtcaaagcaagagatggctagtgcttcatccagccaaagaggtcgaagtggttctggaaactttggtggtggtcgtggaggtggtttcggtgggaatgacaacttcggtcgtggaggaaactnnnnnnnnnnnnnnnnnnnnnnnnnnnnnnnnnnnnnnnnnnnnnnnnnnnnnnnnngggatggctataatggatttggtaatgatggaagcaattttggaggtggtggaagctacaatgattttgggaattacaacaatcagtcttcaaattttggacccatgaagggaggaaattttggaggcagaagctctggcccctatggcg

SEQ ID NO: 191843 - DNA, 1210 bp, Homo Sapiens; identical to SEQ ID NO: 184332
  misc_feature (212)..(262): n is a, c, g, or t
  misc_feature (765)..(774): n is a, c, g, or t

SEQ ID NO: 191844 - DNA, 1313 bp, Homo Sapiens
  misc_feature (548)..(558): n is a, c, g, or t
ttggggcagagtctcctaaatagcccgaacagctgaggaagctcttcattggagggttgagctttgaaacaactgatgagagcctgaggagccattttgagcaatggggaacgctcacggactgtgtggtaatgagagatccaaacaccaagcgctccaggggctttgggtttgtcacatatgccactgtggaggaggtggatgcagctatgaatgcaaaaccacgaaaccaaggtggctatggcggttccagcagcagcagtagctatggcagtggcagaagattttaattaggaaacaaagcttagcaggagaggagagccagagaagtgacagggaagctacaggttacaacagatttgtgaactcagccaagcacagtggtggcagggcctacctgctacaaagaagacatgttttagacaaatactcatgtgtatgggcaaaaaactcgaggactgtatttgtgactaattgtataacaggttattttagtttctgttctgtggaaagtgtaaagcattccaacaaagggttttaatgtagannnnnnnnnnngcaccccatgctgttgattgctaaatgtaacagtctgatcgtgacgctgaataaatgtcttttttttaatgtgctgtgtaaagttagtctactcttaagccatcttggtaaatttccccaacagtgtgaagttagaattccttcagggtgatgccaggttctatttggaatttatatacaacctgcttgggtggagaagccattgtcttcggaaaccttggtgtagttgaactgatagttactgttgtgacctgaagttcaccattaaaagggattacccaagcaaaatcatggaatggttataaaagtgattgttggcacatcctatgcaatatatctaaattgaataatggtaccagataaaattatagatgggaatgaagcttgtgtatccattatcatgtgtaatcaataaacgatttaattctcttgaatgaaatgacaactgtatggatttgggactggcagagatttggactttccctacccactccccctgcctagaccgctagaagccccctctcttccatcctcccggggcgggggtgagctgggctcagctgccaaaggcgggcggggcggagccaggagccccacggagcgctgcggagcgaacctcacctttccagggcgcaagtgtgagccactgccccatgttgtgttgatgccaatctgccatgctagcctgtctaccagggccaggtgacctgtcctttcagctttctttctcacacgccgatgaacactgggacttc

SEQ ID NO: 191845 - DNA, 1041 bp, Homo Sapiens
  misc_feature (866)..(920): n is a, c, g, or t
ctgagagagaagaagcactagggtggggcaagattaccaaggaccagcgggtaatgtttgagtccgatggatgggatccttatcttgaaaagactgtttcacgaatacatatttttatgtcatttagaaaaatctcgcttttctgcccgtggacgccgccgaagaagcatcgttaaagtctctcttcaccctgccgtcatgtctaagtcagagtctcctaaagagcccgaacagctgaggaagctcttcattggagggttgagctttgaaacaactgatgagagcctgaggagccattttgagcaatggggaacgctcacggactgtgtggtaatgagagatccaaacaccaagcgctccaggggctttgggtttgtcacatatgccactgtggaggaggtggatgcagctatgaatgcaaggccacacaaggtggatggaagagttgtggaaccaaagagagctgtctccagagaagattctcaaagaccaggtgcccacttaactgtgaaaaagatatttgttggtggcattaaagaagacactgaagaacatcacctaagagattattttgaacagtatggaaaaattgaagtgattgaaatcatgactgaccgaggcagtggcaagaaaaggggctttgcctttgtaacctttgacgaccatgactccgtggataagattgtcattcagaaataccatactgtgaatggccacaactgtgaagttagaaaagccctgtcaaagcaagagatggctagtgcttcatccagccaaagaggtcgaagtggttctggaaactttggtggtggtcgtggaggtggtttcggtgggaatgacaacttcggtcgtggaggaaacttcannnnnnnnnnnnnnnnnnnnnnnnnnnnnnnnnnnnnnnnnnnnnnnnnnnnnnnggatggctataatggatttggtaatgatggaagcaattttggaggtggtggaagctacaatgattttgggaattacaacaatcagtcttcaaattttggacccatgaaggaggaaattttg

SEQ ID NO: 191846 - DNA, 1326 bp, Homo Sapiens
  misc_feature (1271)..(1282): n is a, c, g, or t
caactttgtacaaaaaagttggcgttaaagtctctcttcaccctgccgtcatgtctaagtcagagtctcctaaagagcccgaacagctgaggaagctcttcattggagggttgagctttgaaacaactgatgagagcctgaggagccattttgagcaatggggaacgctcacggactgtgtggtaatgagagatccaaacaccaagcgctccaggggctttgggtttgtcacatatgccactgtggaggaggtggatgcagctatgaatgcaaggccacacaaggtggatggaagagttgtggaaccaaagagagctgtctccagagaagattctcaaagaccaggtgcccacttaactgtgaaaaagatatttgttggtggcattaaagaagacactgaagaacatcacctaagagattattttgaacagtatggaaaaattgaagtgattgaaatcatgactgaccgaggcagtggcaagaaaaggggctttgcctttgtaacctttgacgaccatgactccgtggataagattgtcattcagaaataccatactgtgaatggccacaactgtgaagttagaaaagccctgtcaaagcaagagatggctagtgcttcatccagccaaagaggtcgaagtggttctggaaactttggtggtggtcgtggaggtggtttcggtgggaatgacaacttcggtcgtggaggaaacttcagtggtcgtggtggctttggtggcagccgtggtggtggtggatatggtggcagtggggatggctataatggatttggtaatgatggaagcaattttggaggtggtggaagctacaatgattttgggaattacaacaatcagtcttcaaattttggacccatgaagggaggaaattttggaggcagaagctctggcccctatggcggtggaggccaatactttgcaaaaccacgaaaccaaggtggctatggcggttccagcagcagcagtagctatggcagtggcagaagattttaattaggaaacaaagcttagcaggagaggagagccagagaagtgacagggaagctacaggttacaacagatttgtgaactcagccaagcacagtggtggcagggcctagctgctacaaagaagacatgttttagacaaatactcatgtgtatgggcaaaaaactcgaggactgtatttgtgactaattgtataacaggttattttagtttctgttctgtggaaagtgtaaagcattccaacaaagggttttaatgtagannnnnnnnnnnngcaccccatgctgttgattgctaaatgtaacagtctgatcgtga

SEQ ID NO: 191847 - DNA, 1551 bp, Homo Sapiens; identical to SEQ ID NO: 184333
  misc_feature (86)..(95): n is a, c, g, or t
  misc_feature (923)..(973): n is a, c, g, or t

SEQ ID NO: 191848 - DNA, 883 bp, Homo Sapiens
  misc_feature (702)..(752): n is a, c, g, or t
ttggagcatcgttaaagtctctcttcaccctgccgtcatgtctaagtcagagtctcctaaagagcccgaacagctgaggaagctcttcattggagggttgagctttgaaacaactgatgagagcctgaggagccattttgagcaatggggaacgctcacggactgtgtggtaatgagagatccaaacaccaagcgctccaggggctttgggtttgtcacatatgccactgtggaggaggtggatgcagctatgaatgcaaggccacacaaggtggatggaagagttgtggaaccaaagagagctgtctccagagaagattctcaaagaccaggtgcccacttaactgtgaaaaagatatttgttggtggcattaaagaagacactgaagaacatcacctaagagattattttgaacagtatggaaaattgaagtgattgaaatcatgactgaccgaggcagtggcaagaaaaggggctttgcctttgtaacctttgacgaccatgactccgtggataagattgtcattcagaaataccatactgtgaatggccacaactgtgaagttagaaaagccctgtcaaagcaagagatggctagtgcttcatccagccaaagaggtcgaagtggttctggaaactttggtggtggtcgtggaggtggtttcggtgggaatgacaacttcggtcgtggaggaaacttnnnnnnnnnnnnnnnnnnnnnnnnnnnnnnnnnnnnnnnnnnnnnnnnnnncagtggggatggctataatggatttggtaatgatggaagcaattttggaggtggtggaagctacaatgattttgggaattacaacaatcagtcttcaaattttgggatccatgaagggaggaaattttgga

SEQ ID NO: 191849 - DNA, 921 bp, Homo Sapiens
ttggctgagcctcactttcccatttagtgagacagggatggtaactgccccttgcagggtggttttgagcagtaaatgtagtgtgcctggcttgctgggcaggcctggtggccatgatgatcaggtgtgtgggagttctggggagactccaagaactaccaggaacagggatacgagtgccaggctgcatctcttgctcctctgcagagtcagcaggcttcttctcagagatgacagaagacgagttggtggtgctgcagcagatgttctttggcatcatcatctgtgcactggccacgctggctgctaagggcgacttggtgttcaccgccatcttcattggggctgtggcggccatgactggctactggttgtcagagcgcagtgaccgtgtgctggagggcttcatcaagggcagataatcgcggccaccacctgtaggacctcctcccacccacgctgcccccagagcttgggctgccctcctgctggacactcaggacagcttggtttatttttgagagtggggtaagcacccctacctgccttacagagcagcccaggtacccaggcccgggcagacaaggcccctggggtaaaaagtagccctgaaggtggataccatgagctcttcacctggcggggactggcaggcttcacaatgtgtgaatttcaaaagtttttccttaatggtggctgctagagctttggcccctgcttagattaatggtcctcacaggggtggggccatcacagctctctcctgccagctgcatgctgccagttcctgttctgtgttcaccacatccccacaccccattgccacttatttattcatctcacgaaataaagaaaggtcttggaaagttaaaaggcatcagtcttactacctgtcccaccaccccccaccttagggaaatg

SEQ ID NO: 191850 - DNA, 1302 bp, Homo Sapiens
ttggatccttcctccaacttgggttcaatcagaagatacttgttggaatgaactgaagaaacttcccttttgatagattgaactgaaactgcttattgtatgtggttatatttggtaaaagttgcgtgtgagctttttacaaaagggtaagaattgtgttgaattttaattcacttgtataagaaaacaatttaaaactctcataataggtcttaaatatttttacttgctattctccctcagtgatatatacctcttcctttccagctttatgaaacatctatttaagatttaaagttatcagtgatcatagtttggagataaaatttgacccaggaatgaatatttattttaattaggttttcatacttattaaatgtaattaaagacttgggtcttgtctgagttcagtggaattgaaaccacaactttaatttccttacagaaaaacttaatttgtttcttttagtgccacaccttaaaaagaaaccccaaactagctcctcaggaatatagttttattttgcaagcataccatctagctgaaattgtatacacatgaatatatgtagacttttcctgttgggctgaagtgtgtgcttataaatgtgtttagtttttaagctaaacattcagttaacagtctgtgcattgattagcatagggcaggtggtgaggacctggatttttattaaacagtttagtaattataaaagtttcttgtgtttactagtaaagaattttaaaaatctattctaattcaacaagtttttaaaatcaactttgtaatttgaggggaaaatttggggggaagaggtgggtgggccactaagttacctctctttcatttggtggcccttccaggccattgaaaataaagacgttggctccagtttgcacattgggaagaaagcatagaaatttgacttgtatattaaaaataatagaaatgtaatatgtatattaagaatgcataggtctgtattctgtaaggggctctgaagaacaatatggcactgctgtgttcagtgtgaattcactgcctgggagaactgcaggaatgcttgtcttcaccattgtgttcttacaacgaattcaactttccatggtttatcttgacaaaatttacatgtgtttaggttacttgtatattgatatatttttttaatcttcagtttttgtcttccttttgcctttgtgttttcagaagtaacacatgaacactttttaaagtacattacagagaagaaaactgtgagctattatatagtgtttcttttttaacacaaatcttttaacttt

SEQ ID NO: 191851 - DNA, 1372 bp, Homo Sapiens; identical to SEQ ID NO: 180284
  misc_feature (103)..(112): n is a, c, g, or t

SEQ ID NO: 191852 - DNA, 1016 bp, Homo Sapiens
  misc_feature (101)..(110): n is a, c, g, or t
ctttgtacaaaaaagttgggagcataatagattctggttttaggaaataacatatagcttttatatgaatattttcttttgctataatgaaagtcacagannnnnnnnnncctggcttttatggaggaatgaaaagagttgtctccctctaagagtatactatttttgattctcatagcaataatgtcaccattcttatcagagggtaaataccccttgtataggaaaacggacataatttcctcttgggagttctctttatgacttagcattttcttctacttgagaaaattcctgtttttccgattatttcatcttgaactttcttttttttaagcttttgtgcaatgtaatagtttgttgatccatctttgtacattttcattttatttcatgtctttctctcacctacctgtcagaatcagctatagcagattttgaattctttagttaaagaatagttgctttacttgtttcctcatgagtttgttaaatagctttgcattttagtcctctattatgctatgaaaattattacgaagtttatattgttccctttttaagcctgccttactcttgtcttttgtcattgtctatggtttaatgaagaacacaccaaactaacatttttgtttattttgaggaacaaaaaaacttttctcttttaagggaagttactacacattgagttagtaactactctttcagtcaaggttccttaatcagtccagtctacatcaggactatgacttggggggcggggctaatcctttttgctgttctgagctactattgtcaactgctgttgtacatactgttatgtgtaatggcgtaaatatatttattatgtttgtaaaattcattgcagatcaaggttgctcttctgtgatatatgggatattatgttttaaagaccatcttggaatacaattagagaacttagtattttgatgtactaagacctattttaagtttaatattctactttgcaaaaactttaattaaagatgttattt

SEQ ID NO: 191853 - DNA, 1539 bp, Homo Sapiens
ttgggatcaatatcaccctggaccaccgctgccgtatcttcgaaacaggctgcaccgtgtgtgacgaaggcttgcgcagcctcaagggcattggggatgaagctctgcccacggtcctggtcggcgtgttcatcgaacagcccacgccgtttgtgtccctgttcttccagcggctcctgcggctccactacccccagaaacacatgcgacttttcatccacaaccacgagcagcaccacaaggctcaggtggaagagttcctggcacagcatggcagcgagtaccagtctgtgaagctggtgggccctgaggtgcggatggcgaatgcagatgccaggaacatgggcgcagacctgtgccggcaggaccgcagctgcacctactacttcagcgtggatgctgacgtggccctgaccgagcccaacagcctgcggctgctgatccaacagaacaagaacgtcattgccccgctgatgacccggcatgggaggctgtggtcgaacttctggggggctctcagtgcagatggctactatgcccgttccgaggactacgtggacattgtgcaggggcggcgtgttggtgtctggaatgtgccctatatttcaaacatctacttgatcaagggcagtgccctgcggggtgagctgcagtcctcagatctcttccaccacagcaagctggaccccgacatggccttctgtgccaacatccggcagcaggatgtgttcatgttcctgaccaaccggcacacccttggccatctgctctccctagacagctaccgcaccacccacctgcacaacgacctctgggaggtgttcagcaaccccgaggactggaaggagaagtacatccaccagaactacaccaaagccctggcagggaagctggtggagacgccctgcccggatgtctattggttccccatcttcacggaggtggcctgtgatgagctggtggaggagatggagcactttggccagtggtctctgggcaacaacaaggacaaccgcatccagggtggctacgagaacgtgccgactattgacatccacatgaaccagatcggctttgagcgggagtggcacaaattcctgctggagtacattgcgcccatgacggagaagctctaccccggctactacaccagggcccagtttgacctggcctttgtcgtccgctacaagcctgatgagcagccctcactgatgccacaccatgatgcctccaccttcaccatcaacatcgccctgaaccgagtcggggtggattacgagggcgggggctgtcggttcctgcgctacaactgttccatccgagccccaaggaagggctggaccctcatgcaccctggacgactcacgcattaccatgaggggctccccaccaccaggggcacccgctacatcgcagtctccttcgtcgatccctaattggccaggcctgaccctcttggacctttcttctttgccgacaaccactgcccagcagcctctgggacctcggggtcccagggaacccagtccagcctcctgg

SEQ ID NO: 191854 - DNA, 1345 bp, Homo Sapiens
actttgtacaaaaaagttggcgaagtttccagccctgcgagcgccgccgggtcggccgatcgtcccccatacctcggccatgcggcccctgctgctactggccctgctgggctggctgctgctggccgaagcgaagggcgacgccaagccggaggacaaccttttagtcctcacggtggccactaaggagaccgagggattccgtcgcttcaagcgctcagctcagttcttcaactacaagatccaggcgcttggcctaggggaggactggaatgtggagaaggggacgtcggcaggtggagggcagaaggtccggctgctgaagaaagctctggagaagcacgcagacaaggaggatctggtcattctcttcgcagacagctatgacgtgctgtttgcatcggggccccgggagctcctgaagaagttccggcaggccaggagccaggtggtcttctctgctgaggagctcatctacccagaccgcaggctggagaccaagtatccggtggtgtccgatggcaagaggttcctgggctctggaggcttcatcggttatgcccccaacctcagcaaactggtggccgagtgggagggccaggacagcgacagcgatcagctgttttacaccaagatcttcttggacccggagaagagggagcagatcaatatcaccctggaccaccgctgccgtatcttccagaacctggatggagccttggatgaggtcgtgctcaagtttgaaatgggccatgtgagagcgaggaacctggcctatgacaccctcccggtcctgatccatggcaacgggccaaccaagctgcagttgaactacctgggcaactacatcccgcgcttctggaccttcgaaacaggctgcaccgtgtgtgacgaaggcttgcgcagcctcaagggcattggggatgaagctctgcccacggtcctggtcggcgtgttcatcgaacagcccacgccgtttgtgtccctgttcttccagcggctcctgcggctccactacccccagaaacacatgcgacttttcatccacaaccacgagcagcaccacaaggctcaggtggaagagttcctggcacagcatggcagcgagtaccagtctgtgaagctggtgggccctgaggtgcggatggcgaatgcagatgccaggaacatgggcgcagacctgtgccggcaggaccgcagctgcacctactacttcagcgtggatgctgacgtggccctgaccgagcccaacagcctgcggctgctgatccaacagaacaagaacgtcattgccccgctgatgacccggcatgggaggctgtggtcgaacttctggggggctctc

SEQ ID NO: 191855 - DNA, 1023 bp, Homo Sapiens
actttgtacaaaaaagttggcttggacccggagaagagggagcagatcaatatcaccctggaccaccgctgccgtatcttccagaacctggatggagccttggatgaggtcgtgctcaagtttgaaatgggccatgtgagagcgaggaacctggcctatgacaccctcccggtcctgatccatggcaacgggccaaccaagctgcagttgaactacctgggcaactacatcccgcgcttctggaccttcgaaacaggctgcaccgtgtgtgacgaaggcttgcgcagcctcaagggcattggggatgaagctctgcccacggtcctggtcggcgtgttcatcgaacagcccacgccgtttgtgtccctgttcttccagcggctcctgcggctccactacccccagaaacacatgcgacttttcatccacaaccacgagcagcaccacaaggctcaggtggaagagttcctggcacagcatggcagcgagtaccagtctgtgaagctggtgggccctgaggtgcggatggcgaatgcagatgccaggaacatgggcgcagacctgtgccggcaggaccgcagctgcacctactacttcagcgtggatgctgacgtggccctgaccgagcccaacagcctgcggctgctgatccaacagaacaagaacgtcattgccccgctgatgacccggcatgggaggctgtggtcgaacttctggggggctctcagtgcagatggctactatgcccgttccgaggactacgtggacattgtgcaggggcggcgtgttggtgtctggaatgtgccctatatttcaaacatctacttgatcaagggcagtgccctgcggggtgagctgcagtcctcagatctcttccaccacagcaagctggaccccgacatggccttctgtgccaacatccggcagcaggatgtgttcatgttcctgaccaaccggcacacccttggccatctgctctccctagacagctaccgcaccacccacctgcacaacgacctctgg

SEQ ID NO: 191856 - DNA, 843 bp, Homo Sapiens; identical to SEQ ID NO: 180285
  misc_feature (718)..(731): n is a, c, g, or t

SEQ ID NO: 191857 - DNA, 1156 bp, Homo Sapiens; identical to SEQ ID NO: 180287

SEQ ID NO: 191858 - DNA, 1461 bp, Homo Sapiens; identical to SEQ ID NO: 184341

SEQ ID NO: 191859 - DNA, 2408 bp, Homo Sapiens; identical to SEQ ID NO: 184343
  misc_feature (304)..(399): n is a, c, g, or t

SEQ ID NO: 191860 - DNA, 939 bp, Homo Sapiens
gagcaatgctttttccattatagccaactttgtacaaaaaagttggatcattgggcttgcagaaactggctctggaaagacaggcgcctttgctttgcccattctaaacgcactgctggagaccccgcagcgtttgtttgccctagttcttaccccgactcgggagctggcctttcagatctcagagcagtttgaagccctggggtcctctattggagtgcagagtgctgtgattgtaggtggaattgattcaatgtctcaatctttggcccttgcaaaaaaaccacatataataatagcaactcctggtcgactgattgaccacttggaaaatacgaaaggtttcaacttgagagctctcaaatacttggtcatggatgaagccgaccgaatactgaatatggattttgagacagaggttgacaagatcctcaaagtgattcctcgagatcggaaaacattcctcttctctgccaccatgaccaagaaggttcaaaaacttcagcgagcagctctgaagaatcctgtgaaatgtgccgtttcctctaaataccagacagttgaaaaattacagcaatattatatttttattccctctaaattcaaggatacctacctggtttatattctaaatgaattggctggaaactcctttatgatattctgcagcacctgtaataatacccagagaacagctttgctactgcgaaatcttggcttcactgccatccccctccatggacaaatgagtcagagtaagcgcctaggatcccttaataagtttaaggccaaggcccgttccattcttctagcaactgacgttgccagccgaggtttggacatacctcatgtagatgtggttgtcaactttgacattcctacccattccaaaggattacatccatcgagtaggtcgaacagctagagctgggcgctccg

SEQ ID NO: 191861 - DNA, 977 bp, Homo Sapiens
  misc_feature (593)..(632): n is a, c, g, or t
  misc_feature (729)..(739): n is a, c, g, or t
ttgggtacaaatcattttatcaccttattttaatttcattgaaagcagcaaaccaaatcccaaccaaatatccactagtaatgggaagcctggtgctgtgaatggagctgtggggaccacgttccagcctcagaatcctctcttagggagagcctgtgagagctgctatgctacacagtctcaccagtggtattcttggggcccacctaatatgcagtgtagattatgtgcaatttgttggctttattggaaaaaatatggaggcttgaaaatgcccacccagtcagaagaagagaagttatctcctagcccaactacagaggaccctcgtgttagaagtcacgtgtcccgccaggccatgcagggaatgccagtccgaaacactgggagtccaaagtctgcagtgaagacccgccaagctttcttccttcatactacatatttcacaaaatttgctcgtcaggtctgcaaaaataccctccggctgcggcaggcagcaagacggccgtttgttgctattaattatgctgccattagggcagaatgtaagatgcttttaaattcttaaccttatatgttgtgcttctgaccannnnnnnnnnnnnnnnnnnnnnnnnnnnnnnnnnnnnnnngtttgcaataaacataagttcttgtgtacagccttttatttggtttattttttaacattgtttttgtgtgctgccatttgtatcatgccaacctggnnnnnnnnnnntcaaaacattgaaacttctgtactctttaccagagagtagtgcttagcaaaagattggtgggaggtgatcctattccatggggttttgtgatggaattgcctgcagagcccttattgcagcacttttaccttttaggtagtgccacaatgtaacccctacgatgctgttataatgagactccataatcgagacagtacagtccagtcttacatgattcattggtttaaataaaatttg

SEQ ID NO: 191862 - DNA, 1068 bp, Homo Sapiens; identical to SEQ ID NO: 180290

SEQ ID NO: 191863 - DNA, 990 bp, Homo Sapiens; identical to SEQ ID NO: 184350

SEQ ID NO: 191864 - DNA, 423 bp, Homo Sapiens
ttaaataaattattataacctttcagaaatgctgtgtgcattttcatgttcttttttttagcattactgtcactctccctaatgaaatgtacttcagagaagcagtattttgttaaataaatacataacctcattctgaataatgtccctcattttgactataactgtgcttggtttcaaaagcaaaattaaacaaaaatctcagtcccctccgaagtgaactttgtgttaccctgcgtcagaaatgccaagttgtgtttacttttcattcagattttgtgaatatgaacatgctgttataggatctacagatgaatatttaactcaatagaaaaattattttagaacacattgtattggtattacaaccagattatattcttgacgttgacttcattaaaattatctacaatttccctacta

SEQ ID NO: 191865 - DNA, 1320 bp, Homo Sapiens; identical to SEQ ID NO: 184353
  misc_feature (855)..(913): n is a, c, g, or t

SEQ ID NO: 191866 - DNA, 1520 bp, Homo Sapiens; identical to SEQ ID NO: 184354
  misc_feature (1207)..(1270): n is a, c, g, or t

SEQ ID NO: 191867 - DNA, 1243 bp, Homo Sapiens
ataaaagccaactttgtacaaaaaagttggctgctggctcgcctccgagccacctctgctgcgcaccgcagcctcggacctacagcccaggatactttgggacttgccggcgctcagaaacgcgcccagacggcccctccaccttttgtttgcctagggtcgccgagagcgcccggagggaaccgcctggccttcggggaccaccaattttgtctggaaccaccctcccggcgtatcctactccctgtgccgcgaggccatcgcttcactggaggggtcgatttgtgtgtagtttggtgacaagatttgcattcacctggcccaaaccctttttgtctctttgggtgaccggaaaactccacctcaagttttcttttgtggggctgccccccaagtgtcgtttgttttactgtagggtctccccgcccggcgcccccagtgttttctgagggcggaaatggccaattcgggcctgcagttgctgggcttctccatggccctgctgggctgggtgggtctggtggcctgcaccgccatcccgcagtggcagatgagctcctatgcgggtgacaacatcatcacggcccaggccatgtacaaggggctgtggatggactgcgtcacgcagagcacggggatgatgagctgcaaaatgtacgactcggtgctcgccctgtccgcggccttgcaggccactcgagccctaatggtggtctccctggtgctgggcttcctggccatgtttgtggccacgatgggcatgaagtgcacgcgctgtgggggagacgacaaagtgaagaaggcccgtatagccatgggtggaggcataattttcatcgtggcaggtcttgccgccttggtagcttgctcctggtatggccatcagattgtcacagacttttataaccctttgatccctaccaacattaagtatgagtttggccctgccatctttattggctgggcagggtctgccctagtcatcctgggaggtgcactgctctcctgttcctgtcctgggaatgagagcaaggctgggtaccgtgtaccccgctcttaccctaagtccaactcttccaaggagtatgtgtgacctgggatctccttgccccagcctgacaggctatgggagtgtctagatgcctgaaagggcctggggctgagctcagcctgtgggcagggtgccggacaaaggcctcctggtcactctgtccctgcactccatgtatagtcctcttgggtt

SEQ ID NO: 191868 - DNA, 1205 bp, Homo Sapiens; identical to SEQ ID NO: 180293

SEQ ID NO: 191869 - DNA, 1963 bp, Homo Sapiens; identical to SEQ ID NO: 180294
  misc_feature (138)..(176): n is a, c, g, or t

SEQ ID NO: 191870 - DNA, 768 bp, Homo Sapiens
tataaaagccaactttgtacaaaaaagttggcccttcttcctgaagggagtcatggggaattcctgaaaattttcttccttctgcagacagttggatgagtcccttagagaaggcatccagagacataactaaactgaatatcatcccatattgattttaggaattgactctaaaactctgtgcagaatcttgtgttgggattgtatcttgacattcctgttgtgttatttttcttaactggagtgtgtgctgcctttcaggtacaatttttgtgtaataaaagccagtgcattaagtttatatagactactttctatgcaagactgagatatggaatagataggaagagatatgtactgctgggtacatggacagtaagtgtgttttcagatggagtaccagcaccgaaaatgggttgagggaggatgggttgtatgtatgtttctgcccactaattttgagcagccatattatgaattaaatcgtcacagccaagtaataacccaagaatggtatgagtttcatgtgtaatagctcaaatggaataagcatgaatgctggagtggaccattatcctcaaatattctatgtcacttctcatttaaagactcttgttatgaactattagaaactttaggcaaaatcaaaagtatttgcggcaaaataaaggcctattctactcttatttaaagtgaaacactgtatacttgtttctctccaaagcgaaatttaagtatttataatttcaattgcctcgataagtttcc

SEQ ID NO: 191871 - DNA, 1778 bp, Homo Sapiens; identical to SEQ ID NO: 180295
  misc_feature (407)..(422): n is a, c, g, or t
  misc_feature (569)..(627): n is a, c, g, or t
  misc_feature (638)..(706): n is a, c, g, or t
  misc_feature (771)..(895): n is a, c, g, or t

SEQ ID NO: 191872 - DNA, 2225 bp, Homo Sapiens; identical to SEQ ID NO: 184361
  misc_feature (1437)..(1456): n is a, c, g, or t

SEQ ID NO: 191873 - DNA, 1072 bp, Homo Sapiens; identical to SEQ ID NO: 184362
  misc_feature (823)..(838): n is a, c, g, or t
  misc_feature (966)..(992): n is a, c, g, or t

SEQ ID NO: 191874 - DNA, 239 bp, Homo Sapiens
  misc_feature (165)..(174): n is a, c, g, or t
ttggcttccccagcagccgactggacaatcaaaggaaggaaaatgaaggttctgatgcctgccttgatgttcaaatacctgttttcaccattttttctccttttttctcttgctgcccacattgtgcctttattttatgagccccagttttctgggcttagtttnnnnnnnnnntcaagtctaaacattgcatttagaaagcttttgttcttggataaaaagtcatacactttaaaaaa

SEQ ID NO: 191875 - DNA, 857 bp, Homo Sapiens; identical to SEQ ID NO: 184363
  misc_feature (189)..(215): n is a, c, g, or t
  misc_feature (274)..(283): n is a, c, g, or t
  misc_feature (344)..(356): n is a, c, g, or t

SEQ ID NO: 191876 - DNA, 2298 bp, Homo Sapiens; identical to SEQ ID NO: 184365

SEQ ID NO: 191877 - DNA, 1320 bp, Homo Sapiens; identical to SEQ ID NO: 184367
  misc_feature (188)..(249): n is a, c, g, or t
  misc_feature (1212)..(1221): n is a, c, g, or t

SEQ ID NO: 191878 - DNA, 1491 bp, Homo Sapiens; identical to SEQ ID NO: 184368

SEQ ID NO: 191879 - DNA, 1465 bp, Homo Sapiens; identical to SEQ ID NO: 184369
  misc_feature (1262)..(1270): n is a, c, g, or t

SEQ ID NO: 191880 - DNA, 1675 bp, Homo Sapiens; identical to SEQ ID NO: 184373
  misc_feature (163)..(204): n is a, c, g, or t
  misc_feature (370)..(378): n is a, c, g, or t
  misc_feature (416)..(461): n is a, c, g, or t
  misc_feature (1084)..(1093): n is a, c, g, or t
  misc_feature (1151)..(1187): n is a, c, g, or t

SEQ ID NO: 191881 - DNA, 2405 bp, Homo Sapiens; identical to SEQ ID NO: 184374
  misc_feature (58)..(94): n is a, c, g, or t

SEQ ID NO: 191882 - DNA, 1307 bp, Homo Sapiens; identical to SEQ ID NO: 184375
  misc_feature (97)..(105): n is a, c, g, or t
  misc_feature (143)..(213): n is a, c, g, or t
  misc_feature (811)..(820): n is a, c, g, or t
  misc_feature (878)..(914): n is a, c, g, or t

SEQ ID NO: 191883 - DNA, 1080 bp, Homo Sapiens; identical to SEQ ID NO: 184376
  misc_feature (49)..(57): n is a, c, g, or t
  misc_feature (95)..(140): n is a, c, g, or t
  misc_feature (763)..(772): n is a, c, g, or t
  misc_feature (830)..(866): n is a, c, g, or t

SEQ ID NO: 191884 - DNA, 1201 bp, Homo Sapiens; identical to SEQ ID NO: 184377
  misc_feature (97)..(105): n is a, c, g, or t
  misc_feature (152)..(213): n is a, c, g, or t
  misc_feature (811)..(823): n is a, c, g, or t
  misc_feature (881)..(917): n is a, c, g, or t

SEQ ID NO: 191885 - DNA, 1792 bp, Homo Sapiens; identical to SEQ ID NO: 184378
  misc_feature (330)..(353): n is a, c, g, or t
  misc_feature (1262)..(1333): n is a, c, g, or t
  misc_feature (1469)..(1477): n is a, c, g, or t
  misc_feature (1515)..(1585): n is a, c, g, or t

SEQ ID NO: 191886 - DNA, 869 bp, Homo Sapiens; identical to SEQ ID NO: 184379
  misc_feature (717)..(764): n is a, c, g, or t

SEQ ID NO: 191887 - DNA, 1086 bp, Homo Sapiens; identical to SEQ ID NO: 184380
  misc_feature (181)..(203): n is a, c, g, or t

SEQ ID NO: 191888 - DNA, 1982 bp, Homo Sapiens; identical to SEQ ID NO: 184381
  misc_feature (1765)..(1812): n is a, c, g, or t

SEQ ID NO: 191889 - DNA, 515 bp, Homo Sapiens
  misc_feature (312)..(334): n is a, c, g, or t
ttgggtttctatttcaaacatactttcttggttttctaatggagtatatagtttagtcatttcacagactctggcctcctctcctgaaatccttttggatggggaaagggaaggtggggagggtccgaggggaaggggaccccagcttccctgtgcccgctcaccccactccaccagtccccggtcgccagccggagtctcctctctaccgccactgtcacaccgtagcccacatggatagcacagttgtcagacaagattccttcagattccgagttgcctaccggttgttttcgttgttgttgttgttgnnnnnnnnnnnnnnnnnnnnnnngaagacagcaataaccacagtacatattactgtagttctctatagttttacatacattcataccataactctgttctctcctcttttttgttttcaactttaaaaacaaaaataaacgatgataatctttactggtgaaaaggatggaaaaataaatcaacaaatgcaaccagtttgtgag

SEQ ID NO: 191890 - DNA, 765 bp, Homo Sapiens
  misc_feature (315)..(363): n is a, c, g, or t
  misc_feature (545)..(581): n is a, c, g, or t
ttggctccactttttattttctcttaggcttttgtttctatttcaaacatactttcttggttttctaatggagtatatagtttagtcatttcacagactctggcctcctctcctgaaatccttttggatggggaaagggaaggtggggagggtccgaggggaaggggaccccagcttccctgtgcccgctcaccccactccaccagtccccggtcgccagccggagtctcctctctaccgccactgtcacaccgtagcccacatggatagcacagttgtcagacaagattccttcagattccgagttgcctaccnnnnnnnnnnnnnnnnnnnnnnnnnnnnnnnnnnnnnnnnnnnnnnnnngaagacagcaataaccacagtacatattactgtagttctctatagttttacatacattcataccataactctgttctctcctcttttttgttttcaactttaaaaacaaaaataaacgatgataatctttactggtgaaaaggatggaaaaataaatcaacaaatgcaaccagtttgtgagnnnnnnnnnnnnnnnnnnnnnnnnnnnnnnnnnnnnncacctgaatgcggaagagctcggctcccgtttagcattttgtacttaaggaaataaaaaaccaacaaaggatctcacattttcttaaaaaagtgaagattgctgtatactatttattcaacttataatatatgttactccttgatctttgtcttttgtcatgacaaagcatttatattaataaa

SEQ ID NO: 191891 - DNA, 702 bp, Homo Sapiens
actttgtacaaaaaagttgggcaagtgttaaaaagccacataccctattacagagagtcaaagcctgcacaacagaagaggatcaggagaagctgatgcaaattaccagtctgcattcactgaatgccttcttgctgccaattaaaactgtaggtgtgcagggtgactgtcgttcctacagttacgtgtgtggaatctccagtaaagatgaacctgactgggaatcacttatttttctggctaggcttatacctcgcatgtgtcacaacgttaacagagttgtttatatatttggcccaccagttaaagaacctcctacagatgttactcccactttcttgacaacaggggtgctcagtactttacgccaagctgattttgaggcccataacattctcagggagtctgggtatgctgggaaaatcagccagatgccggtgattttgacaccattacattttgatcgggacccacttcaaaagcagccttcatgccagagatctgtggttattcgaacctttattactagtgacttcatgactggtatacctgcaacacctggcaatgagatccctgtagaggtggtattaaagatggtcactgagattaagaagattcctggtatttctcgaattatgtatgacttaacatcaaagcccccaggaactactgagtgggagtaataaacttcttgttctattc

SEQ ID NO: 191892 - DNA, 1579 bp, Homo Sapiens; identical to SEQ ID NO: 184387
  misc_feature (1390)..(1410): n is a, c, g, or t
  misc_feature (1462)..(1478): n is a, c, g, or t

SEQ ID NO: 191893 - DNA, 1638 bp, Homo Sapiens; identical to SEQ ID NO: 184388
  misc_feature (379)..(442): n is a, c, g, or t
  misc_feature (449)..(483): n is a, c, g, or t
  misc_feature (1411)..(1420): n is a, c, g, or t

SEQ ID NO: 191894 - DNA, 873 bp, Homo Sapiens; identical to SEQ ID NO: 184389

SEQ ID NO: 191895 - DNA, 908 bp, Homo Sapiens; identical to SEQ ID NO: 184390

SEQ ID NO: 191896 - DNA, 421 bp, Homo Sapiens
ttgggcctttttatttttctttattaatgctttgatatttcaatgttagcctcaatttctgaacaccataggtagaatgtaaagcttgtctgatcgttcaaagcatgaaatggatacttatatggaaattctgctcagatagaatgacagtccgtcaaaacagattgtttgcaaaggggaggcatcagtgtccttggcaggctgatttctaggtaggaaatgtggtagcctcacttttaatgaacaaatggcctttattaaaaactgagtgactctatatagctgatcagttttttcacctggaagcatttgtttctactttgatatgactgtttttcggacagtttatttgttgagagtgtgaccaaaagttacatgtttgcacctttctagttgaaaataaagtgtatattttttctat

SEQ ID NO: 191897 - DNA, 1050 bp, Homo Sapiens; identical to SEQ ID NO: 184391
  misc_feature (825)..(859): n is a, c, g, or t
  misc_feature (897)..(914): n is a, c, g, or t

SEQ ID NO: 191898 - DNA, 2067 bp, Homo Sapiens; identical to SEQ ID NO: 184393
  misc_feature (799)..(810): n is a, c, g, or t

SEQ ID NO: 191899 - DNA, 1731 bp, Homo Sapiens; identical to SEQ ID NO: 184394
  misc_feature (1568)..(1578): n is a, c, g, or t

SEQ ID NO: 191900 - DNA, 1128 bp, Homo Sapiens
ctttgtacaaaaaagttggctcctggacaaggagagagtgcggctgctgagagccgagcccagcaatcccgatcctctgagtcgtgaagaagggaggcagcgagggggttggggttggggcctgaggcaagcccccaggctccgctcttgccagagggacaggagccatggctcagaaaatggactgtggtgcgggcctcctcggcttccaggctgaggcctccgtagaagacagcgccttgcttatgcagaccttgatggaggccatccagatctcagaggctccacctactaaccaggccaccgcagctgctagtccccagagttcacagcccccaactgccaatgagatggctgacattcaggtttcagcagctgccgctaggcctaagtcagcctttaaagtccagaatgccaccacaaaaggcccaaatggtgtctatgatttctctcaggctcataatgccaaggatgtgcccaacacgcagcccaaggcagcctttaagtcccaaaatgctaccccaaagggtccaaatgctgcctatgatttttcccaggcagcaaccactggtgagttagctgctaacaagtctgagatggccttcaaggcccagaatgccactactaaagtgggcccaaatgccacctacaatttctctcagtctctcaatgccaatgacctggccaacagcaggcctaagacccctttcaaggcttggaatgataccactaaggccccaacagctgatacccagacccagaatgtaaatcaggccaaaatggccacttcccaggctgacatagagaccgacccaggtatctctgaacctgacggtgcaactgcacagacatcagcagatggttcccaggctcagaatctggagtcccggacaataattcggggcaagaggacccgcaagattaataacttgaatgttgaagagaacagcagtggggatcagaggcgggccccactggctgcagggacctggaggtctgcaccagttccagtgaccactcagaacccacctggcgcaccccccaatgtgctctggcagacgccattggcttggcagaacccctcacgctggcaaaaccagacagccaggcagaccccaccagcacgtc

SEQ ID NO: 191901 - DNA, 2088 bp, Homo Sapiens; identical to SEQ ID NO: 184397

SEQ ID NO: 191902 - DNA, 2604 bp, Homo Sapiens; identical to SEQ ID NO: 184398

SEQ ID NO: 191903 - DNA, 1562 bp, Homo Sapiens; identical to SEQ ID NO: 184399

SEQ ID NO: 191904 - DNA, 780 bp, Homo Sapiens
ggtccactttcttggccggatcattcatgacctttctcttgccaggttcctggatgcctatgctgagcacaagttacagttctgggcagtgacagctgaaaatgagccttctgctgggctgttgagtggataccccttccagtgcctgggcttcacccctgaacatcagcgagacttcattgcccgtgacctaggtcctaccctcgccaacggtactcaccacaatgtccgcctactcatgctggatgaccaacgcttgctgctgccccactgggcaaaggtggtactgacagacccagaagcagctaaatatgttcatggcattgctgtacattggtacctggactttctggctccagccaaagccaccctaggggagacacaccgcctgttccccaacaccatgctctttgcctcagaggcctgtgtgggctccaagttctgggagcagagtgtgcggctaggctcctgggatcgagggatgcagtacagccacagcatcatcacgaacctcctgtaccatgtggtcggctggaccgactggaaccttgccctgaaccccgaaggaggacccaattgggtgcgtaactttgtcgacagtcccatcattgtagacatcaccaaggacacgttttacaaacagcccatgttctaccaccttggccacttcagcaagttcattcctgagggctcccagagagtggggctgggttgccagtcagaagaacgacttggacgcagtgggcactgatgcatcccgatggctctgctgttgtggtc

SEQ ID NO: 191905 - DNA, 889 bp, Homo Sapiens
ttggcctagtgcctatagctaaggcaggtacctgcatccttgtttttgtttagtggatcctctatccttcagagactctggaacccctgtggtcttctcttcatctaatgaccctgaggggatggagttttcaagtccttccagagaggaatgtcccaagcctttgagtagggtaagcatcatggctggcagcctcacaggattgcttctacttcaggcagtgtcgtgggcatcaggtgcccgcccctgcatccctaaaagcttcggctacagctcggtggtgtgtgtctgcaatgccacatactgtgactcctttgaccccccgacctttcctgccttggtaccttcagccgctatgagagtacacgcagtgggcgacggatggagctgagtatggggcccatccaggctaatcacacgggcacaggcctgctactgaccctgcagccagaacagaagttccagaaagtgaagggatttggaggggccatgacagatgctgctgctctcaacatccttgccctgtcaccccctgcccaaaatttgctacttaaatcgtacttctctgaagaaggaatcggatataacatcatccgggtacccatggccagctgtgacttctccatccgcacctacacctatgcagacacccctgatgatttccagttgcacaacttcagcctcccagaggaagataccaagctcaagatacctctgattcaccgagccctgcagttggcccagcgtcccgtttcactccttgccagcccctggacatcacccacttgggctcaagaccaatggagcggtgaatgggaagggtcactcaaagggacagcccggagacatctaccaccagacctgggccagatactttgtgaagttcctg

SEQ ID NO: 191906 - DNA, 905 bp, Homo Sapiens; identical to SEQ ID NO: 184403

SEQ ID NO: 191907 - DNA, 1331 bp, Homo Sapiens
ttggctgggtcttttgcggctgcagcgggcttgtaggtgtccggctttgctggcccagcaagcctgataagcatgaagctcttatctttggtggctgtggtcgggtgtttgctggtgcccccagctgaagccaacaagagttctgaagatatccggtgcaaatgcatctgtccaccttatagaaacatcagtgggcacatttacaaccagaatgtatcccagaaggactgcaactgcctgcacgtggtggagcccatgccagtgcctggccatgacgtggaggcctactgcctgctgtgcgagtgcaggtacgaggagcgcagcaccaccaccatcaaggtcatcattgtcatctacctgtccgtggtgggtgccctgttgctctacatggccttcctgatgctggtggaccctctgatccgaaagccggatgcatatactgagcaactgcacaatgaggaggagaatgaggatgctcgctctatggcagcagctgctgcatccctcgggggaccccgagcaaacacagtcctggagcgtgtggaaggtgcccagcagcggtggaagctgcaggtgcaggagcagcggaagacagtcttcgatcggcacaagatgctcagctagatgggctggtgtggttgggtcaaggccccaacaccatggctgccagcttccaggctggacaaagcagggggctacttctcccttccctcggttccagtcttccctttaaaagcctgtggcatttttcctccttctccctaactttagaaatgttgtacttggctattttgattagggaagagggatgtggtctctgatctccgttgtcttcttgggtctttggggttgaagggagggggaaggcaggccagaagggaatggagacattcgaggcggcctcaggagtggatgcgatctgtctctcctggctccactcttgccgccttccagctctgagtcttgggaatgttgttacccttggaagataaagctgggtcttcaggaactcagtgtctgggaggaaagcatggcccagcattcagcatgtgttcctttctgcagtggttctttatcaccacctccctcccagccccagcgcctcagccccagccccagctccagccctgaggacagctctgatgggagagctgggccccctgagcccactgggtcttcagggtgcactggaagctggtgttcgctgtcccctgtgcacttctcgcactggggcatggagtgcccatgcatactctgctgccggtcccctcacctgcacttgaggggtctgggcagtccctcctcttcccagtgtccacagtcactgaacc

SEQ ID NO: 191908 - DNA, 813 bp, Homo Sapiens
ttggagaaggagatggcggagggcggtgggacgtgatgcgcgggtcagagccgggccttgagaaggaactggaggcccctggcagcggtgtcccctcgaggacccctctgccgggctcaccaggtgtccggctttgctggcccagcaagcctgataagcatgaagctcttatctttggtggctgtggtcgggtgtttgctggtgcccccagctgaagccaacaagagttctgaagatatccggtgcaaatgcatctgtccaccttatagaaacatcagtgggcacatttacaaccagaatgtatcccagaaggactgcaactgcctgcacgtggtggagcccatgccagtgcctggccatgacgtggaggcctactgcctgctgtgcgagtgcaggtacgaggagcgcagcaccaccaccatcaaggtcatcattgtcatctacctgtccgtggtgggtgccctgttgctctacatggccttcctgatgctggtggaccctctgatccgaaagccggatgcatacactgagcaactgcacaatgaggaggagaatgaggatgctcgctctatggcagcagctgctgcatccctcgggggaccccgagcaaacacagtcctggagcgtgtggaaggtgcccagcagcggtggaagctgcaggtgcaggagcagcggaagacagtcttcgatcggcacaagatgctcagctagatgggctggtgtggttgggtcaaggccccaacaccatggctgccagcttccaggctggacaaaagctgggggctacttctcccttccctcggtttcagtctt

SEQ ID NO: 191909 - DNA, 3056 bp, Homo Sapiens; identical to SEQ ID NO: 184404

SEQ ID NO: 191910 - DNA, 1038 bp, Homo Sapiens
ttggcagagagcatcggccggcgaccgttccggcggccattgcgaaaacttccccacggctactgcgtccacgtggcggtggcgtggggactccctgaaagcagagcggcagggcgcccggaagtcgtgagtcgagtcttcccgggctaatccatgccgggttggaggctgctgacgcaggtcggcgcccaggtgctgggtcgactcggggacggcctgggtgctgccctgggcccggggaacagaacacacatctggctttttgttagaggtcttcatggaaagagtggtacatggtgggatgagcatctttctgaagaaaatgtcccattcattaagcagttggtctctgatgaagataaagcccaattagcaagtaaactgtgtcctctgaaagatgaaccatggcctatacatccttgggaaccaggttcctttagagttggtcttattgccttgaagctgggcatgatgcctttatggaccaaggatggtcaaaagcatgtggtcacattacttcaggtacaagactgtcatgtcttaaaatatacgtcaaaggaaaactgtaatggaaaaatggcaaccctgtctgtaggaggaaaaactgtatcacgttttcgtaaagctacatccatattggaattttaccgggaacttggattgccgccgaaacagacagttaaaatctttaatataacagataatgctgcaattaaaccaggcactcctctttatgctgctcactttcgtccaggacagtatgtggatgtcacagccaaaactattggtaaaggttttcaaggtgtcatgaaaagatggggatttaaaggccagcctgctacgcatggtcaaacgaaaacccacaggagacctggagctgttgcaactggtgatattggcagagtctggcctggaactaaaatgcctggaaaaatgggaaacatatacaggacagaatatggactgaaagtgtggagaataaacacaaagcacaacataatctatgtaaatggctctgtacctgacataaaaattgct

SEQ ID NO: 191911 - DNA, 948 bp, Homo Sapiens
tttgtacaaaaaagttggctattggtaaaggttttcaaggtgtcatgaaaagatggggatttaaaggccagcctgctacgcatggtcaaacgaaaacccacaggagacctggagctgttgcaactggtgatattggcagagtctggcctggaactaaaatgcctggaaaaatgggaaacatatacaggacagaatatggactgaaagtgtggagaataaacacaaagcacaacataatctatgtaaatggctctgtacctggacataaaaattgcttagtaaaggtcaaagattctaaactgcctgcatataaggatctcggtaaaaatctaccattccctacatattttcctgatggagatgaagaggaactgccagaagatttgtatgatgaaaacgtgtgtcagcccggtgcgccttctattacatttgcctaacatctttggacgtggcagaaccttacatattctgtgagcttcgatgagccagagtgatatcataaccaccagaaatcatactctcctttcttagtcacaacaaaatcacacatgtcatctttgtcaagggcataaatatatcattcatacccccattaaattttgttagaaaaattaccacattaaatatatgagttaagtagattggatttgctgaaattggtgttgggcatattagcaaaatattcttaatttgtggactcgattcttttttactacatatttcccaagttatcttaagatgtctgtaaatttaacttttattaaagttttgtcaatctttgtgaaatagtggttgtggaacagtagaaaaccatatgggggactatagtgcaacctatttgggtaaagaaaccatttgctaaatgggagaaagtaaatagatttttatttaattacagaaacatgttaaaggccggacaaaggaaagacaataaatcataaattatca

SEQ ID NO: 191912 - DNA, 1440 bp, Homo Sapiens; identical to SEQ ID NO: 180302

SEQ ID NO: 191913 - DNA, 917 bp, Homo Sapiens
ttggctaactcacaccagggtaagttagataattaagaaactagacagtgtttaaattatctaactcacacgagggtaagttttttgttggtttcttttttggagtcctgagttcaaaggggacagaactaagggcaggagaagagaatggatgtgtcttctctcccatcttcccctcatcatcgaccgaggagcacaaagaagttctgtttctgtttttttcagaaactttattttagctgtcaagcagagaatagcttgaactattcagactattgttggcactgtttagtagtgaccacacgctcttctacccgggaaggaacatatgacgacatgctcctcccatgtcccctgatggtgtctgttcccacaatatccttctagtctgcatcgtgaagtggcttaggccaaagcttcctgtgtgatgacgcacgtccgagactgttccatctcattcctcgcaaatttgagctcttctgatcaattctaaatatttgattaattttaattctgaaagaaaattttgaggatttaagcttaggggattttatttttataaataccagattattgttagacttaataaatcactgttaaatttaaagatgacagttaccttggaaagttcactaatacttcgctccaaggcgtctgtaaaagaagatatctttattggagcaatgttcatgtgactgggaatgacagaagaatgggagatgagtagggacccctcaagcacagctgtcactcagaaattttaaatttgaaaaagaaatcgattttcatctgtatgccgtcaaaggaaggaattcagttacagggcatctgtaacttaaatattgtaaaataactcatatggaagttcaagctatttttatactataatagagttatttaattttaatttgttgaat

SEQ ID NO: 191914 - DNA, 1177 bp, Homo Sapiens; identical to SEQ ID NO: 184407

SEQ ID NO: 191915 - DNA, 1593 bp, Homo Sapiens; identical to SEQ ID NO: 184408

SEQ ID NO: 191916 - DNA, 860 bp, Homo Sapiens; identical to SEQ ID NO: 180304

SEQ ID NO: 191917 - DNA, 1727 bp, Homo Sapiens; identical to SEQ ID NO: 184411

SEQ ID NO: 191918 - DNA, 1666 bp, Homo Sapiens; identical to SEQ ID NO: 184413

SEQ ID NO: 191919 - DNA, 1090 bp, Homo Sapiens; identical to SEQ ID NO: 184415

SEQ ID NO: 191920 - DNA, 1683 bp, Homo Sapiens; identical to SEQ ID NO: 180306
  misc_feature (585)..(593): n is a, c, g, or t
  misc_feature (1237)..(1259): n is a, c, g, or t
  misc_feature (1270)..(1279): n is a, c, g, or t

SEQ ID NO: 191921 - DNA, 1230 bp, Homo Sapiens; identical to SEQ ID NO: 184419
  misc_feature (418)..(440): n is a, c, g, or t
  misc_feature (613)..(625): n is a, c, g, or t
  misc_feature (702)..(754): n is a, c, g, or t
  misc_feature (1067)..(1119): n is a, c, g, or t

SEQ ID NO: 191922 - DNA, 1657 bp, Homo Sapiens; identical to SEQ ID NO: 184420
  misc_feature (254)..(299): n is a, c, g, or t
  misc_feature (612)..(664): n is a, c, g, or t
  misc_feature (741)..(752): n is a, c, g, or t
  misc_feature (925)..(947): n is a, c, g, or t

SEQ ID NO: 191923 - DNA, 1255 bp, Homo Sapiens; identical to SEQ ID NO: 184421
  misc_feature (194)..(205): n is a, c, g, or t
  misc_feature (282)..(330): n is a, c, g, or t

SEQ ID NO: 191924 - DNA, 1108 bp, Homo Sapiens; identical to SEQ ID NO: 184422
  misc_feature (842)..(864): n is a, c, g, or t
  misc_feature (1036)..(1047): n is a, c, g, or t

SEQ ID NO: 191925 - DNA, 1283 bp, Homo Sapiens
ttgggtggtgacaactggcggcagcgcgccgcgggcccgagacttagtctcgggccgccatggccagcgtccacgagagcctctacttcaatcccatgatgaccaatggggttgtgcacgccaatgtgttcggcatcaaggactgggtgacgccgtacaagatcgcggtgctggtgctgctgaacgagatgagccgcacaggcgagggcgccgtcagcctcatggagcggcggaggctcaaccagctgctcctgcccctgctgcagggcccagatattacactgtcaaaactttacaagttaattgaagagtcttgtccacagctggcaaattcagtgcagatcagaatcaaactgatggctgaaggcgagttgaaggatatggaacagttttttgatgacctttcagattctttctctggaactgaaccagaggttcacaaaacaagtgtagtaggtttgtttctgcgtcacatgatcttggcctacagtaagctttctttcagccaagtgtttaaactgtacactgcccttcagcagtacttccagaatggtgagaaaaagacagtggaggatgctgatatggaactgaccagtagagatgagggtgaaagaaaaatggaaaaagaagaacttgatgtatctgtaagagaagaggaggtatcttgcagtgggcctctgtcccaaaaacaagcagaattttttctttctcaacaggcttctttgctaaagaatgatgagactaaggccctcactccagcttccttgcagaaggaattaaacaatttgttgaaatttaatcctgattttgctgaagcgcattatctcagctacttaaacaacctccgtgtccaagatgttttcagttcaacacacagtctcctccattattttgatcgtctgattcttaccggagccgaaagcaaaagtaatggggaagagggctatggccggagcttgagatacgccgctctgaatcttgccgccctgcactgccgcttcggtcactatcaacaggcagagctcgccctgcaggaggcaattaggattgcccaggagtccaacgatcacgtgtgtctccagcactgtttgagctggctttatgtgctggggcagaagagatccgatagctatgttctgctggagcattctgtgaagaagcagtacattttgggttaccgtacctcgcctccctgggaatacagtcccttgttcaacagagagcttttgctgggaagacggcaaacaagctgatggatgccctaaaggactccgacctcctgc

SEQ ID NO: 191926 - DNA, 2981 bp, Homo Sapiens; identical to SEQ ID NO: 180307

SEQ ID NO: 191927 - DNA, 2483 bp, Homo Sapiens; identical to SEQ ID NO: 184428

SEQ ID NO: 191928 - DNA, 960 bp, Homo Sapiens; identical to SEQ ID NO: 184430

SEQ ID NO: 191929 - DNA, 1143 bp, Homo Sapiens
ttggcagggttgcatgagcaccagggaattgtgaccagctgttttctcctttggcagatgaggaatgaatttaccattacccatgttctcatccccaagcaaagtgctgggtctgattactgcaacacagagaacgaagaagaacttttcctcatacaggatcagcagggcctcatcacactgggctggattcatactcaccccacacagaccgcgtttctctccagtgtcgacctacacactcactgctcttaccagatgatgttgccagagtcagtagccattgtttgctcccccaagttccaggaaactggattctttaaactaactgaccatggactagaggagatttcttcctgtcgccagaaaggatttcatccacacagcaaggatccacctctgttctgtagctgcagccacgtgactgttgtggacagagcagtgaccatcacagaccttcgatgagcgtttgagtccaacaccttccaagaacaacaaaaccatatcagtgtactgtagccccttaatttaagctttctagaaagctttggaagtttttgtagatagtagaaaggggggcatcacctgagaaagagctgattttgtatttcaggtttgaaaagaaataactgaacatattttttaggcaagtcagaaagagaacatggtcacccaaaagcaactgtaactcagaaattaagttactcagaaattaagtagctcagaaattaagaaagaatggtataatgaacccccatatacccttccttctggattcaccaattgttaacatttttttcctctcagctatccttctaatttctctctaatttcaatttgtttatatttacctctgggctcaataagggcatctgtgcagaaatttggaagccatttagaaaatcttttggattttcctgtggtttatggcaatatgaatggagcttattactggggtgagggacagcttactccatttgaccagattgtttggctaacacatcccgaagaatgattttgtcaggaattattgttatttaataaatatttcaggatatttttcctctacaataaagtaacaattaacttatgtttttgtgcttcagagtgatcccatttgatcaagcattgtataaacaggtt

SEQ ID NO: 191930 - DNA, 909 bp, Homo Sapiens
actttgtacaaaaaagttggggcgtgcgttccttttcagcctggtgtggggtgagtggtacccaacgggccggggcgccgcgtccgcaggaagaggcgcggggtgcaggcttgtaaacatataacataaaaatggcttccaaaagagctctggtcatcctggctaaaggagcagaggaaatggagacggtcatccctgtagatgtcatgaggcgagctgggattaaggtcaccgttgcaggcctggctggaaaagacccagtacagtgtagccgtgatgtggtcatttgtcctgatgccagccttgaagatgcaaaaaaagagggaccatatgatgtggtggttctaccaggaggtaatctgggcgcacagaatttatctgagtctgctgctgtgaaggagatactgaaggagcaggaaaaccggaagggcctgatagccgccatctgtgcaggtcctactgctctgttggctcatgaaataggttttggaagtaaagttacaacacaccctcttgctaaagacaaaatgatgaatggaggtcattacacctactctgagaatcgtgtggaaaaagacggcctgattcttacaagccgggggcctgggaccagcttcgagtttgcgcttgcaattgttgaagccctgaatggcaaggaggtggcggctcaagtgaaggctccacttgttcttaaagactagagcagcgaactgcgacgatcacttaaagaaacaggccgttaggaatccattctcactgtgttcgctctaaacaaaacagtggtaggttaatgtgttcagaagtcgctgtccttactacttttgcggaagtatggaagtcacaactacacagagatttctcagcctacaaattgtgtctatacatttctaagccttgtttgcagaataa

SEQ ID NO: 191931 - DNA, 907 bp, Homo Sapiens
ctttgtacaaaaaagttggctgtttcagcctggtgtggggtgagtggtacccaacgggccggggcgccgcgtccgcaggaagaggcgcggggtgcaggcttgtaaacatataacataaaaatggcttccaaaagagctctggtcatcctggctaaaggagcagaggaaatggagacggtcatccctgtagatgtcatgaggcgagctgggattaaggtcaccgttgcaggcctggctggaaaagacccagtacagtgtagccgtgatgtggtcatttgtcctgatgccagccttgaagatgcaaaaaaagagggaccatatgatgtggtggttctaccaggaggtaatctgggcgcacagaatttatctgagtctgctgctgtgaaggagatactgaaggagcaggaaaaccggaagggcctgatagccgccatctgtgcaggtcctactgctctgttggctcatgaaataggttttggaagtaaagttacaacacaccctcttgctaaagacaaaatgatgaatggaggtcattacacctactctgagaatcgtgtggaaaaagacggcctgattcttacaagccgggggcctgggaccaacttcgagtttgcgcttgcaattgttgaagccctgaatggcaaggaggtggcggctcaagtgaaggctccacttgttcttaaaagactagagcagcgaactgcgacgatcacttagagaaacaggccgttaggaatccattctcactgtgttcgctctaaacaaaacagtggtaagttaatgtgttcagaagtcgctgtccttactacttttggcgaagtatggaagtcaccactacacagagattttctcaccctacaattgtgtcaatacattttcaaagccttgtttgcagaataaacaaggg

SEQ ID NO: 191932 - DNA, 835 bp, Homo Sapiens
ttgtacaaaaaagttgggtaaacatataacataaaaatggcttccaaaagagctctggtcatcctggctaaaggagcagaggaaatggagacggtcatccctgtagatgtcatgaggcgagctgggattaaggtcaccgttgcaggcctggctggaaaagacccagtacagtgtagccgtgatgtggtcatttgtcctgatgccagccttgaagatgcaaaaaaagagggaccatatgatgtggtggttctaccaggaggtaatctgggcgcacagaatttatctgagtctgctgctgtgaaggagatactgaaggagcaggaaaaccggaagggcctgatagccgccatctgtgcaggtcctactgctctgttggctcatgaaataggttttggaagtaaagttacaacacaccctcttgctaaagacaaaatgatgaatggaggtcattacacctactctgagaatcgtgtggaaaaagacggcctgattcttacaagccgggggcctgggaccagcttcgagtttgcgcttgcaattgttgaagccctgaatggcaaggaggtggcggctcaagtgaaggctccacttgttcttaaagactagagcagcgaactgcgacgatcacttagagaaacaggccgttaggaatccattctcactgtgttcgctctaaacaaaacagtggtaggttaatgtgttcagaagtcgctgtccttactacttttgcggaagtatggaagtcacaactacacagagatttctcagcctacaaattgtgtctatacatttctaagccttgtttgcagaataaacagggcatttagccaaacta

SEQ ID NO: 191933 - DNA, 1155 bp, Homo Sapiens; identical to SEQ ID NO: 184433

SEQ ID NO: 191934 - DNA, 898 bp, Homo Sapiens
ttggggctctcctgccatggacctgcgcttctcgggcgctgcagcatctggacccgccggcgccgctgccgttggtgatctggcatgggatgggagacagctgttgcaatcccttaagcatgggtgctattaaaaaaatggtggagaagaaaatacctggaatttacgtcttatctttagagattgggaagaccctgatggaggacgtggagaacagcttcttcttgaatgtcaattcccaagtaacaacagtgtgtcaggcacttgctaaggatcctaaattgcagcaaggctacaatgctatgggattctcccagggaggccaatttctgagggcagtggctcagagatgcccttcacctcccatgatcaatctgatctcggttgggggacaacatcaaggtgtttttggactccctcgatgcccaggagagagctctcacatctgtgacttcatccgaaaaacactgaatgctggggcgtactccaaagttgttcaggaacgcctcgtgcaagccgaatactggcatgaccccataaaggaggatgtgtatcgcaaccacagcatcttcttggcagatataaatcaggagcggggtatcaatgagtcctacaagaaaaacctgatggccctgaagaagtttgtgatggtgaaattcctcaatgattccattgtggaccctgtagattcggaggaccgcctggggctaaaggaaatggacaatgcaagacagctagtgtttctggctacagaaggggaccatcttcagttgtctgaagaatggttttatgcccacatcataccattccttggatgaaacccgtatagttcacaatagagctcagggagcccctaactcttccaaaccacatgggagacagtttccttcatgcccaa

SEQ ID NO: 191935 - DNA, 740 bp, Homo Sapiens
tttgtacaaaaaagttggcaaaaggagggaagtagcacccaaattaaattgcttaagagaggaaatgtacatcttgtataacttagggagcgaagaaaatgtaggcgcgaaagtgaaaagtgaggcagctagttcttcctattccattctcgaccaacctgccctttcttaatatgactagtggtcttgatgctagagtcaacttactctgttgctggctttagcagagaataggaggaaccatatgaaaaagatcaggctttctgacttccatccccaaaacacatttaccagcatactccaaactgtttctgatgtgttccatgagaaaaggattgtttgctcaaaaagcttggaaaatactacacactccctttctccttctggagatcaacccacattagagtgtctaaggactcctgagaattcctgttacagtaaacaaaactaacgtaatctaccatttcctacactatttgagcatggaaatcatagtccccactctgtgaaaacttaacgctttttggaagacatttctgtagcatgtcagtttggagaaatgatgagctacgccttgatgaaagaaccgtgttggtgctgctaagtttagccattatggtttttcctttctctctcttaagccttattcttcaactaaaagatgaggattaagagcaagaagttgggggggatgtgaaaataattttatgaggttgtctaaaataaagagtagtttctta

SEQ ID NO: 191936 - DNA, 893 bp, Homo Sapiens
ctttgtacaaaaaagttggggctctcctgccatggacctgcgcttctcgggcgctgcagcatctggacccgccggcgccgctgccgttggtgatctggcatgggatgggagacagctgttgcaatcccttaagcatgggtgctattaaaaaaatggtggagaagaaaatacctggaatttacgtcttatctttagagattgggaagaccctgatggaggacgtggagaacagcttcttcttgaatgtcaattcccaagtaacaacagtgtgtcaggcacttgctaaggatcctaaattgcagcaaggctacaatgctatgggattctcccagggaggccaatttctgagggcagtggctcagagatgcccttcacctcccatgatcaatctgatctcggttgggggacaacatcaaggtgtttttggactccctcgatgcccaggagagagctctcacatctgtgacttcatccgaaaaacactgaatgctggggcgtactccaaagttgttcaggaacgcctcgtgcaagccgaatactggcatgaccccataaaggaggatgtgtatcgcaaccacagcatcttcttggcagatataaatcaggagcggggtatcaatgagtcctacaagaaaaacctgatggccctgaagaagtttgtgatggtgaaattcctcaatgattccattgtggaccctgtagattcggagtggtttggattttacagaagtggccaagccaaggaaaccattcccttacaggagacctccctgtacacacaggaccgcctggggctaaaggaaatggacaatgcagacagctagtgtttctggctacagaagggaccatcttcagttgtctgaaaaatggttttatgcccacatcataccatt

SEQ ID NO: 191937 - DNA, 2254 bp, Homo Sapiens; identical to SEQ ID NO: 184435
  misc_feature (192)..(212): n is a, c, g, or t

SEQ ID NO: 191938 - DNA, 1412 bp, Homo Sapiens; identical to SEQ ID NO: 184436

SEQ ID NO: 191939 - DNA, 1159 bp, Homo Sapiens; identical to SEQ ID NO: 184437
  misc_feature (339)..(379): n is a, c, g, or t

SEQ ID NO: 191940 - DNA, 1160 bp, Homo Sapiens; identical to SEQ ID NO: 184438

SEQ ID NO: 191941 - DNA, 1895 bp, Homo Sapiens; identical to SEQ ID NO: 180311
  misc_feature (1277)..(1289): n is a, c, g, or t

SEQ ID NO: 191942 - DNA, 1366 bp, Homo Sapiens; identical to SEQ ID NO: 180312

SEQ ID NO: 191943 - DNA, 737 bp, Homo Sapiens
  misc_feature (361)..(375): n is a, c, g, or t
ctttgtacaaaaaagttggaataaatttacctggttgatggcatcctgtgtcagctggagtagttggttgtgaatattaaaacctagtactattttccctcagtaacatgtaattgctacattttttataagaaggtatggttagaaaaaaatgtgaaagatcacttaaaccaaagccagttacaaggagtaatctctcctgttggtttaccttcacctcagaactacaagaatattacaatacatagtgaatagttgtctgtaacatttctaccagttgtttcagtagcatattggtcttggcatttcttggcactgtggttctgctgtattatttgtgatgtcttattgtttgtgagcnnnnnnnnnnnnnnnaaagaaaaaacaaaaactaagtgggactatgtatgtagatgtgtgtcagtaccaaaaagttattttctcaaatccctaaatttctgatttccattcaagtcttttaaactctttcctgctgaatagcaaagaacttttattttccactttcctatattcctaaaaagtgtgaacaatgcgtttcagttgactgtattgcatacttttttgctgaagactttttctgtaaacacaattgccttgttcagttttgttgtaaactgacttaccataagatgcactgttgataatgctttctgatgtgtgtttgataagagtgataaaataaaagcttaaaaataaaggagttgctttttaatttc

SEQ ID NO: 191944 - DNA, 805 bp, Homo Sapiens
  misc_feature (457)..(471): n is a, c, g, or t
ccaactttgtacaaaaaagttggtcaaaactggccgtagaagggattttattttttcccaaaagggttccatctttgctatctgttgatcagccttagaaaatctaagtatgatcaataaattttaatggttgatggcatcctgtgtcagctggagtagttggttgtgaatattaaaacctagtactattttccctcagtaacatgtaattgctacattttttataagaaggtatggttagaaaaaaatgtgaaagatcacttaaaccaaagccagttacaaggagtaatctctcctgttggtttaccttcacctcagaactacaagaatattacaatacatagtgaatagttgtctgtaacatttctaccagttgtttcagtagcatattggtcttggcatttcttggcactgtggttctgctgtattatttgtgatgtcttattgtttgtgagcnnnnnnnnnnnnnnnaaagaaaaaacaaaaactaagtgggactatgtatgtagatgtgtgtcagtaccaaaaagttattttctcaaatccctaaatttctgatttccattcaagtcttttaaactctttcctgctgaatagcaaagaacttttattttccactttcctatattcctaaaaagtgtgaacaatgcgtttcagttgactgtattgcatacttttttgctgaagactttttctgtaaacacaattgccttgttcagttttgttgtaaactgacttaccataagatgcactgttgataatgctttctgatgtgtgtttgataagagtgataaaataaaagctt

SEQ ID NO: 191945 - DNA, 1292 bp, Homo Sapiens; identical to SEQ ID NO: 180313

SEQ ID NO: 191946 - DNA, 2012 bp, Homo Sapiens; identical to SEQ ID NO: 180314
  misc_feature (111)..(122): n is a, c, g, or t

SEQ ID NO: 191947 - DNA, 2815 bp, Homo Sapiens; identical to SEQ ID NO: 180315
  misc_feature (238)..(256): n is a, c, g, or t

SEQ ID NO: 191948 - DNA, 1260 bp, Homo Sapiens; identical to SEQ ID NO: 184441
  misc_feature (956)..(968): n is a, c, g, or t

SEQ ID NO: 191949 - DNA, 975 bp, Homo Sapiens
  misc_feature (880)..(892): n is a, c, g, or t
ttggcgcggggagagcccgggtgctgtggctgagctagagggtgaagctggcggagcaggaggatgggcgagcagtctgaatgccagaatggataaccgttttgctacagcatttgtaattgcttgtgtgcttagcctcatttccaccatctacatggcagcctccattggcacagacttctggtatgaatatcgaagtccagttcaagaaaattccagtgatttgaataaaagcatctgggatgaattcattagtgatgaggcagatgaaaagacttataatgatgcactttttcgatacaatggcacagtgggattgtggagacggtgtatcaccatacccaaaaacatgcattggtatagcccaccagaaaggacagagtcatttgatgtggtcacaaaatgtgtgagtttcacactaactgagcagttcatggagaaatttgttgatcccggaaaccacaatagcgggattgatctccttaggacctatctttggcgttgccagttccttttaccttttgtgagtttaggtttgatgtgctttggggctttgatcggactttgtgcttgcatttgccgaagcttatatcccaccattgccacgggcattctccatctccttgcaggtctgtgtacactgggctcagtaagttgttatgttgctggaattgaactactccaccagaaactagagctccctgacaatgtatccggtgaatttggatggtccttctgcctggcttgtgtctctgctcccttacagttcatggcttctgctctcttcatctgggctgctcacaccaaccggaaagagtacaccttaatgaaggcatatcgtgtggcatgagcaagaaactgcctgctttacaattgccannnnnnnnnnnnnaaaataatactgatatttcccacctctcaattgttttaatttttatttgtggatataacattttattatgaaaaatctaattt

SEQ ID NO: 191950 - DNA, 887 bp, Homo Sapiens
ctttgtacaaaaaagttgggtcttcagcgtcatttgaccaagtgtgacctacgacatcctccaggcaatgagatttaccgcaagggcaccatctccttctttgagattgatggacgtaagaacaagagttattcccagaacctgtgtcttttggccaagtgtttccttgaccataagacactgtactatgacacagaccctttcctcttctacgtcatgacagagtatgactgtaagggcttccacatcgtgggctacttctccaaggagaaagaatcaacggaagactacaatgtggcctgcatcctaaccctgcctccctaccagcgccggggctacggcaagctgctgatcgagttcagctatgaactctccaaagtggaagggaaaacagggacccctgagaagcccctctcagaccttggcctcctatcctatcgaagctactggtcccagaccatcctggagatcctgatggggctgaagtcggagagcggggagaggccacagatcaccatcaatgagattagtgaaatcaccagcatcaagaaggaggatgtcatctccactctgcagtacctcaatctcatcaactactacaagggccagtacatcctcacactgtcagaggacatcgtggatggccatgagcgggccatgctcaagcggctcctgcggatcgactccaagtgtctgcacttcactcccaaggactggagcaagagggggaagtggtgaccagacactgcccactgcagtgccaagacggcagcaagactggggctgatagcccaccccgcccccactgcagctcccacaaagcactctaagggagatggggctgaggacagctcaaaaaggagaggacaggcctggcaggggcccca

SEQ ID NO: 191951 - DNA, 2092 bp, Homo Sapiens; identical to SEQ ID NO: 184442

SEQ ID NO: 191952 - DNA, 970 bp, Homo Sapiens
actttgtacaaaaaagttggccagttcctggtgaatatatacgagggcaccatcaccaccttcgagcacgcgcacaacatgcgggtgatgaagttcagcgtcagccctgttgtcagagtggccgtggaggccaagaacccggctgacctgcccaagctggtggaggggctgaagcggctggccaagtccgaccccatggtgcagtgcatcatcgaggagtcgggagagcacatcatcgcgggcgccggcgagctgcacctggagatctgcctgaaggacctggaggaggaccacgcctgcatccccatcaagaaatctgacccggtcgtctcgtaccgcgagacggtcagtgaagagtcgaacgtgctctgcctctccaagtcccccaacaagcacaaccggctgtacatgaaggcgcggcccttccccgacggcctggccgaggacatcgataaaggcgaggtgtccgcccgtcaggagctcaagcagcgggcgcgctacctggccgagaagtacgagtgggacgtggctgaggcccgcaagatctggtgctttgggcccgacggcaccggccccaacatcctcaccgacatcaccaagggtgtgcagtacctcaacgagatcaaggacagtgtggtggccggcttccagtgggccaccaaggagggcgcactgtgtgaggagaacatgcggggtgtgcgcttcgacgtccacgacgtcaccctgcacgccgacgccatccaccgcgggagggggccagatcatccccacagcacggcgctgcctctacgccagtgtgctgaccgcccagccacgcctcatggagcccatctaccttgtggagatccagtgtccagaacaggtggtcggtggtcatctacggggattttgaacaggaagcggggccacgtgttcgaggagtcccagtggcccggcacccccatgtttgtggttcaaggactatctgccc

SEQ ID NO: 191953 - DNA, 1878 bp, Homo Sapiens; identical to SEQ ID NO: 184445

SEQ ID NO: 191954 - DNA, 1783 bp, Homo Sapiens; identical to SEQ ID NO: 180318
  misc_feature (226)..(242): n is a, c, g, or t
  misc_feature (335)..(350): n is a, c, g, or t
  misc_feature (625)..(637): n is a, c, g, or t
  misc_feature (1421)..(1431): n is a, c, g, or t
  misc_feature (1667)..(1675): n is a, c, g, or t

SEQ ID NO: 191955 - DNA, 1350 bp, Homo Sapiens
  misc_feature (69)..(82): n is a, c, g, or t
  misc_feature (1107)..(1115): n is a, c, g, or t
aattgatgagcaatgctttttctttaaaaaaaactttgtacaaaaaagttggcctcagcccatatgtgnnnnnnnnnnnnnnaacagaattatatatgtctgggggtgaaaaaacccttgcattccaaaggtccatactggttacttggtttcattgccaccacttagtggatgttcagtttagaaccattttgtctgctccctctggaagccttgcgcagagcttactttgtaattgttggagaataactgctgaatttttagctgttttgagttgattcgcaccactgcaccacaactcaatatgaaaactatttaacttatttattatcttgtgaaaagtatacaatgaaaattttgttcatactgtatttatcaagtatgatgaaaagcaatagatatatattcttttattatgttaaattatgattgccattattaatcggcaaaatgtggagtgtatgttcttttcacagtaatatatgccttttgtaacttcacttggttattttattgtaaatgagtacaaaattcttaatttaagagattgtatgtaatatttatttcattaatttctttccttgtttacgtaaattttgaaagattgcatgatttcttgacagaaatcgatcttgatgctgtggaagtagtttgaggaacatcctatgagttttcttagaatgtataaaggttgtagcccatccaacttcaaagaaaaaaatgaccacatactttgcaatcaggctgaaatgtggcatgcttttctaattccaactttataaactagcaaaaaagtgtttgcttattccaccagttctactgtgacatactcgagtataaagacatgtagcaataacggggagtggggggggagtctcacagtgcctttggaagggcccgaacttgccttaaatcttcctcaaccaaataagtattttattagtgcttgagagaatctgaatgtaggatgggttcaactgcacaaaaggaaaagatttttaccactttttttatatagatataaagtgaagcaaccgccttattgctgaaatatgtagtacatgaatatgccttgtttaattacgaaaattccaaaacttgtactannnnnnnnnccatgtagaaaggcaggaatgtctccctaagctttcctggacagcagatgaatgagccgtagctttagtttgtacgtatgtacagttggagcactatatgtactctctggactactttggacagaagtaggtttttgattgtaacaagataagtcacttgagttgcaatacttcttggggaatcagctcactacaattgtgactgtaacattgtactgtaatggttttgtagttt

SEQ ID NO: 191956 - DNA, 633 bp, Homo Sapiens
  misc_feature (357)..(365): n is a, c, g, or t
ttggcatgcttttccaattccaactttataaactagtaaaaaagtgtttgcttattccaccagttctactgtgacatactcgagtataaagacatgtagcaataacggggagtggggggggagtctcacagtgcctttggaagggcccgaacttgccttaaatcttcctcaaccaaataagtattttattagtgcttgagagaatctgaatgtaggatgggttcaactgcacaaaaggaaaagatttttaccactttttttatatagatataaagtgaagcaaccgccttagtgctgaaatatgtagtacatgaatatgccttgtttaattacagaaaattccaaaacttgtactannnnnnnnnccatgtagaaaggcaggaatgtctcctaagctttcctggacagcagatgaatgagcggtagctttagtttgtacgtaggtacagttggagcactatatgtactctctggactactttggacagaagtaggtttttgaatgtaacaagataagtcaacttgagttgtaatatattttggggaatcagctcactacaaattgtgactgtaaacattgtactgtaaatgttttgtagttttcccccaataaaatttttgggaagaaaaggt

SEQ ID NO: 191957 - DNA, 963 bp, Homo Sapiens; identical to SEQ ID NO: 184449

SEQ ID NO: 191958 - DNA, 1082 bp, Homo Sapiens; identical to SEQ ID NO: 184450

SEQ ID NO: 191959 - DNA, 991 bp, Homo Sapiens
ttggccggtgcgcacggacgtggctcgagtttcctctgctctccgctctcgcccgctagctctcctcccttccgctcctgcttctctccgggtctcccgctccagctccagccccacccggccggtcccgcacggctccgggtagccatggaggaccccacgctctatattgtcgagcggccgcttcccgggtaccccgacgccgaggccccggagccttcctccgctggggctcaggcagcggaggagccgtcgggggccggctcagaagagctgatcaagtcggaccaggtgaacggcgtgctggtgctgagcctcctggacaaaatcatcggggccgtagaccagatccagctgactcaagcacagctggaggagcggcaggcggagatggagggcgcagtgcagagcatccagggcgagctgagcaagctgggcaaggcgcacgccaccacgagcaatacggtgagcaagctgctggagaaggtgcgcaaggtcagcgtcaacgtgaagaccgtgcgcggcagcctggagcgccaggcggggcagatcaagaagctggaggtcaacgaggccgagctgctgcggcgccgcaactttaaagtcatgatctaccaggatgaagtgaagctgccggccaaactgagcatcagcaaatcgctgaaagagtcggaggcgctgccagagaaggagggcgaggagctgggcgagggcgagcggcccgaggaggacgcagcggcgctggagctttcgtcggacgaggcggtggaggttgaggaggttattgaggagtcccgcgcagagcgtatcaagcgcagcggcctgcggcgcgtggacgacttcaagaaggccttctccaaggagaagatggagaagaccaagtgcgtacccgcgagaacctggagaagacgcgcctcaagaccaaggaaaacctggagaagacgcggcacaccctgcagagcgcatgaacaagctgggcacgcgcctggtg

SEQ ID NO: 191960 - DNA, 1048 bp, Homo Sapiens
  misc_feature (302)..(452): n is a, c, g, or t
  misc_feature (850)..(863): n is a, c, g, or t
ttggttcagaatccagagggaggacagtgtgagaaggcgatgatccaaagaagacagagaggtcagccccacccgatccctcaaatgggctcttggaggcacccccaggggcagcccatttctcaaagtccagaaaattagggtcccagaagggggcagcagcaggctgggagttaggagggagagcagggtgccggccctgccaccaagttgagagctggaggggaggtggggagagaacatcacagagcagccagccctggttcactcctggcagtttcttctcaagctccttccctagnnnnnnnnnnnnnnnnnnnnnnnnnnnnnnnnnnnnnnnnnnnnnnnnnnnnnnnnnnnnnnnnnnnnnnnnnnnnnnnnnnnnnnnnnnnnnnnnnnnnnnnnnnnnnnnnnnnnnnnnnnnnnnnnnnnnnnnnnnnnnnnnnnnnnnnaaaatccttccctagagctagtatcctaaagctgcagagctagcccagacctcattggtttccttgtccttggggtgcttttcctgaatctttgggggtgaagggagtgttgctcccagtccagaggcctgattctgttcggactgggttctcaagacacgaccaggttctcaagacacgagtccccttgttcctccccattaaagggggtttgtcagaagcaagaacagcccctctccccagtcacagcctgaagggaggccccgagagcttcctccttccccccacctgctccttaccttctctgccctgctttttagaactgcagttcattgttttaagggattgggggagggagcctggggacacaaaccttttatacaatacaaagctttgcnnnnnnnnnnnnnncttccttttccctttctcggttctcttctctcctctgaatggctgaaaacccctctgccgagggaggttggggattgtgggacaaggccccttggtgctgatggcctgaaggggcctgagctgtgggctaatgcagttttctgtgggcttggggaacctctcacgttgctgtgtccaggtgagca

SEQ ID NO: 191961 - DNA, 1966 bp, Homo Sapiens; identical to SEQ ID NO: 184453

SEQ ID NO: 191962 - DNA, 965 bp, Homo Sapiens
actttgtacaaaaaagttggcttcataattgaccccaatggagtcatcaagcatttgagcgtcaacgatctcccagtgggccgaagcgtggaagaaaccctccgcttggtgaaggcgttccagtatgtagaaacacatggagaagtctgcccagcgaactggacaccggattctcctacgatcaagccaagtccagctgcttccaaagagtactttcagaaggtaaatcagtagatcacccatgtgtatctgcaccttctcaactgagagaagaaccacagttgaaacctgcttttatcattttcaagatggttatttgtagaaggcaaggaaccaattatgcttgtattcataagtattactctaaatgttttgtttttgtaattctggctaagaccttttaaacatggttagttgctagtacaaggaatcgtttattggtaacatcttggtggctggctagctagtttctacagaacataatttgcctctatagaaggctattcttagatcatgtctcaatggaaacactcttctttcttagccttacttgaatcttgcctataataaagtagagcaacacacattgaaagcttctgatcaacggtcctgaaattttcatcttgaatgtctttgtattaaactgaattttcttttaagctaacaaagatcataattttcaatgattagccgtgtaactcctgcaatgaatgtttatgtgattgaagcaaatgtgaatcgtattattttaaaaagtggcagagtgacttaactgatcatgcatgatccctcatccctgaaattgagtttatgtagtcattttacttattttattcattagctaactttgtctatgtatatttctagatattgattagtgtaatcgattataaaggatatttatcaaatccaggggatgcattttgaaatataattattttctttgctgaagtattcattgtaaa

SEQ ID NO: 191963 - DNA, 677 bp, Homo Sapiens
tgtacaaaaaagttggattactctaaatcctatataagatttttgtaattctggctaagaccttttaaacatggttagttgctagtacaaggaatcctttattggtaacatcttggtggctggctagctagtttctacagaacataatttgcctctatagaaggctattcttagatcatgtctcaatggaaacactcttctttcttagccttacttgaatcttgcctataataaagtagagcaacacacattgaaagcttctgatcaacggtcctgaaattttcatcttgaatgtctttgtattaaactgaattttcttttaagctaacaaagatcataattttcaatgattagccgtgtaactcctgcaatgaatgtttatgtgattgaagcaaatgtgaatcgtattattttaaaaagtggcagagtgacttaactgatcatgcatgatccctcatccctgaaattgagtttatgtagtcattttacttattttattcattagctaactttgtctatgtatatttctagatattgattagtgtaatcgattataaaggatatttatcaaatccagggattgcattttgaaattataattattttctttgctgaagtattcattgtaaaacatacaaaataaacatattttaaaacatttgcattttaccaccatt

SEQ ID NO: 191964 - DNA, 1312 bp, Homo Sapiens; identical to SEQ ID NO: 184455
  misc_feature (1058)..(1076): n is a, c, g, or t

SEQ ID NO: 191965 - DNA, 1968 bp, Homo Sapiens; identical to SEQ ID NO: 184457
  misc_feature (373)..(416): n is a, c, g, or t
  misc_feature (985)..(997): n is a, c, g, or t
  misc_feature (1057)..(1068): n is a, c, g, or t

SEQ ID NO: 191966 - DNA, 1229 bp, Homo Sapiens
ctttgtacaaaaaagttggcatggattgcccgagcaaatggaactccatcctgacaagccacccatcctacttgtggctggtaaggacgacatggagatgtgtgagctgaatcttgaggagactggcctgactcggaagcgtggtgctgagatcttgccaagacagtttgaagaaatctgggaacgctgtggaggcatccagtaccttcagaatgcgattgagagcagacaggctcggcccacctatgcaacagccatgctgcagagtctgttaaagtagatgttgcacaccagccttacagctgggagcctttgccatggtacttaggtagggtgtgtgcccccagatttaaccattccataatcatgttagagttacttctataaagtgaacagattttattaatcacggcttttggtgaatttgtttaaggttaattatggtagcaaattttggacctaaacattatttttctgtatcccgctgtaattcccaaaactctcattattctctaactattacacatgggcatattctgatgtttctcatcctttgccagaagactaccttacatccatcgtaattgttctctaggaaaagagaacttttttcaaaattcaaaatacttcttaaggatggcacagtaccatataactggagtaataaaacatgagcttacattcttacaataactaaaccacttaaaatgatcaaggcactaatgttttggtctgaaaagctgtgtactttatagacattttcagacatttttggaaatttccattaaaggtggaaaatctatttttttcctcctttgcagtgtcttagtttgaatgaaacacttcgaagttctagaattctagaaagagccttaatgtatttgatgtattctgtgataagaggtactaatagtatccagcacagatttgcttttctttgctagcacaatgtgtgttgctgtcagaatattctttttatattctgtggaaaaataaaggaaattcagattgtttaaatgcctaaaagttttgagataagttttgtttcaattagaaaaggaaataattttaggtggcatagtggcttaactggactgaattcaaatattctttcaactttcatctcaatagtgaattttgtatcagaatcttgtccaagttgtttcattgatttagtaagtgttctgcttccaccatctttcttttagaattcctagtgtcttttttgg

SEQ ID NO: 191967 - DNA, 955 bp, Homo Sapiens; identical to SEQ ID NO: 184458

SEQ ID NO: 191968 - DNA, 1727 bp, Homo Sapiens; identical to SEQ ID NO: 180322

SEQ ID NO: 191969 - DNA, 1236 bp, Homo Sapiens; identical to SEQ ID NO: 184459

SEQ ID NO: 191970 - DNA, 1449 bp, Homo Sapiens; identical to SEQ ID NO: 180323

SEQ ID NO: 191971 - DNA, 993 bp, Homo Sapiens; identical to SEQ ID NO: 180324

SEQ ID NO: 191972 - DNA, 2140 bp, Homo Sapiens; identical to SEQ ID NO: 184460
  misc_feature (1634)..(1644): n is a, c, g, or t
  misc_feature (1682)..(1740): n is a, c, g, or t
  misc_feature (1773)..(1830): n is a, c, g, or t

SEQ ID NO: 191973 - DNA, 1164 bp, Homo Sapiens; identical to SEQ ID NO: 184463
  misc_feature (980)..(989): n is a, c, g, or t

SEQ ID NO: 191974 - DNA, 2204 bp, Homo Sapiens; identical to SEQ ID NO: 184464
  misc_feature (105)..(114): n is a, c, g, or t
  misc_feature (361)..(369): n is a, c, g, or t
  misc_feature (1635)..(1647): n is a, c, g, or t

SEQ ID NO: 191975 - DNA, 955 bp, Homo Sapiens; identical to SEQ ID NO: 184465

SEQ ID NO: 191976 - DNA, 1231 bp, Homo Sapiens; identical to SEQ ID NO: 184466

SEQ ID NO: 191977 - DNA, 1607 bp, Homo Sapiens
ttgggtaggcgggcaaggcgggcgccgaggtttgcaagggctcgcagcggccagaaacccggctccgagcggcggcggcccggcttccgctgcccgtgagctaaggacggtccgctccctctcgccagctccgaatcctgatccaggcgggggccaggggcccctcgcctcccctctgaggaccgaagatgagcttcctcttcagcagccgctcttctaaaacattcaaaccaaagaagaatatccctgaaggatctcatcagtatgaactcttaaaacatgcagaagcaactctaggaagtgggaatctgagacaagctgttatgttgcctgagggagaggatctcaatgaatggattgctgtgaacactgtggatttctttaaccagatcaacatgttatatggaactattacagaattctgcactgaagcaagctgtccagtcatgtctgcaggtccgagatatgaatatcactgggcagatggtactaatattaaaaagccaatcaaatgttctgcaccaaaatacattgactatttgatgacttgggttcaagatcagcttgatgatgaaactctttttccttctaaaattggtgtcccatttcccaaaaactttatgtctgtggcaaagactattctaaagcgtctgttcagggtttatgcccatatttatcaccagcactttgattctgtgatgcagctgcaagaggaggcccacctcaacacctcctttaagcactttattttctttgttcaggagtttaatctgattgataggcgtgagctggcacctcttcaagaattaatagagaaacttggatcaaaagacagataaatgtttcttctagaacacagttacccccttgcttcatctattgctagaactatctcattgctatctgttatagactagtgatacaaactttaagaaaacaggataaaaagatacccattgcctgtgtctactgataaaattatcccaaaggtaggttggtgtgatagtttccgagtaagaccttaaggacacagccaaatcttaagtactgtgtgaccactcttgttgttatcacatagtcatacttggttgtaatatgtgatggttaacctgtagcttataaatttacttattattcttttactcatttactcagtcatttctttacaagaaaatgattgaatctgttttaggtgacagcacaatggacattaagaatttccatcaataatttatgaataagtttccagaacaaatttcctaataacacaatcagattggttttattcttttattttacgaataaaaaatgtatttttcagtatccttgagatttagaacatctgtgtcacttcagataacattttagtttcaagtttgtatggtagtgtttttatagataagatacgtctattttttcaaaattcatgattgcagtttaaatcatcatatgacgtgtgggtgggagcaaccaaagttatttttacagggactttatttttttgatctttatttgagattgttttcatatctatctaaattattagagtgtgtgtatcagaaggtaaatttttaatgtcttctaaggatggtcttccaggcttttaa

SEQ ID NO: 191978 - DNA, 1754 bp, Homo Sapiens; identical to SEQ ID NO: 184467
  misc_feature (1561)..(1581): n is a, c, g, or t

SEQ ID NO: 191979 - DNA, 2010 bp, Homo Sapiens; identical to SEQ ID NO: 184469

SEQ ID NO: 191980 - DNA, 1232 bp, Homo Sapiens; identical to SEQ ID NO: 184470
  misc_feature (1041)..(1059): n is a, c, g, or t

SEQ ID NO: 191981 - DNA, 2248 bp, Homo Sapiens; identical to SEQ ID NO: 184471
  misc_feature (1018)..(1034): n is a, c, g, or t

SEQ ID NO: 191982 - DNA, 955 bp, Homo Sapiens; identical to SEQ ID NO: 184472

SEQ ID NO: 191983 - DNA, 1689 bp, Homo Sapiens; identical to SEQ ID NO: 184474
  misc_feature (146)..(190): n is a, c, g, or t

SEQ ID NO: 191984 - DNA, 1456 bp, Homo Sapiens; identical to SEQ ID NO: 184477
  misc_feature (1039)..(1054): n is a, c, g, or t

SEQ ID NO: 191985 - DNA, 1009 bp, Homo Sapiens; identical to SEQ ID NO: 184478

SEQ ID NO: 191986 - DNA, 2218 bp, Homo Sapiens; identical to SEQ ID NO: 184479
  misc_feature (326)..(341): n is a, c, g, or t

SEQ ID NO: 191987 - DNA, 1547 bp, Homo Sapiens; identical to SEQ ID NO: 184480
  misc_feature (1040)..(1055): n is a, c, g, or t

SEQ ID NO: 191988 - DNA, 1743 bp, Homo Sapiens; identical to SEQ ID NO: 184482
  misc_feature (134)..(206): n is a, c, g, or t

SEQ ID NO: 191989 - DNA, 1977 bp, Homo Sapiens; identical to SEQ ID NO: 184483
  misc_feature (883)..(1021): n is a, c, g, or t
  misc_feature (1637)..(1711): n is a, c, g, or t

SEQ ID NO: 191990 - DNA, 1714 bp, Homo Sapiens; identical to SEQ ID NO: 184488
  misc_feature (1357)..(1366): n is a, c, g, or t

SEQ ID NO: 191991 - DNA, 1382 bp, Homo Sapiens; identical to SEQ ID NO: 184489
  misc_feature (195)..(204): n is a, c, g, or t

SEQ ID NO: 191992 - DNA, 1518 bp, Homo Sapiens; identical to SEQ ID NO: 184490
  misc_feature (1344)..(1353): n is a, c, g, or t

SEQ ID NO: 191993 - DNA, 1190 bp, Homo Sapiens; identical to SEQ ID NO: 184491

SEQ ID NO: 191994 - DNA, 1662 bp, Homo Sapiens; identical to SEQ ID NO: 180327
  misc_feature (412)..(440): n is a, c, g, or t
  misc_feature (449)..(736): n is a, c, g, or t
  misc_feature (1201)..(1264): n is a, c, g, or t

SEQ ID NO: 191995 - DNA, 1137 bp, Homo Sapiens; identical to SEQ ID NO: 184492

SEQ ID NO: 191996 - DNA, 860 bp, Homo Sapiens
  misc_feature (471)..(487): n is a, c, g, or t
ttgggaagaggcgagaacgacccccggaccgaccaaagcccgcgcgccgctgcatcccgcgtccagcacctacgtcccgctgccgtcgccgccgccaccatgcccaagagaaaggctgaaggggatgctaagggagataaagcaaaggtgaaggacgaaccacagagaagatccgcgaggttgtctgctaaacctgctcctccaaagccagagcccaagcctaaaaaggcccctgcaaagaagggagagaaggtacccaaagggaaaaagggaaaagctgatgctggcaaggaggggaataaccctgcagaaaatggagatgccaaaacagaccaggcacagaaagctgaaggtgctggagatgccaagtgaagtgtgtgcatttttgataactgtgtacttctggtgactgtacagtttgaaatactattttttatcaagttttataaaaatgcagaattttgttttacnnnnnnnnnnnnnnnnnaaaagctatgttgttagcacacagaacacttcattgttgtttttgggggaaggggcatatgtcactaatagaatgtctccaaagctggattgatgtggagaaaacacctttcccttctagttttgagagacttcctcttggctcccaggaggagggattccctgactttgacacacatggccaccttggcacaaaagccttgtggtatagaaaaacaaatttgtttttatgtcctcttctccctttccatctttcagcatagacttaactcccttaagcccagacatctgttgagacctgacccctagtcattggttaccagtgtgtcaggcaatctggactttccagtgatgccactgagatggcacctgtc

SEQ ID NO: 191997 - DNA, 1417 bp, Homo Sapiens; identical to SEQ ID NO: 180328
  misc_feature (444)..(473): n is a, c, g, or t

SEQ ID NO: 191998 - DNA, 1071 bp, Homo Sapiens
  misc_feature (813)..(827): n is a, c, g, or t
ttgggaacgaccccccgaccgaccaaagcccgcgcgccgctgcatcccgcgtccagcacctacgtcccgctgccgtcgccgccgccaccatgcccaagagaaaggctgaaggggatgctaagggagataaagcaaaggtgaaggacgaaccacagagaagatccgcgaggttgtctgctgtaagtgtatgcttttgaattttcgtgcttgtccctgaaactaaaaaacatcaaaaaacaattccctttgcttccatgaattatggttagtgcctggttttgaatcattgcctctacttgggactcttgcccctttgggttttgctggttctgaaattctgatgcctgtagccaaagtgggacatttgagtgggcttctggaaatccaacattctagaagaaagccaaccacaaaaacttttgaggaggaggagaaacttctctacccttggtacttttggttggttgtgggtggttttcttcagtccattgtactgatgttcactttttcctctcttcctgccaaaaaaagaaacctgctcctccaaagccagagcccaagcctaaaaaggcccctgcaaagaagggagagaaggtacccaaagggaaaaagggaaaagctgatgctggcaaggaggggaataaccctgcagaaaatggagatgccaaaacagaccaggcacagaaagctgaaggtgctggagatgccaagtgaagtgtgtgcatttttgataactgtgtacttctggtgactgtacagtttgaaatactattttttatcaagttttataaaaatgcagaattttgttttacnnnnnnnnnnnnnnnaaaagctatgttgttagcacacagaacacttcattgttgtttttgggggaaggggcatatgtcactaatagaatgtctccaaagctggattgatgtggagaaaacacctttcccttctagttttgagagacttcctcttggctctcaggaggagggattccctgactttgacacacatggcaccttggcacaaaaagccttgtggtatagaaaaacaaatttgttttatgtctcttctcccttt

SEQ ID NO: 191999 - DNA, 863 bp, Homo Sapiens
  misc_feature (484)..(498): n is a, c, g, or t
ttggcgagcagtgtgaagaagaggcgagaacgacccccggaccgaccaaagcccgcgcgccgctgcatcccgcgtccagcacctacgtcccgctgccgtcgccgccgccaccatgcccaagagaaaggctgaaggggatgctaagggagataaagcaaaggtgaaggacgaaccacagagaagatccgcgaggttgtctgctaaacctgctcctccaaagccagagcccaagcctaaaaaggcccctgcaaagaagggagagaaggtacccaaagggaaaaagggaaaagctgatgctggcaaggaggggaataaccctgcagaaaatggagatgccaaaacagaccaggcacagaaagctgaaggtgctggagatgccaagtgaagtgtgtgcatttttgataactgtgtacttctggtgactgtacagtttgaaatactattttttatcaagttttataaaaatgcagaattttgttttacnnnnnnnnnnnnnnnaaaagctatgttgttagcacacagaacacttcattgttgtttttgggggaaggggcatatgtcactaatagaatgtctccaaagctggattgatgtggagaaaacacctttcccttctagttttgagagacttcctcttggctcccaagaggagggattccctgactttgacacacatggccaccttggcacaaaagccttgtggtatagaaaaacaaatttgtttttatgtcctcttctccctttccatctttcagcatagacttaactcccttaagcccagacatctgttgagacctgacccctagtcattggttaccagtgtgtcaagcaatctggactttccagtgatgccactgagatgg

SEQ ID NO: 192000 - DNA, 1025 bp, Homo Sapiens
ttgggtcttagggccggtgctggccctgcccacgcctagggctccggcgcgtcacgggcctcagctgggattcccgcgcccctcggacggccacgagactcggacatctttccaggaacagcgtgaggaggacagaagcacccaacaggactgctcaagccacctgcgaacactgctgctaccatgcccaagagaaaggcaaaaggagatgctaaaggtgataaagcaaaggtgaaggatgagccacagaggagatcagctcggttgtctgctaaaccagctcctccaaaaccagagcccaggcctaaaaaggcctctgcaaagaagggagagaagcttcccaaagggagaaaggggaaagcagatgctggaaaggatggaaacaaccctgcaaaaaaccgagatgcctctacactccagtcccagaaagcggaaggcactggggatgccaagtgaaatgtacatttttgagagctctgtacttatagtgactctactgtttgaaatactatttttttaaatcaagttttataaaagtgtagaattttggcttttttaagttatgttgttagcacacaggacacttccttgttgtcttttgtggaaagggcaagtaccactaatagggtgtatctcagaaactgaattgaaataagggaaaataggattttctgtcctggtttttgaagattgttcttgattcccttgattcccaggagagattctctgacattcacgtgtcagccactttggcacggaagccttacagtgtggggaaccaaaacttcgtgtctcctctttccccgatgccatcagcatagacttgacttccttaaaccgagagttttgatgtggccttggcaaccctaaaatcagctgtgttaggtaacaaaactcaggctttctgttgatgacatcgagatggtgtcacttaaaagagccaagattcctgttttcagtttgtggattcatcctgctggttttactttagtccctccatgtcaaagtgggcctgagaaaagctc

SEQ ID NO: 192001 - DNA, 861 bp, Homo Sapiens
  misc_feature (337)..(361): n is a, c, g, or t
ttggctaagggagataaagcaaaggtgaaggacgaaccacagagaagatccgcgaggttgtctgctaaacctgctcctccaaagccagagcccaagcctaaaaaggcccctgcaaagaagggagagaaggtacccaaagggaaaaagggaaaagctgatgctggcaaggaggggaataaccctgcagaaaatggagatgccaaaacagaccaggcacagaaagctgaaggtgctggagatgccaagtgaagtgtgtgcatttttgataactgtgtacttctggtgactgtacagtttgaaatactattttttatcaagttttataaaaatgcagaannnnnnnnnnnnnnnnnnnnnnnnnaaaagctatgttgttagcacacagaacacttcattgttgtttttgggggaaggggcatatgtcactaatagaatgtctccaaagctggattgatgtggagaaaacacctttcccttctagttttgagagacttcctcttggctcccaggaggagggattccctgactttgacacacatggccaccttggcacaaaagccttgtggtatagaaaaacaaatttgtttttatgtcctcttctccctttccatctttcagcatagacttaactcccttaagcccagacatctgttgagacctgacccctagtcattggttaccagtgtgtcaggcaatctggactttccagtgatgccactgagatggcacctgtcaaaagagcagtggttccatttctagattgtggatcttcagataaattctgccattttcatttcacttcctgaaagtcagggtcggcttgtgaaagttgttaaacaacatgctaaatgtgaaatgtca

SEQ ID NO: 192002 - DNA, 1486 bp, Homo Sapiens; identical to SEQ ID NO: 184495
  misc_feature (762)..(777): n is a, c, g, or t

SEQ ID NO: 192003 - DNA, 1603 bp, Homo Sapiens; identical to SEQ ID NO: 184497

SEQ ID NO: 192004 - DNA, 1393 bp, Homo Sapiens; identical to SEQ ID NO: 180332
  misc_feature (1012)..(1034): n is a, c, g, or t

SEQ ID NO: 192005 - DNA, 1095 bp, Homo Sapiens
ctttgtacaaaaaagttggctctgatactcctaccacccttgccagccatagcaccaagactgatgccagtagcactcaccatagcacggtacctcctctcacctcctccaatcacagcacttctccccagttgtctactggggtctctttctttttcctgtcttttcacatttcaaacctccagtttaattcctctctggaagatcccagcaccgactactaccaagagctgcagagagacatttctgaaatgtttttgcagatttataaacaagggggttttctgggcctctccaatattaagttcaggccaggatctgtggtggtacaattgactctggccttccgagaaggtaccatcaatgtccacgacgtggagacacagttcaatcagtataaaacggaagcagcctctcgatataacctgacgatctcagacgtcagcgtgagtgatgtgccatttcctttctctgcccagtctggggctggggtgccaggctggggcatcgcgctgctggtgctggtctgtgttctggttgcgctggccattgtctatctcattgccttggctgtctgtcagtgccgccgaaagaactacgggcagctggacatctttccagcccgggatacctaccatcctatgagcgagtaccccacctaccacacccatgggcgctatgtgccccctagcagtaccgatcgtagcccctatgagaaggtttctgcaggtaatggtggcagcagcctctcttacacaaacccagcagtggcagccacttctgccaacttgtaggggcacgtcgcccgctgagctgagtggccagccagtgccattccactccactcaggttcttcagggccagagcccctgcaccctgtttgggctggtgagctgggagttcaagtgggctgctcacagcctccttcagaggccccaccaaatttctcggacacttctcagtgtgtggaagctcatgtgggcccctgagggctcatgcctgggaagtgttgtggtgggggctcccaggaggactggcccagagagccctgagatagcggggatcttgaactggactgataaaacgtggtctccc

SEQ ID NO: 192006 - DNA, 1296 bp, Homo Sapiens; identical to SEQ ID NO: 184499
  misc_feature (702)..(728): n is a, c, g, or t

SEQ ID NO: 192007 - DNA, 2356 bp, Homo Sapiens; identical to SEQ ID NO: 184500

SEQ ID NO: 192008 - DNA, 1484 bp, Homo Sapiens
ttggccctgggctcgcggcggtgccgcggggatggcgggagccggagctggagccggagctcgcggcggagcggcggcgggggtcgaggctcgagctcgcgatccaccgcccgcgcaccgcgcacatcctcgccaccctcggcctgcggctcagccctcggcccgcaggatggatggcgggtcagggggcctggggtctggggacaacgccccgaccactgaggctcttttcgtggcactgggcgcgggcgtgacggcgctcagccatcccctgctctacgtgaagctgctcatccaggtgggtcatgagccgatgccccccacccttgggaccaatgtgctggggaggaaggtcctctatctgccgagcttcttcacctacgccaagtacatcgtgcaagtggatggtaagatagggctgttccgaggcctgagtccccggctgatgtccaacgccctctctactgtgactcgggggagcatgaagaaggttttccctccagatgagattgagcaggtttccaacaaggatgatatgaagacttccctgaagaaagttgtgaaggagacctcctacgagatgatgatgcagtgtgtgtcccgcatgttggcccaccccctgcatgtcatctcaatgcgctgcatggtccagtttgtgggacgggaggccaagtacagtggtgtgctgagctccattgggaagattttcaaagaggaagggctgctgggattcttcgttggattaatccctcacctcctgggcgatgtggttttcttgtggggctgtaacctgctggcccacttcatcaatgcctacctggtggatgacagcgtgagtgacaccccaggggggctgggaaacgaccagaatccaggttcccagttcagccaggccctggccatccggagctataccaagttcgtgatggggattgcagtgagcatgctgacctaccccttcctgctagttggcgacctcatggctgtgaacaactgcgggctgcaagctgggctccccccttactccccagtgttcaaatcctggattcactgctggaagtacctgagtgtgcagggccagctcttccgaggctccagcctgcttttccgccgggtgtcatcaggatcatgctttgccctggagtaacctgaatcatctaaaaaacacggtctcaacctggccaccgtgggtgaggcctgaccaccttgggacacctgcaagacgactccaacccaacaacaaccagatgtgctccagcccagccgggcttcagttccatatttgccatgtgtctgtccagatgtggggttgagcgggggtggggctgcacccagtggattgggtcacccggcagacctagggaaggtgaggcgaggtggggagttggcagaatccccatacctcgcagatttgctgagtctgtcttgtgcagagggccagagaatggcttatgggggcccaggtttggatggggaagggctaa

SEQ ID NO: 192009 - DNA, 2390 bp, Homo Sapiens; identical to SEQ ID NO: 180334
  misc_feature (251)..(306): n is a, c, g, or t
  misc_feature (2141)..(2151): n is a, c, g, or t

SEQ ID NO: 192010 - DNA, 1805 bp, Homo Sapiens; identical to SEQ ID NO: 184503

SEQ ID NO: 192011 - DNA, 823 bp, Homo Sapiens
  misc_feature (42)..(51): n is a, c, g, or t
ttggggcatggcatttgttgtgactggcacccaatgtttgannnnnnnnnnaaaactatccaattaaaattaaggtctgggagtgttctgtttcccattactttaatactcacctcctcccagactttctacacctgttgcacctcaggcagaggatgttctggacctccccctcttggtccctactagagacctctcaacagatctgtgggcccagtcattgggttttatcagtgcttaatgtgaactaagttttttacttccacagaatacaagccactaccttctgacctccccaccccccaccaacccccatcttttaatatgctgtggggcatagaactccggaatgaccagcatgatattttcagagtcttgtccccggggtattagcacctctttttgaacagggaattgattcaagattggacatggtctcctctgattatcaggtactggggctgagggcattaaaaatagtaagcctccctcctcgtcccctgcctcaagaaattgcctccttatttatcaacatctttttcctccctttccctgagagctcacagtacaatgtttcagaagccccatttgcacaggttttcagcaactcagaatgctctacttctttttctttgagaaaggattaagatacactcctgctgtgcccccatctttcctccaaactcctgcctgtgtttgtgtggatacccagtcccagaaccacactgttgagttggacacactgtaaactcctgggtaactgtcaagtcatgatggagacttcatgttgttctgtataaaatgcaaaataaatgtttttatt

SEQ ID NO: 192012 - DNA, 921 bp, Homo Sapiens
ttggctttccttcagccgcctcctttcaaccttgtcaacccgtcggcgcggcctctggtgcagcggcggcggctcctgttcctgccgcagctctctccctttcttacctccccaccagatcccggagatcgcccgccatggctttacttactgcggccgcccggctcttgggaaccaagaatgcatcttgtcttgttcttgcagcccggcatgccagtgcttcctccacgaatttgaaagacatattggctgacctgatacctaaggagcaggccagaattaagactttcaggcagcaacatggcaagacggtggtgggccaaatcactgtggacatgatgtatggtggcatgagaggcatgaagggattggtctatgaaacatcagttcttgatcctgatgagggcatccgtttccgaggctttagtatccctgaatgccagaaactgctacccaaggctaagggtggggaagaacccctgcctgagggcttattttggctgctggtaactggacatatcccaacagaggaacaggtatcttggctctcaaaagagtgggcaaagagggcagctctgccttcccatgtggtcaccatgctggacaactttcccaccaatctacaccccatgtctcagctcagtgcagctgttacagccctcaacagtgaaagtaactttgcccgagcatatgcacagggtatcagccgaaccaagtactgggagttgatttatgaagactctatggatctaatcgcaaagctaccttgtgttgcagcaaagatctaccgaaatctctacagagaaggcagcggtattggggccattgactctaacctggactggtctcacaatttcaccaacatgttaggctatactgatcatcagttcactgagctcacgcgcctgtacctcaccatcc

SEQ ID NO: 192013 - DNA, 899 bp, Homo Sapiens
  misc_feature (153)..(162): n is a, c, g, or t
cagatctgtgagagtctctagtagggaccaagaggggaggtccagaacatcctctgctgaggtgcaacaggtgtagaaagtctgggaggaggtgagtattaaagtaatgggaaacagaacactcccagatttaattttaattggatagttttnnnnnnnnnntcaaacattgggtgccagtcacaacaaatgccatgcctttatggtcacttggtagtataaaaaaattgccaaagcatgtccagctaaccaacaggtcttgctaggaggtgtttgtgtgcatgggagagggccaaggggcttggtacagctgactatccaacatgattcctatggaaacagaaggggcagagtcctggtttgctggcttattgagggcttggcagagaagctaaagctccaaagtgactacagattctctgcaaccggctttgacccatggaaacaggagccagattctcactctagagatagtgagggggccaaacctactcataccacatgcattagtcctggtcatcctccaggaccatgcgtatgatgggcaactcataccaggcaggggaagggagctgattagggaagaagggaccatttttcatcttttaaagtcttaatttatattttaacctcaaacatattatcagtgcctcagatataatttaatcttaagtctttaaaggccccctgaaacaaaagtatactttttatttaggcttcctcactttctggtagtcactttcacccagtctccagttttaccctgacttagagtccacaaacttcatcagaccctctgtgctcatggacttgggcctttctagagggaagcctaaggctcggctccagatgagctgtgccagtacacccaatgctcgtgccaacttttttgtacaaag

SEQ ID NO: 192014 - DNA, 3791 bp, Homo Sapiens; identical to SEQ ID NO: 184505

SEQ ID NO: 192015 - DNA, 1060 bp, Homo Sapiens
gaagaggccaaggaaacggtccgacagcagcatctgcaccctctcatagtgtgaaggcaggtagccctttggggttgttgcccttgtctgtgttctggcagccctattagtagcccactggggtcagcttgtaggccgtcagtgtacaggagcctggcgtgaagctgcatgtgatgataatggtcttctcgccatcccaagatgggttgtcagccatgatcttggcatgggtggtgacatcctggggtgataactgcggggactcattgggctgagtgtggatccaacctaagggttccatctccttgaggtactcatgctggggcagctggccaggcaggtgcacggtctggtgagtgccccactgcggcaccatcacaatgcagcggatctccttcacctgggggttatctggtgggctcaccccatataggtatcctgcaatttgggcccgaaggtcagatatgcagatgaacttcttaagcacattcttgggaaggatgtaggtgtagccagtctccttgatgtcgtcagatgaaacatagatgtgattggtccttaggtgcaggttggcagcagagatggccctgaccctccactcagtcttggatgagaaagtctgggtctcatagttgctggtggtggaggtgatgatctcatcgccatgcttgttgacagtgcgagtctgtgttgccgtcagctgcgattgttccttggtctgcttctcgatctcagcgatctgctgccgctgctgtgacggtgccgagatctccatacccaggatgatgtctcgaatttctgattgtgtcagtgatgccacgttcacattgtttttcttgccgtagtcagccaagatcagatccttgagctgcacctcgaccttgatccattcttcgtcagtcagagtgggccagatgtggtgtggttctgtaatagtagtcttgtctggcttcaggatcacttttgcccgatcgttgttcacatgtagggcacgcagaatcaggatgagacgggagaaggccgtgtaagaggaaatagtcccaacttttttgtacaaagt

SEQ ID NO: 192016 - DNA, 2117 bp, Homo Sapiens; identical to SEQ ID NO: 184507
  misc_feature (1656)..(1668): n is a, c, g, or t
  misc_feature (1700)..(1757): n is a, c, g, or t
  misc_feature (1793)..(1804): n is a, c, g, or t
  misc_feature (1827)..(1836): n is a, c, g, or t

SEQ ID NO: 192017 - DNA, 1473 bp, Homo Sapiens; identical to SEQ ID NO: 180337
  misc_feature (445)..(687): n is a, c, g, or t
  misc_feature (715)..(818): n is a, c, g, or t

SEQ ID NO: 192018 - DNA, 1844 bp, Homo Sapiens; identical to SEQ ID NO: 184508

SEQ ID NO: 192019 - DNA, 932 bp, Homo Sapiens
ccaactttgtacaaaaaagttgggttaagcagccatccatctcatttccaggcacttcaataggtcgctgattggtccttgcaccagcagtggtagtcgtacctatttcagagaggtctgaaattcaggttcttagtttgccagggacaggccctatcttatatttttttccatcttcatcatccacttctgcttacagtttgctgcttacaataacttaatgatggattgagttatctgggtggtctctagccatctgggcagtgtggttctgtgtaaccaaagggcattggcctcaaaccctgcatttggtttaggggctaacagagctcctcagataatcttcacacacatgtaactgctggagatcttattctattatgaataagaaacgagaagtttttccaaagtgttagtcaggatctgaaggctgtcattcagataacccagcttttccttttggcttttagcccattcagactttgccagagtcaagccaaggattgcttttttgctacagttttctgccaaatggcctagttcctgagtacctggaaaccagagagaaagaggatccaggatgtacttggatgaggaggcctggcttatctaggaagtcgtgtctggggtgcttattgctgctccatacagctgtacgtcagccccttggccttctctgtaggttcttggcagcaatgagcagctttcactcagtgacacaagtaattactgagtcctaatttgatagccaccaactgtacctgggtaggcaaagtcagatttttgagaacctttttcctgatttgaagttttaattaccttattttcttttatgctttcctctgtcttgtaatcttttctcttcttaatatccttccctataatttccattatttggattaattttagaataaaacctatttattttctga

SEQ ID NO: 192020 - DNA, 918 bp, Homo Sapiens; identical to SEQ ID NO: 184514

SEQ ID NO: 192021 - DNA, 2161 bp, Homo Sapiens; identical to SEQ ID NO: 184516
  misc_feature (1356)..(1366): n is a, c, g, or t

SEQ ID NO: 192022 - DNA, 921 bp, Homo Sapiens
ttggagaaaagctttagaggagaccaaagcctatacaacccaatctctagctagtgttgcttatcaaataaatgcattggccaacaatgtactccagttgctggatatccaagcctctcagcttcggagaatggagtcttccatcaatcatatctcacagactgtggatattcataaggagaaagtggcacgaagagagattggtattttgacaacaaataagaatacatcaagaactcacaaaataatagcacctgcgaatatggagcgccctgtaaggtatattcggaaacctatcgattacacagttctggatgatgtgggccatggtgtcaagcatggaaataaccagcctgcaagaactggcacactgtcgagaacaaatcctcctactcagaaaccgccaagtcctcccatgtcaggccggggaacactgggacggaatactccttataaaaccctggaacctgttaaacccccaacagttcctaatgactatatgaccagtcctgctaggcttggaagtcagcatagtccaggcaggacagcatctttaaatcagagaccaaggacacacagtggaagtagtggaggaagtggaagtcgagaaaacagtggtagcagtagtattggcattcccattgctgtgcctacaccttcgccacccactattggaccagggatgaggaacccatggatatggagggctgactgtatttgcctcgcatactagtcaagaatgacatttattatttcaagagcaaaccagtattgtacgatactccagctggagaatcagtgtctataaagcagccccgggctcagctcctggttcccagtatggcacaatgaccaggcagatatctcgacacaactctactacttcttcgacatcttctggtggatacagacgaactccct

SEQ ID NO: 192023 - DNA, 970 bp, Homo Sapiens
ttggtccagttgctggatatccaagcctctcagcttcggagaatggagtcttccatcaatcatatctcacagactgtggatattcataaggagaaagtggcacgaagagagattggtattttgacaacaaataagaatacatcaagaactcacaaaataatagcacctgcgaatatggagcgccctgtaaggtatattcggaaacctatcgattacacagttctggatgatgtgggccatggtgtcaagtggctaaaagccaagcatggaaataaccagcctgcaagaactggcacactgtcgagaacaaatcctcctactcagaaaccgccaagtcctcccatgtcaggccggggaacactgggacggaatactccttataaaaccctggaacctgttaaacccccaacagttcctaatgactatatgaccagtcctgctaggcttggaagtcagcatagtccaggcaggacagcatctttaaatcagagaccaaggacacacagtggaagtagtggaggaagtggaagtcgagaaaacagtggtagcagtagtattggcattcccattgctgtgcctacaccttcgccacccactattggaccagttgctgatagtccaactccaccgccaccacctccaccagatgacattcccatgtttgatgactctccacctcccccaccaccaccaccagtggattatgaagatgaggaggctgcagtagttcagtataatgatccatatgcagatggggatcctgcttgggcccccaagaattatattgagaaagttgttgcaatatatgattatacaaaagacaaggatgatgagctgtcatttatggagggtgcaatcatttatgttataaagaagaatgatgatggctggtatgaaggagtctgcaattcgagtgactggtctgttccctgggaactatgttgaatcaatcatgcactatactgattaa

SEQ ID NO: 192024 - DNA, 1412 bp, Homo Sapiens; identical to SEQ ID NO: 184518

SEQ ID NO: 192025 - DNA, 1087 bp, Homo Sapiens; identical to SEQ ID NO: 184520
  misc_feature (255)..(271): n is a, c, g, or t
  misc_feature (284)..(335): n is a, c, g, or t
  misc_feature (367)..(487): n is a, c, g, or t

SEQ ID NO: 192026 - DNA, 3145 bp, Homo Sapiens; identical to SEQ ID NO: 184522

SEQ ID NO: 192027 - DNA, 895 bp, Homo Sapiens; identical to SEQ ID NO: 184524

SEQ ID NO: 192028 - DNA, 2089 bp, Homo Sapiens; identical to SEQ ID NO: 184526

SEQ ID NO: 192029 - DNA, 1929 bp, Homo Sapiens; identical to SEQ ID NO: 184528

SEQ ID NO: 192030 - DNA, 980 bp, Homo Sapiens
ttgtacaaatatctatgccattggtgatgtagttgctggtccaatgctggctcacaaagcagaggatgaaggcattatctgtgttgaaggaatggctggtggtgctgtgcacattgactacaattgtgtgccatcagtgatttacacacaccctgaagttgcttgggttggcaaatcagaagagcagttgaaagaagagggtattgagtacaaagttgggaaattcccatttgctgctaacagcagagctaagacaaatgctgacacagatggcatggtgaagatccttgggcagaaatcgacagacagagtactgggagcacatattcttggaccaggtgctggagaaatggtaaatgaagctgctcttgctttggaatatggagcatcctgtgaagatatagctagagtctgtcatgcacatccgaccttatcagaagcttttagagaagcaaatcttgctgcgtcatttggcaaatcaatcaacttttgaattagaagattatatatatttttttctgaaatttcctgggagcttttgtagaagtcacattcctgaacaggatattctcacagctccaagaatttctaggactgaattatgaaacttttggaaggtatttaataggtttggacaaaatggaatactcttatatctatattttacataaatttagtattttgtttcagtgcactaatgtgtaagacaaaaagctacttattgtagcatcctggaatatctccgtcaactcatattttcatgctgttcatgaaagattcaatgcccctgaatttaaatagcttttttctctgatacagaaaagttgaattttacatggctggagctagaatttgatatgtgaacagttgtgtttgaagcacagtgatcaagttatttttaatttgggttttcacattggaaacaagtcagtcattcagatatgattcaaatgtctataaacggactgatgtaagtaaac

SEQ ID NO: 192031 - DNA, 1119 bp, Homo Sapiens; identical to SEQ ID NO: 184532

SEQ ID NO: 192032 - DNA, 1122 bp, Homo Sapiens
  misc_feature (29)..(41): n is a, c, g, or t
actttgtacaaaaaagttggttacattcnnnnnnnnnnnnncctgtttatacattagaacaagataagatttgaaatacttccttgcaaataatgtgcaactcccaaggtgaaactcaaatagaaaaagtcatctctctggtagaaaggatggctttcctgtaatgactatagagtaagagtggcagcaatctttccatgcccttttcagcagaaggcacagaacagtagcgggactgccatctctggcaagatttcaggtaaagaatctcttcttaatttctaccttcctgtttctctgaatcagcccataggtgttgatgagtggccactcttaaagagtcactcagtatcagggatctactgtctttgttcaaaggtcaaataaaaacctagtctccttttattctactttctattcttagctagaatgaaactcagcatatatacacttctggacataataatattgaatagtaattacctttactagatgaaagaaattttcattacaaacttaaatcatgtaaaactcaacaactcagattcctggacctggtgtcctggttgggtccaaggtgattttacagaagaaaaaaacaactcaagcattctggtggcaacatagagattgtaggctgcttctaagaaagttattaacaatttggaaattcctaagtaggatgagagttagtaactggatacgagtgaagtttatatccaagttcagactcaaaggcattattatgatttgcttcttcccatgtcttccatgtcctgcttctcaaagtttttctcatccatcacactcctgccttaactgctctgagtatgcatttgttttcaattcatctttatttcaatctgtttaacttttgaatcgcatgggaatacgcacattaagttcctttctaaaataagggttttatgaagctgagtttcacgataagtgtcttgctattttttgagatgttttatgggacaaagaaaactttacagatttatatgtattttgctgcaccagtaaatggaccattaactagggcccacctttaacagagcacccctttgaaagttttataggtatgaaatatatgtagattatttgttaaaagggttttaa

SEQ ID NO: 192033 - DNA, 1627 bp, Homo Sapiens; identical to SEQ ID NO: 180342
  misc_feature (195)..(205): n is a, c, g, or t
  misc_feature (833)..(895): n is a, c, g, or t

SEQ ID NO: 192034 - DNA, 1998 bp, Homo Sapiens; identical to SEQ ID NO: 184533

SEQ ID NO: 192035 - DNA, 959 bp, Homo Sapiens
tttgtacaaaaaagttgggtcaagcaactatcgacttagatcagttcagccaagcaactgacaaatcaaaaacccacttgtcagttcagtaaaataatttggtcaaacaacagtctattgcattgatttataaatagttgtcagttcacatagcaatttaatcaagtaatcattaattagttaccccctatatataaatatatgtaatcaatttcttcaaatagcttgcttacatgataatcaattagccaaccatgagtcatttagaatagtgataaatagaatacacagaatagtgatgaaattcaatttaaaaaatcacgttagcctccaaaccatttaattcaaatgaacccatcaactggatgccaactctggcgaatgtaggacctctgagtggctgtataattgttaattcaaatgaaattcatttaaacagttgacaaactgtcattcaacaattagctccaggaaataacagttatttcatcataaaacagtcccttcaaacacacaattgttctgctgaagagttgtcatcaacaatccaatgctcacctattcagttgctctgtggtcagtgtggctgcatagcagtggattccatgaaaggagtcattttagtgatgagctgccagtccattcccaggccaggctgtcgctggccatccattcagtcgattcagtcataggcgaatctgttctgcccgaggcttgtggtcaagcaaaaattcagccctgaaatcagcacatctgttcgttggactaaacccacaggttagttcagtcaaagcaggcaacccccttgtgggcactgaccctgccactggggtcatggcggttgtggcagctggggaggtttggccccaacagccctcctgtgcctgcttccctgtgtgtcggggtcctccagggagctgacccagaggtggaggccacggaggcagggtctctgggga

SEQ ID NO: 192036 - DNA, 1965 bp, Homo Sapiens; identical to SEQ ID NO: 184535

SEQ ID NO: 192037 - DNA, 1576 bp, Homo Sapiens; identical to SEQ ID NO: 184536
  misc_feature (358)..(596): n is a, c, g, or t

SEQ ID NO: 192038 - DNA, 1636 bp, Homo Sapiens; identical to SEQ ID NO: 184537
  misc_feature (104)..(132): n is a, c, g, or t

SEQ ID NO: 192039 - DNA, 1403 bp, Homo Sapiens; identical to SEQ ID NO: 184539
  misc_feature (51)..(61): n is a, c, g, or t
  misc_feature (1085)..(1094): n is a, c, g, or t

SEQ ID NO: 192040 - DNA, 1565 bp, Homo Sapiens
  misc_feature (983)..(993): n is a, c, g, or t
ttggcgcgtttgtagaggggtgggtgcgcacgctctgtccctgcgtgaccttccgaccccgctgtcctcaccgcaatggcggctgtgagggccctggtggcctcgaggctcgctgcggcatctgcattcacgtccctgtcccccggcggtcggacgccttcccagcgcgcagcccttcacctctccgtgccgcgccccgcggccagggtcgcgctggtgctgtctggatgcggagtctacgatgggaccgagatccacgaggcctcggcgatcctggtgcacctgagccgtggaggggctgaagtccagatctttgctcctgacgtccctcagatgcacgtgattgaccacaccaaggggcagccgtccgaaggcgagagcaggaatgttttgaccgagtctgcgaggatcgcccgtggcaaaatcacagacctggccaacctcagtgcagccaaccatgatgctgccatctttccaggaggctttggagcggctaaaaacctgagcacgtttgccgtggacgggaaagattgcaaggtgaataaagaagtggagcgtgtcctgaaggagttccaccaggccgggaagcccatcggcttgtgctgcattgcacctgtcctcgcggccaaggtgctcagaggcgtcgaggtgactgtgggccacgagcaggaggaaggtggcaagtggccttatgccgggaccgcagaggccatcaaggccctgggtgccaagcactgcgtgaaggaagtggtcgaagctcatgtggaccagaaaaacaaggtggtcacgaccccagccttcatgtgcgagacggcactccactacatccatgatgggatcggagccatggtgaggaaggtgctggaactcactggaaagtgacgcgcatggacggggcccagctaggcgccaggacttggcctcaccctctggctgaggagctgtcggctgctttccatccagctgggagtctggcaggcccnnnnnnnnnnnctttgccgaaacctgcaggcgttctctctctaaggaggatgtgctgcagtgcatgggggatgtttcttcctgggtgtggctgggctgctctcacatacagaggccgaggggccaattcgttctctgccacagggacttgcctcactgtgtcccaaaaacaaatcgcagccagcttttccagaaatagaaaattctgccgtctgaggttttatacttcaggttagttagtttttggaaggaagaacatttttaggtttgcaagcctcctgatcaggaaaccagaaataccacatttatggaccatgaaaggttggttcttgactctgaagggacttttgagttaatcagcgtaaggggatttctaaagcaggcaatccctgtagccgcagagaataaacgccttcccaaaatggcaacttcccacagccacatttcagacctgctgagactgctgagtgaggaatggcagtgaggtttcttcattagtctcagttctcttaatttcaggaagaaagggaaattgcagctcctcacccccaagattgacctctggggagtgatggtagcgttgg

SEQ ID NO: 192041 - DNA, 2678 bp, Homo Sapiens; identical to SEQ ID NO: 184542
  misc_feature (2260)..(2285): n is a, c, g, or t

SEQ ID NO: 192042 - DNA, 1098 bp, Homo Sapiens
  misc_feature (428)..(463): n is a, c, g, or t
ttggattttaattaatcctttaggttccagatgaagaagaaaatgaagagagtgacaacgaaaaggaaactgaaaagagtgactccgtaacagattctggaccaaccttcaactatcttcttgatatgcccctttggtatttaaccaaggaaaagaaagatgaactctgcaggctaagaaatgaaaaagaacaagagctggacacattaaaaagaaagagtccatcagatttgtggaaagaagacttggctacatttattgaagaattggaggctgttgaagccaaggaaaaacaagatgaacaagtcggacttcctgggaaaggggggaaggccaagggaaaaaaaacacaaatggctgaagttttgccttctccgcgtggtcaaagagtcattccacgaataaccatagaaatgaaagcagaggcnnnnnnnnnnnnnnnnnnnnnnnnnnnnnnnnnnnntactgaaggaagccctcaagaagatggtgtggaactagaaggcctaaaacaaagattagaaaagaaacagaaaagagaaccaggtacaaagacaaagaaacaaactacattggcatttaagccaatcaaaaaaggaaagaagagaaatccctggtctgattcagaatcagataggagcagtgacgaaagtaattttgatgtccctccacgagaaacagagccacggagagcagcaacaaaaacaaaattcacaatggatttggattcagatgaagatttctcagattttgatgaaaaaactgatgatgaagattttgtcccatcagatgctagtccacctaagaccaaaacttccccaaaacttagtaacaaagaactgaaaccacagaaaagtgtcgtgtcagaccttgaagctgatgatgttaaagcagtgtaccactgtcttcaagccctcctgctacacatttcccagatgaaactgaaattacaaacccagttcctaaaaagaatgtgacagtgaagaagacagcagcaaaaagtcagtcttccacctccactaccggtgccaaaaaagggctgccccaaaggaactaaaagggatccagctttgaattctggtgtctctcaaaagcctg

SEQ ID NO: 192043 - DNA, 919 bp, Homo Sapiens
ttggtgaagagttaatggctccgcgcgcaggcactgccctctgaactggaacaaaatgcaacttccggttggagtcactcggccaggcgccggcgacctgaggggagagggaacgcagctgaaagcgtgaactgtacctgtcatttactccatcctttatagtgatgctacaggacgaagaggaatggataaaaacattggcgagcaactcaataaagcgtatgaagccttccggcaggcatgcatggatagagattctgcagtaaaagaattacagcaaaagactgagaactatgagcagagaatacgtgaacaacaggaacagctgtcacttcaacagactattattgacaagctaaaatctcagttacttcttgtgaattccactcaagataacaattatggctgtgttcctctgcttgaagacagtgaaacaagaaagaataatttgactcttgatcagccacaagataaagtgatttcaggaatagcaagagaaaaactaccaaaggtaagaagacaagaggtttcttctcctagaaaagaaacttcagcaaggagtcttggcagtcctttgctccatgaaaggggtaatatagagaagactttctgggatctgaaagaagaatttcataaaatatgcatgctagcaaaagcacagaaagaccacttaagcaaacttaatataccagacactgcaactgaaacacagtgctctgtgcctatacagtgtacggataaaacagataaacaagaagcgctgtttaagcctcaggctaaagatgatataaatagaggtgcaccatccatcacatctgtcacaccaagaggactgtgcagagatgaggaagacacctcttttgaatcactttctaaattcaatgtcaagtttccacctatggacaatgactcaactttc

SEQ ID NO: 192044 - DNA, 937 bp, Homo Sapiens; identical to SEQ ID NO: 184544

SEQ ID NO: 192045 - DNA, 1014 bp, Homo Sapiens; identical to SEQ ID NO: 184545

SEQ ID NO: 192046 - DNA, 966 bp, Homo Sapiens; identical to SEQ ID NO: 184546

SEQ ID NO: 192047 - DNA, 988 bp, Homo Sapiens; identical to SEQ ID NO: 184547

SEQ ID NO: 192048 - DNA, 1757 bp, Homo Sapiens; identical to SEQ ID NO: 184548

SEQ ID NO: 192049 - DNA, 949 bp, Homo Sapiens
ctttgtacaaaaaagttggctactttgtccatcaggtggtgaggtttctgaagaattatccctgaaactgccaccaaatgtggtagaagaatctgcccgagcttctgtctcagttttgggagacatattaggctctgccatgcaaaacacacaaaatcttctccagatgccctatggctgtggagagcagaatatggtcctctttgctcctaacatctatgtactggattatctaaatgaaacacagcagcttactccagaggtcaagtccaaggccattggctatctcaacactggttaccagagacagttgaactacaaacactatgatggctcctacagcacctttggggagcgatatggcaggaaccagggcaacacctggctcacagcctttgttctgaagacttttgcccaagctcgagcctacatcttcatcgatgaagcacacattacccaagccctcatatggctctcccagaggcagaaggacaatggctgtttcaggagctctgggtcactgctcaacaatgccataaagggaggagtagaagatgaagtgaccctctccgcctatatcaccatcgcccttctggagattcctctcacagtcactcaccctgttgtccgcaatgccctgttttgcctggagtcagcctggaagacagcacaagaaggggaccatggcagccatgtatataccaaagcactgctggcctatgcttttgccctggcaggtaaccaggacaagaggaaggaagtactcaagtcacttaatgaggaagctgtgaagaaagacaactctgtccattgggagcgccctcagaaacccaaggcaccagtggggcatttttaccaaccccaggctccctctgctgaagtggagatgacatcctatgtgctcctcgccttatctcacggccccaccagcccccaacctcggaggaac

SEQ ID NO: 192050 - DNA, 2765 bp, Homo Sapiens; identical to SEQ ID NO: 184549

SEQ ID NO: 192051 - DNA, 894 bp, Homo Sapiens
ctttgtacaaaaaagttgattaggctctgccatgcaaaacacacaaaatcttctccagatgccctatggctgtggagagcagaatatggtcctctttgctcctaacatctatgtactggattatctaaatgaaacacagcagcttactccagagatcaagtccaaggccattggctatctcaacactggttaccagagacagttgaactacaaacactatgatggctcctacagcacctttggggagcgatatggcaggaaccagggcaacacctggctcacagcctttgttctgaagacttttgcccaagctcgagcctacatcttcatcgatgaagcacacattacccaagccctcatatggctctcccagaggcagaaggacaatggctgtttcaggagctctgggtcactgctcaacaatgccataaagggaggagtagaagatgaagtgaccctctccgcctatatcaccatcgcccttctggagattcctctcacagtcactcaccctgttgtccgcaatgccctgttttgcctggagtcagcctggaagacagcacaagaaggggaccatggcagccatgtatataccaaagcactgctggcctatgcttttgccctggcaggtaaccaggacaagaggaaggaagtactcaagtcacttaatgaggaagctgtgaagaaagacaactctgtccattgggagcgccctcagaaacccaaggcaccagtggggcatttttacgaaccccaggctccctctgctgaggtggagatgacatcctatgtgctcctcgcttatctcacggcccagccagccccaacctcggaggacctgacctctgcaacccacatcgtgaaattggatcacgaagcaccgaatgcccaggg

SEQ ID NO: 192052 - DNA, 710 bp, Homo Sapiens
tttgtacaaaaaagttggccagcatgtgcgttaatagcacctgcggtctgaacatccccctctctgtgggcgggaccacctcagctttcgctcctactacttccctgtgaagaatgtgattgatggagacctctgtgagcagttcaattccatggaacccaacaaacaaaagaacgtctctgaagaactggaccgaaccccacccgaagtgtccaagaaactcgaggatatccggacccgctacgccttctgagccctcctttcccggtggggcttgccagagactgtgtgttttgtttcccccaccaccatcactgccacctggcttctgccatgtggcaggagggtgactggataattaagactgcattatgaaagtcaacagctctttcccctcagctcttctcctggaatgactggcttcccctcaaattggcactgagatttgctacacttctccccacctggtacatgatacatgaccccaggttccagtgtagaacctgagtcccccattccccaaagccatccctgcattgatatgtcttgactctcctgtctacttttgcacacacccttaatttttaattggttttcttgtaaatacagttttgtacaatgttatctctgtgggaggaaggaggcaggctgtggtgggactgggtagggtatagtatcactcctgagttccactgctctagaatctaacc

SEQ ID NO: 192053 - DNA, 2629 bp, Homo Sapiens; identical to SEQ ID NO: 184552

SEQ ID NO: 192054 - DNA, 948 bp, Homo Sapiens
ctttgtacaaaaaagttggctcggctccagcgccatggcgccctccaggaagttcttcgttgggggaaactggaagatgaacgggcggaagcagagtctgggggagctcatcggcactctgaacgcggccaaggtgccggccgacaccgaggtggtttgtgctccccctactgcctatatcgacttcgcccggcagaagctagatcccaagattgctgtggctgcgcagaactgctacaaagtgactaatggggcttttactggggagatcagccctggcatgatcaaagactgcggagccacgtgggtggtcctggggcactcagagagaaggcatgtctttggggagtcagatgagctgattgggcagaaagtggcccatgctctggcagagggactcggagtaatcgcctgcattggggagaagctagatgaaagggaagctggcatcactgagaaggttgttttcgagcagacaaaggtcatcgcagataacgtgaaggactggagcaaggtcgtcctggcctatgagccggtgtgggccattggtactggcaagactgcaacaccccaacaggcccaggaagtacacgagaagctccgaggatggctgaagtccaacgtctctgatgcggtggctcagagcacccgtatcatttatggaggctctgtgactggggcaacctgcaaggagctggccagccagcctgatgtggatggcttccttgtgggtggtgcttccctcaagcccgaattcgtggacatcatcaatgccaaacaatgagccccatccatcttccctacccttcctgccaagccagggactaagcagcccagaagcccagtaactgccctttccctgcatatgctttctgatggtgtcatctgctccttcctgtggcctcatcccaaacctgatatctttccctttactgttttatatcttcc

SEQ ID NO: 192055 - DNA, 868 bp, Homo Sapiens
  misc_feature (670)..(678): n is a, c, g, or t
actttgtacaaaaaagttggataatctaaaatgtcagcaaggcatcggagatgggttaacatctcaaaacaaaatagcctacaaatgttccttgtgggagactttggcgagggtctgtgggtaaaagcaccagggggttaatcttggctcagtttcctaaaaagcattgattaatttaactggcttttaaatatccccttccgctgatatttgttgtcagctgcctacagtttaatatgcagcgttcacaaaacagctgccagtgctacaattaatgaagcaaaacttaatatgtaatcacaatctaaattagcatcaatactttgacattcattacattggtttgggggaagaaaagtagttctggtatgtttcattgatccccagataccttccaatctggacatgatggggctgattccagatggtttttctgaaatttcattaaggtaggtcagcgtcatttgtctctgtttaggtaaaatataaaaaccctgcccagtagcagtggcatcgcttggttcctgatgcccatgttccagaggaattcggataccacaaacagctaagacaatctcagcttttcttagacaatcttctatctcaaacttcagacattccagaattgtcatgatgtttacactgtctgagttaaaaatcctgttcaagnnnnnnnnngattttgtatcacttcttaaaaaggaatattcatagcacttgtcacaaatagaaggcaaccatgagataatacaagccagggagaggcttgtattacatgacaggtgtaattagtctgctgagccagctttacccaatgaagggcatatgtgttagagagattagctaagagtagaaattcgagcataga

SEQ ID NO: 192056 - DNA, 1019 bp, Homo Sapiens
  misc_feature (689)..(716): n is a, c, g, or t
cttttaaaagccaactttgtacaaaaaagttggctgaggcttcctccttatagtagtcaggagcaggcgattgaagtaattctgtcctgcggggttcagcatcatgcacgttccccctgggccattctctgatgcagggcacttgctccacactctgggaacccagattcaccagtctgccctgtcacgtagttgaaggagttgcatttatctttctggctcctaattcctttaaaattacatttgttgcagaacctccacaaggctaaataaaattacatttgtgaccatcagagaactgaataaaccattaactggccatcctggttttgcagagatcaggttgttgacagttcctggttgacccacagctacccatgtcagttatctccactaacatatccaagaatctttgtaggacaatttctccacctgcaaggtctttcaggtagaactcttcttttaaggcaattagcccattgccaaaaggttttactgtcttaaagctgtctttctgagatctaattccaaggacttctccacagctaagtgagatgcctcacaccattaggtgatgctttggacagaacagagtattttcatcttgtgtttaaagcaattccttggcttcggctcctcaccactttctatgccagtctcccatttatgtccctagtaatgcctatgcnnnnnnnnnnnnnnnnnnnnnnnnnnnnctgatggtgaaacctacaggtttaagggcttaaatctcaaactttgttaggagtaacaggagcgtgctgagcgggcaagcaataaaacaaatcataccaaaaagccacattgctctctcctaagccccaaccccactccactcctgtggccaggggtccaaacagaaaataaccggagaagacaaggaggtcaaaggatcagggaactaagcattatgtgaattcaccagcaagatgtacagaacgcctgtgtttacattgtttttatggaactagcagaataaaacatctattttaaaaatg

SEQ ID NO: 192057 - DNA, 1225 bp, Homo Sapiens
ttggtgcacagaggagaaaaagcaaagcaagtcacagcaactgaaaaagatttttcaagagtatggcactgttggcgtgtcattgcacattggaatctcattaatttccttgggcatattttacatggttgtgtcaagtggtgtggacatgcctgcaatcctgctgaaactcggatttaaagagtccctggtacagtcaaaaatggcagcaggcacaagtaccttcgtggtggcctatgcaatccacaagctgtttgcgccagtgagaatcagcattacgctagtctctgtgcccttgattgtcagatattttcgaaaagtgggattttttaaacctccagctgcaaaaccttaatgaactcttcagtcgtacacactgaaaacctatttcttctaaattacatgatttggattggttttagggttttagggttgtagggtttcttttggagaggtagggggctaattgctatgttctcatggataaactttgccagcaaaaatcaggcttttgaacaattttaattttttgcctcataaattttgtgaatgctattcattatagggcttgtatatataatctaaaatgtcagcaaggcatcggagatgggttaacatctcaaaacaaaatagcctacaaatgttccttgtgggagactttggcgagggtctgtgggtaaaagcaccagggggttaatcttggctcagtttcctaaaaagcattgattaatttaactggcttttaaatatccccttccgctgatatttgttgtcagctgcctacagtttaatatgcagcgttcacaaaacagctgccagtgctacaattaatgaagcaaaacttaatatgtaatcacaatctaaattagcatcaatactttgacattcattacattggtttgggggaagaaaagtagttctggtatgtttcattgatccccagataccttccaatctggacatgatggggctgattccagatggtttttctgaaatttcattaaggtaggtcagcgtcatttgtctctgtttaggtaaaatataaaaaccctgcccagtagcagtggcatcgcttggttcctgatgcccatgttccagaggaattcggataccacaaacagctaagacaatctcagcttttcttagacaatcttctatctcaaacttcagacattccagaattgtcatgatgtttacactgtctgagttaaaaatcctgttcaag

SEQ ID NO: 192058 - DNA, 1218 bp, Homo Sapiens
actttgtacaaaaaagttggcacaaaccaaatacctttctttcatcacttaactatacgtactttatctctggtaacactagaatgctgtggtcttgagggaatgttagcaaggaacacatagaagatttggtgtttcataagcctgtctaggtgtggcaggttttgtgtggtacactgatgtttaccataagcaggtacaagcttcatgaaccgttcttaatgaactataattgaatagataccaaaaatagaatgacaaatgtattttaatagcagatgaggcagttttaggatgaattttccactgttgattttacttcaagacatagcaagagaaacaaaattttgttttcaagacatttccactgcagtttcaagctgtagtgggcatatgcttcatttacttccaaagaggcaaaagcagctggaattggcttacagcacatgctttgtttcatgttatgggtgaggacctacatacactcttactttagcagtcacttaaccttctccagcaaggcagttgtggggttcactaggatttagtgcctgatcttttttttgggaaggggcgggaatgaatgtgttggggctgggagggaagcagaagaaaatgggagtgtgagtgagtgtgcatgtgtctgaagttcaccattgcccccacctgcacctagcaaggaacaggtgtttgatgtattttgctcatgactgcagtatgcatgtatttttttccttctctgtgttttctaaacttacactaaaggattcatcaaatcatcttgttcagatggctcaggattgtatttattttgcttaccccgtgctcttgggttctatagtatttctataattatgtaacgagaatagtgttgcactgtaatctatcatatagagctatatgtatggaaaattttgatcaattttttaagaaatgtatcctgtttgcaaaggcacagtaaagttgcatcttatagactataggcaataaagctaacaataaaccttatttaacacaaaccacatccatatcctctgttcatttgattttggaaaaagtagcatatccagtagtttcagggaattcattttaactttaagaattctgatatatttaatttataaatttcggactgatataatagagttttggaaaactataagaaatgctttgttaatgtgtgtattcctatgtaaaacacagggcttttcctgccaa

SEQ ID NO: 192059 - DNA, 651 bp, Homo Sapiens
ttggcccgctgctccgcccctctctgtcttctctgcagtgggagcagctctcctgccacagctcctcaccccctgaaaatgttcgcctgctccaagtttgtctccactccctccttggtcaagagcacctcacagctgctgagccgtccgctatctgcagtggtgctgaaacgaccggagatactgacagatgagagcctcagcagcttggcagtctcatgtccccttacctcacttgtctctagccgcagcttccaaaccagcgccatttcaagggacatcgacacagcagccaagttcattggagctggggctgccacagttggggtggctggttctggggctgggattggaactgtgtttgggagcctcatcattggttatgccaggaacccttctctgaagcaacagctcttctcctacgccattctgggctttgccctctcggaggccatggggctcttttgtctgatggtagcctttctcatcctctttgccatgtgaaggagccgtctccacctcccatagttctcccgcgtctggttggccccgtgtgttccttttcctatacctccccaggcagcctggggaacgtggttggctcagggtttgacagagaaaagacaaataaatactgtattaataagaaaa

SEQ ID NO: 192060 - DNA, 469 bp, Homo Sapiens
tggggaagctgagcctctaaaaagacaagggctaaagctgggagactgaaaaaatgcagaccgccggggcattattcatttctccagctctgatccgctgttgtaccaggggtctaatcaggcctgtgtctgcctccttcttgaatagcccagtgaattcatctaaacagccttcctacagcaacttcccactccaggtggccagacgggagttccagaccagtgttgtctcccgggacattgacacagcagccaagtttattggtgctggggcagccacagttggtgtggctggttctggggctggcattggaaccgtgtttggcagcttgatcattggctatgtttttgtttttcgtctctcaagcagcagctcttctcctatgccattcttggctttgccctgtctgaggccatggggcttttctgtttgatggtcgccttcctcatcctcttcgccatgtgaggc

SEQ ID NO: 192061 - DNA, 1467 bp, Homo Sapiens; identical to SEQ ID NO: 180345

SEQ ID NO: 192062 - DNA, 2060 bp, Homo Sapiens; identical to SEQ ID NO: 184557
  misc_feature (264)..(289): n is a, c, g, or t

SEQ ID NO: 192063 - DNA, 1439 bp, Homo Sapiens; identical to SEQ ID NO: 184558
  misc_feature (425)..(433): n is a, c, g, or t
  misc_feature (944)..(969): n is a, c, g, or t

SEQ ID NO: 192064 - DNA, 1813 bp, Homo Sapiens; identical to SEQ ID NO: 184559
  misc_feature (983)..(992): n is a, c, g, or t
  misc_feature (1706)..(1714): n is a, c, g, or t

SEQ ID NO: 192065 - DNA, 1633 bp, Homo Sapiens; identical to SEQ ID NO: 184561

SEQ ID NO: 192066 - DNA, 1148 bp, Homo Sapiens; identical to SEQ ID NO: 184562

SEQ ID NO: 192067 - DNA, 853 bp, Homo Sapiens
atgcttttttataatgccaactttgtacaaaaaagttggagaaatcccactcatcgaccccgggtaaaatgttatggtaagcatgcacagtttgcagtctacagtttttttatgtagcacaaaataggtgtacctttataagtacattcaattttatgatttacatttatcatgtaatttttaaaaaaatccatctatctaggatatgttgatacaaagtctgcttttgctattctttttgcttaaatactcctatcattttctgaattacttggtatttagaactcctagcaccacggggaagaatagaggtatcatcaaacgtggcaaattttctttcaggaataataaagagcatgattccacagcttttctgggatgtttgagattcttttttagtactaagcaaaattctcatcacagaatgtagcccaggccaatttataactaaatctctatttgttcggatgatgcttctaaaacagcattgataggttaaagaagcttggtatttttaatttacttcaatgattagctcagttgcttaactggagttttaatcctgtgatatgtacattggattcatgactgtgcagcatttttagttatgtggtgtttggcagaatgacaataaggttttcccccattttggtttcaggaggacatgaatagtgtgtttattgtaactcctcatacacttttaaaaccaacatcttttttcataaatgttggtagtgtttgtccaggtaccttaactgtagcttgtgtaatgttgatgaatatctgtatcttacggcttccataatggctagttgatattcaaaaacctatttctgtgttttgaggggtgggg

SEQ ID NO: 192068 - DNA, 1267 bp, Homo Sapiens
catttatatatagaaatgcactcagaagtaacagacacacaaggttaaaactgattcttcccactaagttctggaaatttattctaacataatggtgcctttctgtacaaagaactgtaccatatcataaatttactgctagtaaactttaagccaccagaaatctttcagctgtgacaagcacttgattgtaatgacagatttcagagtctgaatactgaaaaatatatatatccaataaaaaatttttgaagggggaataaaagcacataaatggcagcagaggaattgatgttctaagcctgttttattacatgggacatcacactacccttaatttcactgaaggtatctgaaatgggtgagatgaaatcaataggattttctgctaccattgtaacagttctatatgtagttacaaagggtgttattcctagtgatgatgacacctttcatgggattcaacttaaaaattaaatccttgcactttcaaagtttgaaactcaattcaaaatgagtccgtcttaaaagcctggctcatatggtcccattaagggaggctaacaatggtaatctataatacccaaacttgaagaataaagactttatggataaaaaggaataaaccaaaatatttgggctgttgaagtataagggcctgttgtaggacaatccctcctacttcctaatcccccccatacaatggcttaagatagccaaaacgtttattgtagaacgtttattattcctacaagcttatgtctcacttcccctaagcctctgtacttacagtcaaggacaaatgctctctagcatcatatctcattttctgttgctgacagttcttgagacttggcttccttccagcatgatcctaagtcagcctgattggaactgcttggacttgaaggttaagggctattaagtccatatttatgactttaaaaagggtaaaaatgagtttccacagctcagtaaaataacgataacagggaacatcccttcctacctggggaaaaaaatctcttcacagtgcatagtttgaaatcaaagtgcaatatgggcaaaaagagaaggtggtgctctcgataccataaatttagtttttggttttctgccattaatatttgctaacaaattcaagctaaaaaatgaagtcattaatgtcaagaggtatgagggcaccttgggattaaaaaatatctttataaaataaggaagtaacatgtgaggctctcccctcctcccctcccccatcataaaccaa

SEQ ID NO: 192069 - DNA, 2112 bp, Homo Sapiens; identical to SEQ ID NO: 184566

SEQ ID NO: 192070 - DNA, 1764 bp, Homo Sapiens; identical to SEQ ID NO: 184567
  misc_feature (123)..(182): n is a, c, g, or t

SEQ ID NO: 192071 - DNA, 1220 bp, Homo Sapiens
  misc_feature (895)..(948): n is a, c, g, or t
ttggttcggttatgatcccctggggaggtagcagggacctctgcaactatgcatgatttctcaaacttcaagattcatgtctggatgtattatgctgtggatataagtttagtagggcggtcatttcctactctgagttactggttacctagccagtccatgggtgtgacttggtccttaagtcaggtcactatctgcctcccaccctgggggcaggactgaagtatagaagagcatcatggctgtgcaggaggctgtggtttgaaaactgagcccagagggcactttcagctgccctcaataatgtgaatggattagtgctaggagccaaggagcaggactggattatctcatctgactgtgtgcagaatcctgttgaatgtccctgttttctttggttgggcagtcagagctctgctatggtgaacatccagactgtcaccactttctgtctgccgctcgaaagggatagtcctttccactcggtcccctttggatcttcttgacaacaggagcagtccttttattgttagaagtcagagaaagacctccagaatctcctgactttagggaatggtataggggaagatgggaagtaagagtcacatatcaaaactaccctccactttattccctgagcgagggtttatgaagtataaaggggtgggagccccgaggtgagcgggaacggtgctgctttatttgaaatgttttcttacctcattctgtgccccagtagggggtccagcctcatctgtctggcttggccctgtgttcctcctgtcccctgctccactgcctatctggtgccccaggtgctgcttgccactccagctgtcacattgaacagtttcaattcagctcttaatgctcctgcttccgaagcctgcccaannnnnnnnnnnnnnnnnnnnnnnnnnnnnnnnnnnnnnnnnnnnnnnnnnnnnngtagaagactcagaggagaatctttcttatggctctctctgttgagattggaattggaagagaacttaattttttgtatttaaaatgcagtgtcatgcctataagcatttctcctatataggactgctttgctagtgtgccctcttgctgtgtcttacttcataaggagttgtatcttcccacctccatttcaatactgccggttaggacctaagtagaagagcagtaaagctgattgacacacaggggatggagttggtccttgtccattc

SEQ ID NO: 192072 - DNA, 921 bp, Homo Sapiens
ttgggaggccgtgagcgcaaagcctcaggccccggctccctcctgagctgcgccgtgccaggccgcccgccgggatgcagtgggccgtgggccggcggtgggcgtgggccgcgctgctcctggctgtcgcagcggtgctgacccaggtcgtctggctctggctgggtacgcagagcttcgtcttccagcgcgaagagatagcgcagttggcgcggcagtacgctgggctggaccacgagctggccttctctcgtctgatcgtggagctgcggcggctgcacccaggccacgtgctgcccgacgaggagctgcagtgggtgttcgtgaatgcgggtggctggatgggcgccatgtgccttctgcacgcctcgctgtccgagtatgtgctgctcttcggcaccgccttgggctcccgcggccactcggggcgctactgggctgagatctcggataccatcatctctggcaccttccaccagtggagagagggcaccaccaaaagtgaggtcttctacccaggggagacggtagtacacgggcctggtgaggcaacagctgtggagtgggggccaaacacatggatggtggagtacggccggggcgtcatcccatccaccctggccttcgcgctggccgacactgtcttcagcacccaggacttcctcaccctcttctatactcttcgctcctatgctcgggggcctccggcttgagctcaccacctacctctttggccaggacccttgaccagccaggcctgaaggaagacctgcggatggacaggagcgggcaggcccgcacatatccacttgctggagcccatgtttacagacaggacatacaccatgcagatcctgagttcctgctgtatgagcagggatatccatgcttatgttatccaaacacagagacccatgggaa

SEQ ID NO: 192073 - DNA, 2242 bp, Homo Sapiens; identical to SEQ ID NO: 184569

SEQ ID NO: 192074 - DNA, 457 bp, Homo Sapiens
acaaaaaagttgggctcccgggtgtggtggtcgcaccagctctctgctctcccagcgcagcgccgccgcccggcccctccagcttcccggaccatggccaacctggagcgcaccttcatcgccatcaagccggacggcgtgcagcgcggcctggtgggcgagatcatcaagcgcttcgagcagaagggattccgcctcgtggccatgaagttcctccgggcctctgaagaacacctgaagcagcactacattgacctgaaagaccgaccattcttccctgggctggtgaagtacatgaactcacggccggttgtggccatggtctgggaggggctgaacgtggtgaagacaggccgagtgatgcttggggagaccaatccagcagattcaaagccaggcaccattcgtggggacttctgcattcaggttggcaggaacatcattcatggcagtgatt

SEQ ID NO: 192075 - DNA, 1465 bp, Homo Sapiens; identical to SEQ ID NO: 180348

SEQ ID NO: 192076 - DNA, 3099 bp, Homo Sapiens; identical to SEQ ID NO: 184573

SEQ ID NO: 192077 - DNA, 967 bp, Homo Sapiens; identical to SEQ ID NO: 184578

SEQ ID NO: 192078 - DNA, 909 bp, Homo Sapiens
ttttacatatgattgctaattaggaaatttttcatttcagtcgtcaagaacttttaagggcagaggccaggtgagactctgtctcaaaaataaaaggaaaggcagaaggtggaccgcagtgtgataagtagtatttcacaaacagtatttttctgtggcttgtcttacaggtacaccaggggttggaaaaaccacactaggcaaagaacttgcgtcaaaatcaggactgaaatacattaatgtgggtgatttagctcgagaagagcaattgtatgatggctatgatgaagagtatgactgtcccattttagatgaagacagagtagttgatgagttagataaccaaatgagagaaggtggagttattgttgattaccatggttgtgatttcttccctgaacgctggtttcatatagtttttgtgctgagaacagataccaatgtattgtacgaaagacttgaaacaaggggttataatgagaagaaactaacagacaatattcagtgtgagatttttcaagttctttatgaagaagccacagcatcctacaaggaagaaatcgtgcatcagctgcccagtaataaaccagaagagctagaaaataatgtagatcagatcttgaaatggattgagcagtggatcaaagatcataactcttgacttataaggctagctacttaataatcactcttgttgatatctctgccgacatcatagaaattgttcaagtgtcagtaacactttattaaaatcatgttgcagaaccagcaatggatagtatataggtttatgcctgtgtttctttttctccatgagaaagctaaacatgaaatataatgaatatagtattattaacgattgagacaaaactgtgattttaatacttaaattgctaaagaataaataaa

SEQ ID NO: 192079 - DNA, 1082 bp, Homo Sapiens
  misc_feature (836)..(874): n is a, c, g, or t
ttggctaggcaaagaacttgcgtcaaaatcaggactgaaatacattaatgtgggtgatttagctcgagaagtctgatcatcggatatcatggagtctggcaagacggcttctcccaagagcatgccgaaagatgcacagatgatggcacaaatcctgaaggatatggggattacagaatatgagccaagagttataaatcagatgttggagtttgccttccgatatgtgaccacaattctagatgatgcaaaaatttattcaagccatgctaagaaagctactgttgatgcagatgatgtgcgattggcaatccagtgccgcgctgatcagtcttttacctctcctcccccaagagattttttattagatattgcaaggcaaagaaatcaaacccctttgccattgatcaagccatattcaggtcctaggttgccacctgatagatactgcttaacagctccaaactataggctgaaatctttacagaaaaaggcatcaacttctgcgggaagaataacagtcccgcggttaagtgttggttcagttactagcagaccaagtactcccacactaggcacaccaaccccacagaccatgtctgtttcaactaaagtagggactcccatgtccctcacaggtcaaaggtttacagtacagatgcctacttctcagtctccagctgtaaaagcttcaattcctgcaacctcagcagttcagaatgttctgattaatccatcattaatcgggtccaaaaacattcttattaccactaatatgatgtcatcacaaaatactgccaatgaatcatcaaatgcattgaaaagaaaacgtgaannnnnnnnnnnnnnnnnnnnnnnnnnnnnnnnnnnnnnnaatctgtaatctagccttgctgaatgtaacatgtatacttggtcttgaattcattgtactgatattaaacatgcatgctggatgttttcaagttgtgttttagaaaactaataataatgagtaaacacagttaccatacttttcaattgaaatgaaggtttttcatcagccttaaaagtgtaagaaaaataaagttgtcattcattcg

SEQ ID NO: 192080 - DNA, 1294 bp, Homo Sapiens; identical to SEQ ID NO: 184579
  misc_feature (1147)..(1155): n is a, c, g, or t

SEQ ID NO: 192081 - DNA, 1621 bp, Homo Sapiens; identical to SEQ ID NO: 184583
  misc_feature (101)..(163): n is a, c, g, or t
  misc_feature (274)..(313): n is a, c, g, or t
  misc_feature (538)..(553): n is a, c, g, or t
  misc_feature (684)..(703): n is a, c, g, or t
  misc_feature (839)..(938): n is a, c, g, or t
  misc_feature (1259)..(1294): n is a, c, g, or t

SEQ ID NO: 192082 - DNA, 1305 bp, Homo Sapiens; identical to SEQ ID NO: 184584
  misc_feature (234)..(249): n is a, c, g, or t
  misc_feature (384)..(400): n is a, c, g, or t
  misc_feature (536)..(635): n is a, c, g, or t
  misc_feature (956)..(991): n is a, c, g, or t

SEQ ID NO: 192083 - DNA, 1828 bp, Homo Sapiens; identical to SEQ ID NO: 184587
  misc_feature (1529)..(1552): n is a, c, g, or t

SEQ ID NO: 192084 - DNA, 1532 bp, Homo Sapiens; identical to SEQ ID NO: 180350
  misc_feature (161)..(173): n is a, c, g, or t
  misc_feature (490)..(557): n is a, c, g, or t
  misc_feature (999)..(1009): n is a, c, g, or t

SEQ ID NO: 192085 - DNA, 2787 bp, Homo Sapiens; identical to SEQ ID NO: 184590

SEQ ID NO: 192086 - DNA, 1337 bp, Homo Sapiens; identical to SEQ ID NO: 184591

SEQ ID NO: 192087 - DNA, 3556 bp, Homo Sapiens; identical to SEQ ID NO: 184592
  misc_feature (3378)..(3388): n is a, c, g, or t

SEQ ID NO: 192088 - DNA, 1208 bp, Homo Sapiens
  misc_feature (177)..(187): n is a, c, g, or t
  misc_feature (796)..(808): n is a, c, g, or t
agcaatgcttttactattaaaaccaactttgtacaaaaaagttggtgattttgcattactgtttcacaatgaagctttctttaaggctttgatttttatgattatgaaagaaataaggcacaaccacagtttttctttcttaaatttcatcactgttgatgtggttcttttgtgttnnnnnnnnnnngtgcaactatcaaaactaaaaaattatagagtaatattgccgttctgctgattttaaatatacaatacatcatacatactttacaagcaagttaaatggagataaagttgaaatcatagaagatgcaaatgacctttcaaaatcaacacaatgtgttctgaaactttcgtgactaataccatgcatctgtgatcaatgaactatgtggttttgaatcggatgtagaccattagtactactacttgagctaaacttctgcatggttcataatttttaaagtgtgtagttaatatgcatgttatcgtcctttcttccattcttaacagtatgtgcccatttgcaaaacaaaaatgctaataatcagtaatagtcctataaaagatgttaactctgtttagtcattgactgatcttgctctaaccttaaaattttgtgattattgacctctgttgcatttattctaaagccccccaaaaattatctagccgtttcgaatatcaacattaccctggtgtattcactgctgtatgcattattgttctttgttgctgttttatgccttcatattagcaaatatgaaattctgtgaaaaaaaaccctttgatcttnnnnnnnnnnnnnccaccccccccttctgtagcaggaaacaaattgcttgttcttgagaactttcccatcaagaatttagtaaaagcaggtatacttctatcattttgatgtttttgttaatgtttccaaacaatgtactttgaaatcagaatcacttcttatcgttttcatatacttctgatgctcttcatcacattagtgatcagaaatgaggtgtaattccccaacccctgcccgcaagagctaagtaggatcttactgtaagttgaagggagttttgccctaactcatggattgtgcaagaatgaactgctgttgggtttgattgactgtcgatggattgtggtgtggtgtatctgaaggctattgaatgcaacttacaatgcttaataaaaatctttattcttttagt

SEQ ID NO: 192089 - DNA, 1098 bp, Homo Sapiens
  misc_feature (70)..(80): n is a, c, g, or t
  misc_feature (689)..(701): n is a, c, g, or t
tgtacaaaaaagttggcacagtttttcccttctaaaatttcatcactgttgatgtggttcttttgtgttnnnnnnnnnnngtgcaactatcaaaactaaaaaattatagagtaatattgccgttctgctgattttaaatatacaatacatcatacatactttacaagcaagttaaatggagataaagttgaaatcatagaagatgcaaatgacctttcaaaatcaacacaatgtgttctgaaactttcgtgactaataccatgcatctgtgatcaatgaactatgtggttttgaatcggatgtagaccattagtactactacttgagctaaacttctgcatggttcataatttttaaagtgtggagttaatatgcatgttatcgtcctttcttccattcttaacagtatgtgcccatttgcaaaacaaaaatgctaataatcagtaatagtcctataaaagatgttaactctgtttagtcattgactgatcttgctctaaccttaaaattttgtgattattgacctctgttgcatttattctaaagccccccaaaaattatctagccgtttcgaatatcaacattaccctggtgtattcactgctgtatgcattattgttctttgttgctgttttatgccttcatattagcaaatatgaaattctgtgaaaaaaaaccctttgatcttnnnnnnnnnnnnnccaccccccccttctgtagcaggaaacaaattgcttgttcttgagaactttcccatcaagaatttagtagaagcaggtatacttctatcattttgatgtttttgttaatgtttccaaacaatgtactttgaaatcagaatcacttcttatcgttttcatatacttctgatgctcttcatcacattagtgatcagaaatgaggtgtaattccccaacccctgcccgcaagagctaagtaggatcttactgtaagttgaagggagttttgccctaactcatggattgtgcaagaatgaactgctgttgggtttgattgactgtcgatggattgtggtgtggtgtatctgaaggctattgaatgcaacttacaatgcttaataaaaatctttattctttt

SEQ ID NO: 192090 - DNA, 1018 bp, Homo Sapiens
aaattgatgagcaatgcttgctataataggcaactttgtacaaaaaagttggatcattgtttcccctctctgtggtggatttacatggccaagctgtgtgaagaaataggaaagaagaagttaccattaaccaaggatatgagagaacaaggagttaaaagcaatccatgtgactcaagcctttcacatactgacagatggtatctgccagtctcttcaaccctcttctcactttttaaaatcttgttccatgcctccaggtttatctttgtcttatctaccagtttattcctgtgaacttcagattgaaccattcattgcagcagtagccttaaaaaggcttttgtttatttctttggtttgttaactagtgtcatctatttagagaaacatttttgtttttaattgctcaaagctgtcgccgctagtcttatgagctatctactaaaactatggagaaactttgtatgtgcacacaaaagtattcaagagacagtattgctaacatctcatcttaatgtcttttgttattgagaagttttaggtgcttcaaaacaatataaatggataatagttgttatttggggaattgtaatgatgttggtgctgcttccttctaagagctcagacaagtaaagtatgaaacattcttatttcagttagatggggaacattttgctagcccattagaagcacacagaattatccttgtcctcctaatattgactttcaggaataaagttcagtgtgctgatcattcacaatacagtggatagcttgatatcttctgttttcccattgcagttgatttgagaagatgaagtttaaatattgttgaaagttgcagttttttaaatgtgttcctttttcttctgtgaatatttagggcaatcgtgtcgctaatagaatatgtagtagagggggtggggaggtaaattcctctgacttgccaaagaaaaagagggaaccacagtggaatatgctagcatttagctgtgcaaaggaagtagtgtgggaa

SEQ ID NO: 192091 - DNA, 3181 bp, Homo Sapiens; identical to SEQ ID NO: 184594

SEQ ID NO: 192092 - DNA, 1923 bp, Homo Sapiens; identical to SEQ ID NO: 184595

SEQ ID NO: 192093 - DNA, 919 bp, Homo Sapiens
  misc_feature (168)..(213): n is a, c, g, or t
ttggtgcagccacgcgcgcgccttccctgtcttgtgtgcttcgcgaggtagagcgggcgcgcggcagcggcggggattactttgctgctagtttcggttcgcggcagcggcgggtgtagtctcggcggcagcggcggagacactagcactatgtcggaggagcagttnnnnnnnnnnnnnnnnnnnnnnnnnnnnnnnnnnnnnnnnnnnnnntcggcgggcgagcaggagggagccatggtggcggcgacacagggggcagcggcggcggcgggaagcggagccgggaccgggggcggaaccgcgtctggaggcaccgaagggggcagcgccgagtcggagggggcgaagattgacgccagtaagaacgaggaggatgaaggccattcaaactcctccccacgacactctgaagcagcgacggcacagcgggaagaatggaaaatgtttataggaggccttagctgggacactacaaagaaagatctgaaggactacttttccaaatttggtgaagttgtagactgcactctgaagttagatcctatcacagggcgatcaaggggttttggctttgtgctatttaaagaatcggagagtgtagataaggtcatggatcaaaaagaacataaattgaatgggaaggtgattgatcctaaaagggccaaagccatgaaaacaaaagagccggttaaaaaaatttttgttggtggcctttctccagatacacctgaagagaaaataagggagtactttggtggttttggtgaggtggaatccatagagctccccatggacaacaagaccaataagaggcgtgggttctgctttattacctttaaggaagaagaacccagtgaggaagataatggaaaagaaataccacaatgttggtcttagtaaatgtgaaataaaagta

SEQ ID NO: 192094 - DNA, 449 bp, Homo Sapiens
cctttgtacaaaaaagttgggattatagcccccagaagagtggttatgggaaggtatccaggcgaggtggtcatcaaaatagctacaaaccatactaaattattccatttgcaacttatccccaacaggtggtgaagcagtattttccaatttgaagattcatttgaaggtggctcctgccacctgctaatagcagttcaaactaaattttttgtatcaagtccctgaatggaagtatgacgttgggtccctctgaagtttaattctgagttctcattaaaagaaatttgctttcattgttttatttcttaattgctatgcttcagaatcaatttgtgttttatgccctttcccccagtattgtagagcaagtcttgtgttaaaagcccagtgtgacagtgtcatgatgtagtagtgtcttactggttttttaataaatccttttgtat

SEQ ID NO: 192095 - DNA, 986 bp, Homo Sapiens
gccaactttgtacaaaaaagttggcaacgctccgccgccgctgctgccgcgacccggactgcgcgccagcacccccctgccgacagctccgtcactatggaggatatgaacgagtacagcaatatagaggaattcgcagagggatccaagatcaacgcgagcaagaatcagcaggatgacggtaaaatgtttattggaggcttgagctgggatacaagcaaaaaagatctgacagagtacttgtctcgatttggggaagttgtagactgcacaattaaaacagatccagtcactgggagatcaagaggatttggatttgtgcttttcaaagatgctgctagtgttgataaggttttggaactgaaagaacacaaactggatggcaaattgatagatcccaaaagggccaaagctttaaaagggaaagaacctcccaaaaaggtttttgtgggtggattgagcccggatacttctgaagaacaaattaaagaatattttggagcctttggagagattgaaaatattgaacttcccatggatacaaaaacaaatgaaagaagaggattttgttttatcacatatactgatgaagagccagtaaaaaaattgttagaaagcagataccatcaaattggttctgggaagtgtgaaatcaaagttgcacaacccaaagaggtatataggcagcaacagcaacaacaaaaaggtggaagaggtgctgcagctggtggacgaggtggtacgaggggtcgtggccgagtcagggccaaaactggaaccaaggatttaataactattatgatcaagatatggaaattacaatagtgcctatggtggtgatcaaaactatagtggctatggcggatatgattatactgggtataactatgggaactatggatatggacagggatatgcagactacagtggccaacagagcacttatggcaaggcatctcgagggggtggcaatcaccaaaacaatt

SEQ ID NO: 192096 - DNA, 1601 bp, Homo Sapiens; identical to SEQ ID NO: 180352
  misc_feature (691)..(700): n is a, c, g, or t

SEQ ID NO: 192097 - DNA, 1271 bp, Homo Sapiens
  misc_feature (101)..(152): n is a, c, g, or t
ttgtacaaaaaagttggctagtttcggttcgcggcagcggcgggtgtagtctcggcggcagcggcggagacactagcactatgtcggaggagcagttcggnnnnnnnnnnnnnnnnnnnnnnnnnnnnnnnnnnnnnnnnnnnnnnnnnnnngagcaggagggagccatggtggcggcgacacagggggcagcggcggcggcgggaagcggagccgggaccgggggcggaaccgcgtctggaggcaccgaagggggcagcgccgagtcggagggggcgaagattgacgccagtaagaacgaggaggatgaagggaaaatgtttataggaggccttagctgggacactacaaagaaagatctgaaggactacttttccaaatttggtgaagttgtagactgcactctgaagttagatcctatcacagggcgatcaaggggttttggctttgtgctatttaaagaatcggagagtgtagataaggtcatggatcaaaaagaacataaattgaatgggaaggtgattgatcctaaaagggccaaagccatgaaaacaaaagagccggttaaaaaaatttttgttggtggcctttctccagatacacctgaagagaaaataagggagtactttggtggttttggtgaggtggaatccatagagctccccatggacaacaagaccaataagaggcgtgggttctgctttattacctttaaggaagaagaaccagtgaagaagataatggaaaagaaataccacaatgttggtcttagtaaatgtgaaataaaagtagccatgtcgaaggaacaatatcagcaacagcaacagtggggatctagaggaggatttgcaggaagagctcgtggaagaggtggtgaccagcagagtggttatgggaaggtatccaggcgaggtggtcatcaaaatagctacaaaccatactaaattattccatttgcaacttatccccaacaggtggtgaagcagtattttccaatttgaagattcatttgaaggtggctcctgccacctgctaatagcagttcaaactaaattttttgtatcaagtccctgaatggaagtatgacgttgggtccctctgaagtttaattctgagttctcattaaaagaaatttgctttcattgttttatttcttaattgctatgcttcagaatcaatttgtgttttatgccctttcccccagtattgtagagcaagtcttgtgttaaaagcccagtgtgacagtgtcatgatgtaatagtgtcttactg

SEQ ID NO: 192098 - DNA, 1078 bp, Homo Sapiens
ttggcacatttaatgttatacagtatttacatatagtggaacatagggataactcagttttatgtaaatttttgttaagtgttgtagcctgcccagagtgacttctattttttcttctttgtctccaggtggtgaagcagtattttccaatttgaagattcatttgaaggtggctcctgccacctgctaatagcagttcaaactaaattttttgtatcaagtccctgaatggaagtatgacgttgggtccctctgaagtttaattctgagttctcattaaaagaaatttgctttcattgttttatttcttaattgctatgcttcagaatcaatttgtgttttatgccctttcccccagtattgtagagcaagtcttgtgttaaaagcccagtgtgacagtgtcatgatgtagtagtgtcttactggttttttaataaatccttttgtataaaaatgtattggctcttttatcatcagaataggaaaaattgtcatggattcaagttattaaaagcataagtttggaagacaggcttgccgaaattgaggacatgattaaaattgcagtgaagtttgaaatgtttttagcaaaatctaatttttgccataatgtgtcctccctgtccaaattgggaatgacttaatgtcaatttgtttgttggttgttttaataatacttccttatgtagccattaagatttatatgaatattttcccaaatgcccagtttttgcttaatatgtattgtgctttttagaacaaatctggataaatgtgcaaaagtacccctttgcacagatagttaatgttttatgcttccattaaataaaaaggacttaaaatctgttaattataatagaaatgcggctagttcagagagatttttagagctgtggtggacttcatagatgaattcaagtgttgagggaggattaaagaaatatataccgtgtttatgtgtgtgtgcttatttgtttgaatgattttattttccatttctcaaaggtttatttttttggttagggccttaaaatttcacgactgtgattattagtatgtgtgcctaaggaacttttga

SEQ ID NO: 192099 - DNA, 1538 bp, Homo Sapiens; identical to SEQ ID NO: 184596
  misc_feature (152)..(195): n is a, c, g, or t

SEQ ID NO: 192100 - DNA, 958 bp, Homo Sapiens
  misc_feature (748)..(761): n is a, c, g, or t
ttgtacaaaaaagttggcaaggggccttcctttaggatgccttaggccgcttgcgttgctctcagaatcgctgccgccatggctagtcagtctcaggggattcagcagctgctgcaggccgagaagcgggcagccgagaaggtgtccgaggcccgcaaaagaaagaaccggaggctgaagcaggccaaagaagaagctcaggctgaaattgaacagtaccgcctgcagagggagaaagaattcaaggccaaggaagctgcggcattgggatcccgtggcagttgcagcactgaagtggagaaggagacccaggagaagatgaccatcctccagacatacttccggcagaacagggatgaagtcttggacaacctcttggcttttgtctgtgacattcggccagaaatccatgaaaactaccgcataaatggatagaagagagaagcacctgtgctgtggagtggcattttagatgccctcacgaatatgaagcttagcacagctctagttacattcttatgatatggcattaaattatttccatatattatataataggtccttccactttttggagagtagcaaatctagcttttttgtacagacttagaaattatctaaagatttcatctttttacctcatatttcttaggaatttaatggttatatgttgtctttttttcctatgtcttttggctcaagcaacatgtatatcagtgttgactttttctttcttagatctagtttnnnnnnnnnnnnnnccacataacaattctttgaagaaaggaagggattaaataatttttttccctaacactttcttgaaggtcaggggctttatctatgaaaaagtagtaaatagttctttgtaacctgtgtgaaggcagcagccagccttaaagtagtccattcttgctaatgattagaacagtgaatactagtggaattgtttggctgc

SEQ ID NO: 192101 - DNA, 988 bp, Homo Sapiens
  misc_feature (671)..(685): n is a, c, g, or t
actttgtacaaaaaagttggggattcagcacctgctgcaggccgagaagcgggcagccgagaaggtgtccgaggcccgcaaaagaaagaaccggaggctgaagcaggccaaagaagaagctcaggctgaaattgaacagtaccgcctgcagagggagaaagaattcaaggccaaggaagctgcggcattgggatcccgtggcagttgcagcactgaagtggagaaggagacccaggagaagatgaccatcctccagacatacttccggcagaacagggatgaagtcttggacaacctcttggcttttgtctgtgacattcggccagaaatccatgaaaactaccgcataaatggatagaagagagaagcacctgtgctgtggagtggcattttagatgccctcacgaatatgaagcttagcacagctctagttacattcttatgatatggcattaaattatttccatatattatataataggtccttccactttttggagagtagcaaatctagcttttttgtacagacttagaaattatctaaagatttcatctttttacctcatatttcttaggaatttaatggttatatgttgtctttttttcctatgtcttttggctcaagcaacatgtatatcagtgttgactttttctttcttagatctagtttnnnnnnnnnnnnnnnccacataacaattctttgaagaaaggaagggattaaataatttttttccctaacactttcttgaaggtcaggggctttatctatgaaaaagtagtaaatagttctttgtaacctgtgtgaagcagcagccagccttaaagtagtccattcttgctaatggttagaacagtgaatactagtggaattgtttgggctgcttttagtttctcttaatcaaaattactagatgatagaattcaagaacttgttacatgtattacttggtgtatcgataatcatttaaaagtaaagactctgtcatgc

SEQ ID NO: 192102 - DNA, 921 bp, Homo Sapiens
  misc_feature (706)..(719): n is a, c, g, or t
actttgtacaaaaaagttggcagaatcgctgccgccatggctagtcagtctcaggggattcagcagctgctgcaggccgagaagcgggcagccgagaaggtgtccgaggcccgcaaaagaaagaaccggaggctgaagcaggccaaagaagaagctcaggctgaaattgaacagtaccgcctgcagagggagaaagaattcaaggccaaggaagctgcggcattgggatcccgtggcagttgcagcactgaagtggagaaggagacccaggagaagatgaccatcctccagacatacttccggcagaacagggatgaagtcttggacaacctcttggcttttgtctgtgacattcggccagaaatccatgaaaactaccgcataaatggatagaagagagaagcacctgtgctgtggagtggcattttagatgccctcacgaatatgaagcttagcacagctctagttacattcttatgatatggcattaaattatttccatatattatataataggtccttccactttttggagagtagcaaatctagcttttttgtacagacttagaaattatctaaagatttcatctttttacctcatatttcttaggaatttaatggttatatgttgtctttttttcctatgtcttttggctcaagcaacatgtatatcagtgttgactttttctttcttagatctagtttnnnnnnnnnnnnnnccacataacaattctttgaagaaaggaagggattaaataatttttttccctaacactttcttgaaggtcaggggctttatctatgaaaaagtagtaaatagttctttgtaacctgtgtgaagcagcagccagccttaaagtagtccattcttgctaatgggtagaacagtgaatactagtggaattgtttgggctgctttta

SEQ ID NO: 192103 - DNA, 2104 bp, Homo Sapiens; identical to SEQ ID NO: 184601
  misc_feature (1880)..(1932): n is a, c, g, or t

SEQ ID NO: 192104 - DNA, 1203 bp, Homo Sapiens
  misc_feature (183)..(241): n is a, c, g, or t
ttgggtctcaaccacctggggaagggtgaggccatcgaggcaatcctggctgcactggaggttgtgtcagagccattccgcagttttgccaacacactggtggatgtgtgtgcatatgcaggctctgggaatgtgctgaaggtgcagcagctgctccacatttgtagcgaacactttgactcnnnnnnnnnnnnnnnnnnnnnnnnnnnnnnnnnnnnnnnnnnnnnnnnnnnnnnnnnnncccctgctgacatgggagcacatcagggagtggctgttctggggattgcccttattgctatgggggaggagattggtgcagagatggcattacgaacctttggccacttgctgagatatggggagcctacactccggagggctgtacctttagcactggccctcatctctgtttcaaatccacgactcaacatcctggataccctaagcaaattctctcatgatgctgatccagaagtttcctataactccatttttgccatgggcatggtgggcagtggtaccaataatgcccgtctggctgcaatgctgcgccagttagctcaatatcatgccaaggacccaaacaacctcttcatggtgcgcttggcacagggcctgacacatttagggaagggcacccttaccctctgcccctaccacagcgaccggcagcttatgagccaggtggccgtggctggactgctcactgtgcttgtctctttcctggatgttcgaaacattattctaggcaaatcacactatgtattgtatgggctggtggctgccatgcagccccgaatgctggttacgtttgatgaggagctgcggccattgccagtgtctgtccgtgtgggccaggcagtggatgtggtgggccaggctggcaagccgaagactatcacagggttccagacgcatacaaccccagtgttgttggcccacggggaacgggcagaattggccactgaggagtttcttcctgttacccccattctggaaggttttgttatccttcggaagaaccccaattatgatctctaagtgaccaccaggggctctgaactgtagctgatgttatcagcaggccatgcatcctgctgccaagggtggacacggctgcagacttctgggggaattgtcgcctcctgctcttttgttactgagtgagataaagatggtcaataaaagacttttatcccc

SEQ ID NO: 192105 - DNA, 1820 bp, Homo Sapiens; identical to SEQ ID NO: 184603
  misc_feature (800)..(830): n is a, c, g, or t
  misc_feature (1306)..(1341): n is a, c, g, or t

SEQ ID NO: 192106 - DNA, 1186 bp, Homo Sapiens; identical to SEQ ID NO: 180355

SEQ ID NO: 192107 - DNA, 1471 bp, Homo Sapiens; identical to SEQ ID NO: 184606

SEQ ID NO: 192108 - DNA, 2298 bp, Homo Sapiens; identical to SEQ ID NO: 184607

SEQ ID NO: 192109 - DNA, 534 bp, Homo Sapiens
ctttgtacaaaaaagttggcttctagtgctgctagccctaccctgcagggaccctcagactcgccaacctcagattcagtttctcagtccagcacaggaactctgagttccacctcctttcctcagaattctaggtcgtcattgccatcagacttacggactatcagtctgcccagtgctgggcagtcagctgtctaccaggcctccagggtatctgcggtttccaattcacagcactacccacaccgtgggagtgggggtgtgcaccagtaccgactccagccactgcaagggtcaggagtcaagactcagacgggactttcctagggcttctggatttgggcaaacagaactgaatgagcccatagcctgcttccttccagctgcctctggaacctaggccgagcatattgctgaggaacggggggtacaaggtgccaaaggattgggtctggtggacaagaaacaagacttgtggtcacaattggcctctggccttggaaaaaagctgtaaatcttgtctgaagcagagac

SEQ ID NO: 192110 - DNA, 1197 bp, Homo Sapiens; identical to SEQ ID NO: 184610
  misc_feature (147)..(198): n is a, c, g, or t

SEQ ID NO: 192111 - DNA, 2235 bp, Homo Sapiens; identical to SEQ ID NO: 184611
  misc_feature (257)..(296): n is a, c, g, or t

SEQ ID NO: 192112 - DNA, 1007 bp, Homo Sapiens; identical to SEQ ID NO: 184612

SEQ ID NO: 192113 - DNA, 1205 bp, Homo Sapiens; identical to SEQ ID NO: 184613
  misc_feature (64)..(81): n is a, c, g, or t

SEQ ID NO: 192114 - DNA, 751 bp, Homo Sapiens
ctttgtacaaaaaagttggcagaattcaacattaaagattaatgtttatttaaacgaacacattcctgcattcaggatgtgaggccatttaataaaaagggcacaaagcctgtcagagttttcaacggtgcttatagctgccagctggattccaaacaggtaccccattgtctctgagctaatgtttatatttttccattcaggcaccgaaatagttaatatttaaaataagtcttcaaaagaaaacataagagattattgagttcttgggactggatcctttatttcataagttcagatcatcttaaatgaaaatgccatgattatctgcagttaagtagatgacagctattctacatcagacttgatttttgtcagctaattacataattggtaagctataattgaaaccttatggcttaaaattccttaactcctttttgattcatgtttgtagtcatgttgtcaacagaggcaaagttaagcttgatgatggttaaaatcggtttgatagcaccatgggacatttttctaacaaaaataaatgcatgaagagacatagccttttagttttgctaattgtgaaatggaaatgctttacaggaagtaaatgcaaattacttttaagtgtgctttaaagaaaaatattttccccacaagagaaatttaaataaagaattttatttgtttatggtttgttttagtatgtttttgtgtccatgatgagattaaattttttatctgcttcctg

SEQ ID NO: 192115 - DNA, 1200 bp, Homo Sapiens; identical to SEQ ID NO: 184615
  misc_feature (603)..(603): n is a, c, g, or t
  misc_feature (805)..(840): n is a, c, g, or t

SEQ ID NO: 192116 - DNA, 1057 bp, Homo Sapiens
  misc_feature (265)..(285): n is a, c, g, or t
ttcaaattttttctagtacaaaaaaattaaatttgctttagttataaaagagctctgtcaatatacacaaactatatacttcagacattcacaaaaatgtgagcagaaggcttatcaaaagacatttaatacaattagttttcaacaaccccttggtggtccacatctacaaagatatccagcccaacccaaccccccttccaaatcccacccccacagaaaagcacatacttaccagaatttttagcaagtatggtttgggaannnnnnnnnnnnnnnnnnnnnaaaaaaaggcccccagggcaagttatttacagtttaattgccactgtcaactgatctggaccttgatcgggaccgggacctctggcgatccacagatgctggagacttagatctacttgaagaaccacgtttctggctcttctcaggcacgggagacctactaacagaacgggacttgctccggctccggctcctgctcctgcttcttgaccggctgtaagatttgcgactacgggaacgggatcggctacgagacctagaggaacttctggtccgggatcgagacctgcttcttgacctactgtgccttttgctgccttcaattaattttatttttctcccatttatttcctttccagaaagtttttcaatagcattctttaagtcaccataagaggcaaactcaaccaccccttcatttaatttaggtcggtgtgcatccgcaaacgttacttccccagcttgtctcatgaaatctttgagatcctgccagctgactcttgaggataaattctcaactataagacgattttctgttcttacaggtggagcatttcgtctatcatttcgaggtctgcgactactaaaacggtcagagtatcgtcctctacctcttccacctcgtgaccgagccctagcatgttcaatagtaaccctttcactacagagttcttttccatcaagctcatacacagcatcatctgcatcccttggatcctcaaattccacaaaaccaaagcctcttttcagatccaacttttttgtacaaagt

SEQ ID NO: 192117 - DNA, 1086 bp, Homo Sapiens
  misc_feature (285)..(305): n is a, c, g, or t
taacccaagaactaaaatgttcaaaattttttgtagtacaaaaatattaaatttgctttagttataaaagagctctgtcaatatacacaaactatatacttcagacattcacaaaaatgtgagcagaaggcttatcaaaagacatttaatacaattagttttcaacaaccccttggtggtccacatctacaaagatatccagcccaacccaaccccccttccaaatcccacccccacagaaaagcacatacttaccagaatttttagcaagtatggtttgggaannnnnnnnnnnnnnnnnnnnnaaaaaaaggcccccagggcaagttatttacagtttaattgccactgtcaactgatctggaccttgatcgggaccgggacctctggcgatccacagatgctggagacttagatctacttgaagaaccacgtttctggctcttctcaggcacgggagacctactaacagaacgggacttgctccggctccggctcctgctcctgcttcttgaccggctgtaagatttgcgactacgggaacgggatcggctacgagacctagaggaacttctggtccgggatcgagacctgcttcttgacctactgtgccttttgctgccttcaattaattttatttttctcccatttatttcctttccagaaagtttttcaatagcattctttaagtcaccataagaggcaaactcaaccaccccttcatttaatttaggtcggtgtgcatccgcaaacgttacttccccagcttgtctcatgaaatctttgagatcctgccagctgactcttgaggataaattctcaactataagacgattttctgttcttacaggtggagcatttcgtctatcatttcgaggtctgcgactactaaaacggtcagagtatcgtcctctacctcttccacctcgtgaccgagccctagcatgttcaatagtaaccctttcactacagagttcttttccatcaagctcatacacagcatcatctgcatcccttggatcctcaaattccacaaaaccaaagcctcttttcagatcaatatctcccaacttttttgtacaaagt

SEQ ID NO: 192118 - DNA, 1890 bp, Homo Sapiens; identical to SEQ ID NO: 184616
  misc_feature (75)..(110): n is a, c, g, or t
  misc_feature (586)..(656): n is a, c, g, or t
  misc_feature (1407)..(1427): n is a, c, g, or t

SEQ ID NO: 192119 - DNA, 1034 bp, Homo Sapiens
  misc_feature (158)..(193): n is a, c, g, or t
gagcaatgctttttcataaaaaaacaactttgtacaaaaaagttggcttttttaatgacatatggggcacaaaataactggtgtcttgtaaatgttctgtttttttaaataaaacttctctactttagtctttactttaaaaatatgtactgtttccnnnnnnnnnnnnnnnnnnnnnnnnnnnnnnnnnnnngtactgagctcagcatagactaatactaccttaatgttaaaatctgaatttcttttagcattttgcttaaaagcaatatgctatttgcttattccgtgccctgacatagataatttttgaattctgatagaatacaagtgtggtaaatgccatgtttgtactttatctaacatcttctctttcagtagtcttgttttttttatatcatgtgattgtttgtgtgtcccctttcctcttctttgcttaacacaattatcttgtgttaaggatctcaaagatttcatgagacaagctggggaagtaacgtttgcggatgcacaccgacctaaattaaatgaaggggtggttgagtttgcctcttatggtgacttaaagaatgctattgaaaaactttctggaaaggaaataaatgggagaaaaataaaattaattgaaggcagcaaaaggcacagtaggtcaagaagcaggtctcgatcccggaccagaagttcctctaggtctcgtagccgatcccgttcccgtagtcgcaaatcttacagccggtcaagaagcaggagcaggagccggagccggagcaagtcccgttctgttagtaggtctcccgtgcctgagaagagccagaaacgtggttcttcaagtagatctaagtctccagcatctgtggatcgccagaggtcccggtcccgatcaaggtccagatcagttgacagtggcaattaaactgtaaataacttgccctgggggccttttttaaaaacaaaaaccacaaaaatcccaaaccatacttgctaaaattctggtaggtatgtgcttttctgtgggggtggatttggaacggggg

SEQ ID NO: 192120 - DNA, 905 bp, Homo Sapiens; identical to SEQ ID NO: 184618

SEQ ID NO: 192121 - DNA, 637 bp, Homo Sapiens
  misc_feature (398)..(433): n is a, c, g, or t
ccttttaaaagatttcccattgatcagaattcaggctttattattgagcaatgaaaacagctaaaacttaattccaagcatgtgtagttaaagtttgcaaagtgggatattgttcacaaaacacattcaatgtttaaacactatttatttgaagaacaaaatatatttaaaattgtttgcttctaaaaagcccatttccctccaagtctaaactttgtaatttgatattaagcaatgaagttattttgtacaatctagttaaacaagcagaatagcactaggcagaataaaaaattgcacagacgtatgcaattttccaagatagcattctttaaattcagttttcagcttccaaagattggttgcccataatagacttaaacatataatgatggctnnnnnnnnnnnnnnnnnnnnnnnnnnnnnnnnnnnntgtaagtccactctcaatctcataaaaggtgagagtaaggatgctaaagcaaaataaatgtaggttctttttttctgtttccgtttatcatgcaatctgcttctttgatatgccttagggttacccatttaagttagaggttgtaatgcaatggtgggaatgaaaattgatcaaatatacccaacttttttgtacaaagttggc

SEQ ID NO: 192122 - DNA, 1026 bp, Homo Sapiens; identical to SEQ ID NO: 184620

SEQ ID NO: 192123 - DNA, 863 bp, Homo Sapiens
  misc_feature (256)..(269): n is a, c, g, or t
gcggggggaatgcgaggaacattttattacacctcgtgattttcactccgtgagttttattttctcccgttgtttatttgtttaatgctagaaactgtattcgtaagagagcatacctctttcaggtgagcatgataattggaagattttgatacttagagtatgaacatataattaagaagtgattacctaataaagataacaatgtgactattttaattattttggtggcagggagttggttttacatcacccnnnnnnnnnnnnnngccctggtttcaaattcattggtaataaatatgctaactttctgaatcaaaatggagagcctctcaagaaaaagagctatgcagtcagcaatgacttaaattagtcaggatagcaggcatctggggttaaggctgtttccaccattttggtctcaccaccatatacgagtgggaccacagctgtgtagcacttgtttctgtcataagtgtagcaggtctctgtagcactgtcttcatcacagatattgctctgggtagcagtaactatctgattatccagctccacttctgtaggatcacattttttacagaggtcagacaaatggtacacaaatctggttctcaatggtgaggtgggatcagagatattctccctgttgttcagaggaacaataattcggatgtttctctccacaatgtcctcattaggatcttcggaagaacggatgatcctggaagtaatccgggcacacttacatttgttgtcaacaagaacaatcctttcatcttcttgggctttcacatgaacagccttaataaaaaccgccaggactccccagaaaagcaaatggttcttcatcttgacccaacttt

SEQ ID NO: 192124 - DNA, 1272 bp, Homo Sapiens
  misc_feature (591)..(604): n is a, c, g, or t
  misc_feature (860)..(875): n is a, c, g, or t
ttgggtcaagatgaagaaccatttgcttttctggggagtcctggcggtttttattaaggctgttcatgtgaaagcccaagaagatgaaaggattgttcttgttgacaacaaatgtaagtgtgcccggattacttccaggatcatccgttcttccgaagatcctaatgaggacattgtggagagaaacatccgaattattgttcctctgaacaacagggagaatatctctgatcccacctcaccattgagaaccagatttgtgtaccatttgtctgacctctgtaaaaaatgtgatcctacagaagtggagctggataatcagatagttactgctacccagagcaatatctgtgatgaagacagtgctacagagacctgctacacttatgacagaaacaagtgctacacagctgtggtcccactcgtatatggtggtgagaccaaaatggtggaaacagccttaaccccagatgcctgctatcctgactaatttaagtcattgctgactgcatagctctttttcttgagaggctctccattttgattcagaaagttagcatatttattaccaatgaatttgaaaccagggcnnnnnnnnnnnnnngggtgatgtaaaaccaactccctgccaccaaaataattaaaatagtcacattgttatctttattaggtaatcacttcttaattatatgttcatactctaagtatcaaaatcttccaattatcatgctcacctgaaagaggtatgctctcttaggaatacagtttctagcattaaacaaataaacaaggggagaaaataaaactcaaggagtgaaaatcaggagtgtaataaaatgttcctcgcattcccccccgcnnnnnnnnnnnnnnnngactttgccttggagagccagagcttccgcattttctttactattctttttaaaaaaagtttcactgtgtagagaacatatatgcataaacataggtcaattatatgtctccattagaaaaataataattggaaaacatgttctagaactagttacaaaaataatttaaggtgaaatctctaatatttataaaagtagcaaaataaatgcataattaaaatatatttggacataacagacttggaagcagatgatacagacttctttttttcataatcaggttagtgtaagaaattgccatttgaaacaatccattttgtaatgaccttatgaaatatatgtatttcatggtacgtattctctagcacagtctgagcaattaaatagattcataagc

SEQ ID NO: 192125 - DNA, 1044 bp, Homo Sapiens
  misc_feature (773)..(786): n is a, c, g, or t
gtttcttataaggggcaactttgtacaaaaaagttgggacttcaaccacagttgtgattgtttttagtttgttagctgcctggagtgttattttaagaaagcagaagcaccatcatttgcacactccttatagatcacacaccttaaccctgactttttttgctccagtttttcagaagaagtgaagtcaagatgaagaaccatttgcttttctggggagtcctggcggtttttattaaggctgttcatgtgaaagcccaagaagatgaaaggattgttcttgttgacaacaaatgtaagtgtgcccggattacttccaggatcatccgttcttccgaagatcctaatgaggacattgtggagagaaacatccgaattattgttcctctgaacaacagggagaatatctctgatcccacctcaccattgagaaccagatttgtgtaccatttgtctgacctctgtaaaaaatgtgatcctacagaagtggagctggataatcagatagttactgctacccagagcaatatctgtgatgaagacagtgctacagagacctgctacacttatgacagaaacaagtgctacacagctgtggtcccactcgtatatggtggtgagaccaaaatggtggaaacagccttaaccccagatgcctgctatcctgactaatttaagtcattgctgactgcatagctctttttcttgagaggctctccattttgattcagaaagttagcatatttattaccaatgaatttgaaaccagggcnnnnnnnnnnnnnngggtgatgtaaaaccaactccctgccaccaaaataattaaaatagttcacattgttatctttataaggtaatcacttcttaattatatgttcctactctaagtatcaaatcttccaattatcatgctcacctgaaagagtatgctctcctaggaatacattttctagcattatacaaataaccaagggggagaaataaaacctcatggagtggaaaatcacgaggggtaataaatggttcctcgaatccccccccgcc

SEQ ID NO: 192126 - DNA, 877 bp, Homo Sapiens
  misc_feature (606)..(620): n is a, c, g, or t
ctttgtacaaaaaagttgggtcaagatgaaccaccatttgcttttctggggagtcctggcggtttttattaaggctgttcatgtgaaagcccaagaagatgaaaggattgttcttgttgacaacaaatgtaagtgtgcccggattacttccaggatcatccgttcttccgaagatcctaatgaggacattgtggagagaaacatccgaattattgttcctctgaacaacagggagaatatctctgatcccacctcaccattgagaaccagatttgtgtaccatttgtctgacctctgtaaaaaatgtgatcctacagaagtggagctggataatcagatagttactgctacccagagcaatatctgtgatgaagacagtgctacagagacctgctacacttatgacagaaacaagtgctacacagctgtggtcccactcgtatatggtggtgagaccaaaatggtggaaacagccttaaccccagatgcctgctatcctgactaatttaagtcattgctgactgcatagctctttttcttgagaggctctccattttgattcagaaagttagcatatttattaccaatgaatttgaaaccagggcnnnnnnnnnnnnnnngggtgatgtaaaaccaactccctgccaccaaaataattaaaatagtcacattgttatctttattaggtaatcacttcttaattatatgttcatactctaagtatcaaaatcttccaattatcatgctcacctgaaagaggtatgctctcttaggaatacagtttctagcattaaacaaataaaccagggggaggaaataaaactcaaggagtgaaaatcaggaggtgtaataaaatgttcctcgcattcccccccgc

SEQ ID NO: 192127 - DNA, 384 bp, Homo Sapiens
  misc_feature (271)..(288): n is a, c, g, or t
tttgtacaaaaaagttggtgtaaaaccaactccctgaaaaaacaaaataattaaaatagtcacattgttatctttattaggtaatcacttcttaattatatgttcatactctaagtatcaaaatcttccaattatcatgctcacctgaaagaggtatgctctcttaggaatacagtttctagcattaaacaaataaacaaggggagaaaataaaactcaaggagtgaaaatcaggaggtgtaataaaatgttcctcgcattcccccccgcnnnnnnnnnnnnnnnnnngactttgccttggagagccagagcttccgcattttctttactattctttttaaaaaaagtttcactgggtagagaacatatatgcataaacatagg

SEQ ID NO: 192128 - DNA, 985 bp, Homo Sapiens; identical to SEQ ID NO: 184624

SEQ ID NO: 192129 - DNA, 1218 bp, Homo Sapiens; identical to SEQ ID NO: 184625

SEQ ID NO: 192130 - DNA, 1371 bp, Homo Sapiens
ctttgtacaaaaaagttgggggattcacctctacttcacccatctggacattgagctgtcagagaactgtgcgtatgactcagtgcagataatctcaggagacactgaagaagggaggctctgtggacagaggagcagtaacaatccccactctccaattgtggaagagttccaagtcccatacaacaaactccaggtgatctttaagtcagacttttccaatgaagagcgttttacggggtttgctgcatactatgttgccacagacataaatgaatgcacagattttgtagatgtcccttgtagccacttctgcaacaatttcattggtggttacttctgctcctgccccccggaatatttcctccatgatgacatgaagaattgcggagttaattgcagtggggatgtattcactgcactgattggggagattgcaagtcccaattatcccaaaccatatccagagaactcaaggtgtgaataccagatccggttggagaaagggttccaagtggtggtgaccttgcggagagaagattttgatgtggaagcagctgactcagcgggaaactgccttgacagtttagtttttgttgcaggagatcggcaatttggtccttactgtggtcatggattccctgggcctctaaatattgaaaccaagagtaatgctcttgatatcatcttccaaactgatctaacagggcaaaaaaagggctggaaacttcgctatcatggagatccaatgccctgccctaaggaagacactcccaattctgtttgggagcctgcgaaggcaaaatatgtctttagagatgtggtgcagataacctgtctggatgggtttgaagttgtggagggacgtgttggtgcaacatctttctattcgacttgtcaaagcaatggaaagtggagtaattccaaactgaaatgtcaacctgtggactgtggcattcctgaatccattgagaatggtaaagttgaagacccagagagcactttgtttggttctgtcatccgctacacttgtgaggagccatattactacatggaaaatggaggaggtggggagtatcactgtgctggtaacgggagctgggtgaatgaggtgctgggcccggagctgccgaaatgtgttccagtctgtggagtccccagagaaccctttgaagaaaaacagaggataattggaggatccgatgcagatattaaaaacttcccctggcaagtcttctttgacaacccatgggctggtggagcgctcattaatgagtactgggtgctgacggctgctcatgttgtggagggaaacagggagccaacaatgtatgttgggtccacctcagtgcagacctcacggctggcaaa

SEQ ID NO: 192131 - DNA, 1030 bp, Homo Sapiens
  misc_feature (945)..(953): n is a, c, g, or t
aaagtgtaaacttacatctattactacacacacaatgcatatattatagaaagcaaaaagagctatctgaatatgtaatcatgcttaaatgctgagctatcaaattcacttttcagtggccccttttcatctctatctggttgtactttctgcctctatgaaaaagcaaaataaagctcaacacttcctcaacatgtctgtaattctataagcaaaacaaaatacaaatttccactctttctcattgcaaaccaaactgaaaagttaataagtgacttaacttttcatttagtgcacttaattggaagtgtcaccatgattttgtatttaactcttacaacaattacatatgtaagtatatacaatatttctgtacattgccagagacattttagggcagtaattgtattaaaaccacatctactgtaaataatgttaggttcttttcatctcaaaccactttattcttgtctacttactcgttatttgcatgatagtttgtgaattatcaaaatacaactcaactctttttaaaatattaataatatttatgcagttgattgttaatctgttataaaaggtttcacgcaaaggaaaaaaataaggactataattctatatacatctctataaacctgttgtgctatggggttgtagacctaccagactgtgagccagtttattaaaagaatactgtactttttcctttaaaaactatttttgtgactttacaaggtaaaaatttacaaaatatgtgacagctttttatttttgatacagttacatcatatacaggcattctgtgctttgccagcaatccaatctgataggtctccactcagggctgaatataatttataattcatcccccaccccccaaatatacacaagaaccttaaaaaatttacaaatggatgaataaagtcaataaatagttttgctttnnnnnnnnnttgaagattcatagttgagttgtgttttgataattcacacacaaaaaaattcttttcacatggttaaattatcccaa

SEQ ID NO: 192132 - DNA, 1516 bp, Homo Sapiens; identical to SEQ ID NO: 184633

SEQ ID NO: 192133 - DNA, 1577 bp, Homo Sapiens; identical to SEQ ID NO: 180357
  misc_feature (1135)..(1144): n is a, c, g, or t

SEQ ID NO: 192134 - DNA, 1798 bp, Homo Sapiens; identical to SEQ ID NO: 184637
  misc_feature (194)..(202): n is a, c, g, or t

SEQ ID NO: 192135 - DNA, 1503 bp, Homo Sapiens; identical to SEQ ID NO: 184638

SEQ ID NO: 192136 - DNA, 1345 bp, Homo Sapiens; identical to SEQ ID NO: 184639

SEQ ID NO: 192137 - DNA, 1164 bp, Homo Sapiens; identical to SEQ ID NO: 184640

SEQ ID NO: 192138 - DNA, 1967 bp, Homo Sapiens; identical to SEQ ID NO: 184643
  misc_feature (1268)..(1320): n is a, c, g, or t

SEQ ID NO: 192139 - DNA, 1979 bp, Homo Sapiens; identical to SEQ ID NO: 184647
  misc_feature (165)..(176): n is a, c, g, or t

SEQ ID NO: 192140 - DNA, 926 bp, Homo Sapiens
ttggcgtcaacgcagccgggcgagttttaccgatctgtgttccgcggcccggccgcggctgagtcttcccagggtcagggtcaggcgctttgctgagtccctttgtggccgccatggacaattccgggaaggaagcggaggcgatggcgctgttggccgaggcggagcgcaaagtgaagaactcgcagtccttcttctctggcctctttggaggctcatccaaaatagaggaagcatgcgaaatctacgccagagcagcaaacatgttcaaaatggccaaaaactggagtgctgctggaaacgcgttctgccaggctgcacagctgcacctgcagctccagagcaagcacgacgcagccacctgctttgtggacgctggcaacgcattcaagaaagccgacccccaagaggccattaactgtttgatgcgagcaatcgagatctacacagacatgggccgattcacgattgcggccaagcaccacatctccattgctgagatctatgagacagagttggtggacatcgagaaggccattgcccactacgagcagtctgcagactactacaaaggcgaggagtccaacagctcagccaacaagtgtctgctgaaggtggctggttacgctgcgctgctggagcagtatcagaaggccattgacatctacgaacaggtggggaccaatgccatggacagccccctcctcaagtacagcgccaaagactacttcttcaaggcggccctctgccacttctgcatcgacatgctcaacgccaagctggctgtccaaaagtatgaggagctgttcccagctttctctgattcccgggaatgcaagttgatgaaaaaattgctagaggcccacgaggagcagaatgtggacagctacaccgagtccggtgaagaatacgactccatctcccgg

SEQ ID NO: 192141 - DNA, 2183 bp, Homo Sapiens; identical to SEQ ID NO: 184650

SEQ ID NO: 192142 - DNA, 2208 bp, Homo Sapiens; identical to SEQ ID NO: 184652
  misc_feature (1716)..(1728): n is a, c, g, or t

SEQ ID NO: 192143 - DNA, 1558 bp, Homo Sapiens
gggagtgaacgagaaaaaagcttcatggggtgcctctgggtggctgtggtgggagagcaggggcagctctgaggccaagggaacatgtgatgggggccgggccttgcgcccactgcacccttgggagccagggagaggcggtgatggggcatcgagctggggtcagggacctgaggtggggggctgggttggacgcagctgggccctggcttagcttcctggctctgcctccccatcaggatgtctggctgtgttccccagagacccccactgaggccccgcggtggctgcagctgcctctactttttgtagttgccaaactggatggccaggcggtcagtgacgcagcggaaagtggccggctgcacctcccagtagggcacggggttgttgaagaggctgatgccgttgtagtaggcccgcttcaccccgaagcccatgggacagaagtcgttgacacccactttggtgatgttgttggagtgcagatagaccacctggaggagcttgaggtctgggagccctgagggcaccctggccaacttgttgttgtccaagtggagctcccggagggtgggcaggaagctcaggctcccgttctcgatcatcctgatctggttgtggcctaggcccagcctgtacagcttggagtagcgaagcaggtcctccagttcgatggcctggattttgttgtggtctaggtggagttcattcagggtctcagggaggtctttggggatgccagtcagcttggcctctgagatgcgcaggtagttgagcttcaggccatcgaaggctccaggttcaaagccactgttctccagtgggttcccgcccatctcgatgcagttcatgttccggagcccactgaacactcccttgggcaccttgcggatgcggttgtcgtggatgcggagctccaccagggagctgggtaggttgggcgggatctccaccaggtggttcttggagatgtagagcttctgcagcttccgcagtgggctgaaggccttctcatggatcttggagatcttgttgttcaccaggacgagggcgtagaggtgctggagacccttgaagtcatccttgcggagctcggagatgtcgttgttctgcaggtccagcagcgtggtgtcaggggagatctctttgggcacagacttcagacccaggtcggagcactgaaccacccgcaggtggcagtggcagccgaaaggacacatggcgctgtaggtgggtgtgacagagtccgggtccaggacgcccgaggtgtcagcgcccgaagcttcctcatcgttcatcatgaatggcccatcgtccagggtgaagtcccagaagcctctctgctcaaagggcagggcctggctcagggccagcagagacacgaggcgccacaggggccacatggcggatggacctggagaggggaggcgccaggcgcaggctgactagttggcgggctggggtggtgggccgtccgcacgtctatctgtccggtgtgtccggcggaccgaaagcagctactcactcctgggcagtttgtggagagttgggccaa

SEQ ID NO: 192144 - DNA, 929 bp, Homo Sapiens
gccaactttgtacaaaaaagttggcctacaggagtccagggctggagagaaaacctctgcgaggaaagggaaggagcaagccgtgaatttaagggacgctgtgaagcaatcatggatgcaatgaagagagggctctgctgtgtgctgctgctgtgtggagcagtcttcgtttcgcccagccaggaaatccatgcccgattcagaagaggagccagatcttaccaagtgatctgcagagatgaaaaaacgcagatgatataccagcaacatcagtcatggctgcgccctgtgctcagaagcaaccgggtggaatattgctggtgcaacagtggcagggcacagtgccactcagtgcctgtcaaaagttgcagcgagccaaggtgtttcaacgggggcacctgccagcaggccctgtacttctcagatttcgtgtgccagtgccccgaaggatttgctgggaagtgctgtgaaatagataccagggccacgtgctacgaggaccagggcatcagctacaggggcacgtggagcacagcggagagtggcgccgagtgcaccaactggaacagcagcgcgttggcccagaagccctacagcgggcggaggccagacgccatcaggctgggcctggggaaccacaactactgcagaaacccagatcgagactcaaagccctggtgctacgtctttaaggcggggaagtacagctcagagttctgcagcacccctgcctgctctgagggaaacagtgactgctactttgggaatgggtcagcctaccgtggcacgcacagcctcaccgagtcgggtgcctcctgcctcccgtggaattccatgatcctgataggcaaggtttacacagcacagaaccccagtgcccaggcactgggcctgggcaaacataattactgccggaatcctgatgggga

SEQ ID NO: 192145 - DNA, 2112 bp, Homo Sapiens; identical to SEQ ID NO: 184660

SEQ ID NO: 192146 - DNA, 2101 bp, Homo Sapiens; identical to SEQ ID NO: 184664
  misc_feature (1915)..(1925): n is a, c, g, or t

SEQ ID NO: 192147 - DNA, 1280 bp, Homo Sapiens
ttggggcacgagtacctggggagggatgttgtacgttccctcgtgctggcgaagcggtggtgcgtggcgtggctgagtttctgtcgtccatttctagagagaatcctgacgacggcgttcgcgggagtccgccggaagactacaggcttggacaggtcgccagtagcttatttcgcggcgaacaccattccagaggtggcaccggtcggctggcgtccctcttcagttctctggagccccagattcaacccgtgtacgtgcctgtgcctaaaggaaagcgctctagcgagtgctgatttagaagaagaaattcaccagaaacaagggcagaaaaggaaaaattctcaacctggtgttaaagtagcagatagaaaaatacttgatgacacagaagacacagttgtcagtcaaagaaagaaaattcaaatcaaccaagaagaagagagattaaagaatgagagaactgtgtttgttgggaatttgcctgttacatgtaataagaagaagctgaagtcgttttttaaagagtatggacaaatagaatctgtacgatttcgttctctgaaagattccagcagagggaacgctatccaaaaagttggcagcaataaaacgtaaaattcatcctgatcagaaaaatattaatgcctatgttgtgtttaaggaggagagtgctgccacgcaagcattgaaaagaaatggggcccagattgcagatggatttcgtattagagttgatctcgcatctgagacctcatctagagacaagagatcggtttttgtggggaatctcccttataaagttgaagaatctgccattgagaagcactttctggactgtggaagtatcatggccgtgaggattgtgagagacaaaatgacaggcatcggcaaagggtttggctatgtgctctttgagaatacagattctgttcatcttgctctgaaattaaataattctgaactcatggggagaaaactcagagtcatgcgttctgttaataaagaaaaatttaaacaacaaaattcaaatccacgattgaagaatgtcagtaaacctaagcagggacttaattttacttccaaaactgcagaaggacatcctaaaagcttatttattggagaaaaagctgttctccttaaaacgaagaagaaaggacagatgaaaagtggacgccctaagaaacagagaacacagaaataactaccaggaactgctttttcttttcctgctgagtactgctaatagaagtgctattatctgctgatagcatcgtctg

SEQ ID NO: 192148 - DNA, 925 bp, Homo Sapiens
ttgggtaagaatggccttgggaagggatgagcaaacggaagagaaagagaagtgtccaggagggagagaatcctgacgacggcgttcgcgggagtccgccggaagactacaggcttggacaggtcgccagtagcttatttcgcggcgaacaccattccagaggtggcaccggtcggctggcgtccctcttcagttctctggagccccagattcaacccgtgtacgtgcctgtgcctaaacaaaccatcaaaaaaacgaaacggaatgaggaggaagaaagtacatcccagattgaaagaccactttcgcaagaacctgccaaaaaagtgaaagcgaagaagaaacacactaacgcagaaaaaaagttggcagacagggaaagcgctctagcgagtgctgatttagaagaagaaattcaccagaaacaagggcagaaaaggaaaaattctcaacctggtgttaaagtagcagatagaaaaatacttgatgacacagaagacacagttgtcagtcaaagaaagaaaattcaaatcaaccaagaagaagagagattaaagaatgagagaactgtgtttgttgggaatttgcctgttacatgtaataagaagaagctgaagtcgttttttaaagagtatggacaaatagaatctgtacgatttcgttctctgattccagcagagggaacgctatccaaaaagttggcagcaataaaacgtaaaattcatcctgatcagaaaaatattaatgcctatgttgtgtttaaggaggagagtgctgccacgcaagcattgaaaagaaatggggcccagattgcagatggatttcgtattaaagttgatctcgcatctgagacctcatctagagacaagagatcggtttttgtgggggaatctcccttataaattgaagaatctgccattgagaa

SEQ ID NO: 192149 - DNA, 1591 bp, Homo Sapiens; identical to SEQ ID NO: 180366
  misc_feature (410)..(554): n is a, c, g, or t
  misc_feature (596)..(608): n is a, c, g, or t
  misc_feature (1528)..(1536): n is a, c, g, or t

SEQ ID NO: 192150 - DNA, 496 bp, Homo Sapiens; identical to SEQ ID NO: 180367

SEQ ID NO: 192151 - DNA, 926 bp, Homo Sapiens
ctttgtacaaaaaagttggacactatggaaccatttacaaataccggacccttgaacctcaatgatccagatgcaaaatgcagattccccaaaatttttgtaaatacagatgacacttatgaagagctccatttaatcgtttataaggccatgagtgcggctgtgtgctttatgatcgacgcctctgtccacccaacgttggatttttgccgaagactggacagcatcgttgggccccagctcacagtgctggcctctgacatctgtgaacagtttaacatcaacaagaggatgtccgggtctgagaaagaaccccagtttaagtttatctacttcaaccacatgaatctcgccgagaagagcacagttcacatgaggaaaacgcccagcgtgtcgctcacttccgtgcacccggatttaatgaagattctcggtgacatcaacagtgactttaccagagtggatgaagatgaggagatcattgtgaaggccatgagtgattactgggttgttggaaagaagtctgatcggcgggagctctatgttattttgaatcaaaaaaatgcaaacctgattgaagtaaatgaagaggtcaagaaactttgtgcaacgcagttcaacaacatcttcttcttggattgacggatgacggctcactgagagcatatctaaaaaacactctgcaaacatttggtcacatgcaagttagtggtcatatgacggactgcattcaggacaagggtaaagcaatacttgctttgaagaatcacatttcgactcggtctgctgatctgaggtttttagatttaaatatttatgtggaattaatttaaaggtagttggctatatcgctatcatttcattcttttgacattatgtgaatattttactggaaaataagactaataaattgttaaaaggttttt

SEQ ID NO: 192152 - DNA, 1004 bp, Homo Sapiens; identical to SEQ ID NO: 184667
  misc_feature (877)..(887): n is a, c, g, or t

SEQ ID NO: 192153 - DNA, 2715 bp, Homo Sapiens; identical to SEQ ID NO: 184668
  misc_feature (94)..(102): n is a, c, g, or t
  misc_feature (1490)..(1499): n is a, c, g, or t

SEQ ID NO: 192154 - DNA, 1290 bp, Homo Sapiens; identical to SEQ ID NO: 180369
  misc_feature (942)..(950): n is a, c, g, or t

SEQ ID NO: 192155 - DNA, 685 bp, Homo Sapiens; identical to SEQ ID NO: 184669
  misc_feature (407)..(419): n is a, c, g, or t

SEQ ID NO: 192156 - DNA, 2248 bp, Homo Sapiens; identical to SEQ ID NO: 184670
  misc_feature (1490)..(1501): n is a, c, g, or t

SEQ ID NO: 192157 - DNA, 1316 bp, Homo Sapiens; identical to SEQ ID NO: 184671

SEQ ID NO: 192158 - DNA, 1390 bp, Homo Sapiens; identical to SEQ ID NO: 184673
  misc_feature (511)..(530): n is a, c, g, or t

SEQ ID NO: 192159 - DNA, 1262 bp, Homo Sapiens; identical to SEQ ID NO: 184674
  misc_feature (981)..(1000): n is a, c, g, or t

SEQ ID NO: 192160 - DNA, 1052 bp, Homo Sapiens; identical to SEQ ID NO: 184675

SEQ ID NO: 192161 - DNA, 970 bp, Homo Sapiens
ttggcccgcacctgcctcgcgagaccccaacggctccattgcgcgtctcggctgagctggccatggcgcagctgtgcgggctgaggcggagccgggcgtttctcgccctgctgggatcgctgctcctctctggggtcctggcggccgaccgagaacgcagcatccacgacttctgcctggtgtcgaaggtggtgggcagatgccgggcctccatgcctaggtggtggtacaatgtcactgacggatcctgccagctgtttgtgtatgggggctgtgacggaaacagcaataattacctgaccaaggaggagtgcctcaagaaatgtgccactgtcacagagaatgccacgggtgacctggccaccagcaggaatgcagcggattcctctgtcccaagtgctcccagaaggcaggattctgaagaccactccagcgatatgttcaactatgaagaatactgcaccgccaacgcagtcactgggccttgccgtgcatccttcccacgctggtactttgacgtggagaggaactcctgcaataacttcatctatggaggctgccggggcaataagaacagctaccgctctgaggaggcctgcatgctccgctgcttccgccagcaggagaatcctcccctgccccttggctcaaaggtggtggttctggcggggctgttcgtgatggtgttgatcctcttcctgggagcctccatggtctacctgatccgggtggcacggaggaaccaggagcgtgccctgcgcaccgtctggagctccggagatgacaaggagcagctggtgaagaacacatatgtcctgtgaccgccctgtccccaaggactggggaagggaggggagactatgtgtgagcttttttttaatagagggattgactcggatttgagtgatcatttgggctgaggtctgtttctctgggaagtagggacggctgcttcctgatctggcaggga

SEQ ID NO: 192162 - DNA, 1016 bp, Homo Sapiens
ttggcttcgggagccgcttccaataggcgttcgccattggctctggcgacctccgcgcgttgggaggtgtagcgcggctctgaacgcgctgagggccgttgagtgtcgcaggcggcgagggcgcgagtgaggagcagacccaggcatcgcgcgccgagaaggccgggcgtccccacactgaaggtccggaaaggcgacttccgggggctttggcacctggcggaccctcccggagcgtcggcacctgaacgcgaggcgctccattgcgcgtgcgcgttgaggggcttcccgcacctgatcgcgagaccccaacggctggtggcgtcgcctgcgcgtctcggctgagctggccatggcgcagctgtgcgggctgaggcggagccgggcgtttctcgccctgctgggatcgctgctcctctctggggtcctggcggccgaccgagaacgcagcatccacgacttctgcctggtgtcgaaggtggtgggcagatgccgggcctccatgcctaggtggtggtacaatgtcactgacggatcctgccagctgtttgtgtatgggggctgtgacggaaacagcaataattacctgaccaaggaggagtgcctcaagaaatgtgccactgtcacagagaatgccacgggtgacctggccaccagcaggaatgcagcggattcctctgtcccaagtgctcccagaaggcaggattctgaagaccactccagcgatatgttcaactatgaagaatactgcaccgccaacgcagtcactgggccttgccgtgcatccttcccacgctggtactttgacgtggagaggaactcctgcaataacttcatctatggaggctgccggggcaataagaacagctaccgctctgaggaggcctgcatgctccgctgcttccgccagcaggagaatcctcccctgccccttggctcaaaggtggtggttctggcggggctgttcgtgatggtgttgatcctcttcctgggagcctccatggtctacctgatcc

SEQ ID NO: 192163 - DNA, 969 bp, Homo Sapiens
tcctggttcctccgtgccacccggatcaggtagaccatggaggctcccaggaagaggatcaacaccatcacgaacagccccgccagaaccaccacctttgagccaaggggcaggggaggattctctgctggcggaagcagcggagcatgcaggcctcctcagagcggtagctgttcttattgccccggcagcctccatagatgaagttattgcaggagttcctctccacgtcaaagtaccagcgtgggaaggatgcacggcaaggcccagtgactgcgttggcggtgcagtattcttcatagttgaacatatcgctggagtggtcttcagaatcctgccttctgggagcacttgggacagaggaatccgctgcattcctgctggtggccaggtcacccgtggcattctctgtgacagtggcacatttcttgaggcactcctccttggtcaggtaattattgctgtttccgtcagtgacattgtaccaccacctaggcatggaggcccggcatctgcccaccaccttcgacaccaggcagaagtcgtggatgctgcgttctcggtcggccgccaggaccccagagaggagcagcgatcccagcagggcgagaaacgcccggctccgcctcagcccgcacagctgcgccatggccagctcagccgagacgcgcaggcgacgccaccagccgttggggtctcgcgatcaggtgcgggaagcccctcaacgcgcacgcgcaatggagcgcctcgcgttcaggtgccgacgctccgggagcgtccgccaggtgccaaagcccccggaagtcgcctttccggaccttcagtgtggggacgcccggccttctcggcgcgcgatgcctgggtctgctcctcactcgcgccctcgccgcctgcgacactcaacggccctcagcgcgttcagagccgcgctacacatgcccaacgcgcgccaacttttttgtacaaagt

SEQ ID NO: 192164 - DNA, 930 bp, Homo Sapiens
cctctatttaaaaaaagctcacacatagtctcccctcccttccccagtcctctgggcgacagggcggtcacaggacatatgtgttcttcaccagctgctccttgtcatctccggagctccagacggtgcgcagggcacgctcctggttcctccgtgccacccggatcaggtagaccatggaggctcccaggaagaggatcaacaccatcacgaacagccccgccagaaccaccacctttgagccaaggggcaggggaggattctcctgctggcggaagcagcggagcatgcaggcctcctcagagcggtagctgttcttattgccccggcagcctccatagatgaagttattgcaggagttcctctccacgtcaaagtaccagcgtgggaaggatgcacggcaaggcccagtgactgcgttggcggtgcagtattcttcatagttgaacatatcgctggagtggtcttcagaatcctgccttctgggagcacttgggacagaggaatccgctgcattcctgctggtggccaggtcacccgtggcattctcgtggatgctgcgttctcggtcggccgccaggaccccagagaggagcagcgatcccagcagggcgagaaacgcccggctccgcctcagcccgcacagctgcgccatggccagctcagccgagacgcgcaggcgacgccaccagccgttggggtctcgcgatcaggtgcgggaagcccctcaacgcgcacgcgcaatggagcgcctcgcgttcaggtgccgacgctccgggagggtccgccaggtgccaaagcccccggaagtcgcctttccggaccttcagtgtggggacgcccggccttctcggcgcgcgatgcctgggtctgctcctcactcgcgccctcgccgcctgcgacactcaacggccgtcagcgcgttcccaa

SEQ ID NO: 192165 - DNA, 1306 bp, Homo Sapiens; identical to SEQ ID NO: 184678

SEQ ID NO: 192166 - DNA, 1009 bp, Homo Sapiens
ctttgtacaaaaaagttggatctgaacccaaaaagtctgaaggcttgataacctctgaaaatgagaaatgtgatcatccagcgggaggtattcactatgaaatgtgcatagaatgtccacctactttcagtgacaagagagaacaaatatcagaaaatccaacagaagccacagatattggttttggtaatcgatgtggaaaacccaaaggaccaagagatccaccttcagaatggacatgattcagggagctagaagacactttaagttatactggaaaattcaggtgccactgaaagccagatttatagtattccatctttaatatgtgggactaacagcagtgtagattgttaccttaatattttttgctgggaccatctacctgccttatactacacttaggaaaaagtattacatatggtttattttgaaacttcaagtattattgccttaatgtctcttaaccctgttacacgctgcttgtagacatgttaatatagtaatacctttatgatatattgagtttaaggactactctttttctgttttatcatgtatgcattattttgtatatgtacagggcaagtaggtatataatttgataaagttgcaattgaaatattattaacagaagatgtaagaaatttctgcatggtctaaatctttgtgtactttatttgtaaattatttgccctggagttttagaaaatagtttctgaattttaaacttgctggattcatgcagccagctttgcaggttatcagagatcaaagattgtaataataattttgtaaattgtaagcaaaaagttatttttatattatatacagtctaattgttcatcctaattgttcctgttttcatctagtcagagattcagtaagtgccttggaaacaatattgaattctcttagcttgtgtgtgtttctttaatatttggactccagtgggattaggagactatcaaaatacatgtatgtttccagatattttgaccctgtcatt

SEQ ID NO: 192167 - DNA, 1519 bp, Homo Sapiens; identical to SEQ ID NO: 184679

SEQ ID NO: 192168 - DNA, 2250 bp, Homo Sapiens; identical to SEQ ID NO: 184680

SEQ ID NO: 192169 - DNA, 2676 bp, Homo Sapiens; identical to SEQ ID NO: 184682
  misc_feature (183)..(279): n is a, c, g, or t
  misc_feature (1484)..(1551): n is a, c, g, or t

SEQ ID NO: 192170 - DNA, 1301 bp, Homo Sapiens; identical to SEQ ID NO: 184683
  misc_feature (1047)..(1114): n is a, c, g, or t

SEQ ID NO: 192171 - DNA, 1062 bp, Homo Sapiens; identical to SEQ ID NO: 184684
  misc_feature (845)..(912): n is a, c, g, or t

SEQ ID NO: 192172 - DNA, 1620 bp, Homo Sapiens; identical to SEQ ID NO: 184685
  misc_feature (1367)..(1435): n is a, c, g, or t

SEQ ID NO: 192173 - DNA, 1761 bp, Homo Sapiens; identical to SEQ ID NO: 184688
  misc_feature (229)..(237): n is a, c, g, or t

SEQ ID NO: 192174 - DNA, 1767 bp, Homo Sapiens; identical to SEQ ID NO: 180373
  misc_feature (1266)..(1274): n is a, c, g, or t

SEQ ID NO: 192175 - DNA, 942 bp, Homo Sapiens
ctttgtacaaaaaagttggcacctccccagctgaacttttccacctggagtccttgggaataccggacgtgatcttcttttataggtccaatgatgtgacccagtcctgcagttctgggagatcaaccaccatccgcgtcaggtgcagtccacagaaaactgtccctggaagtttgctgctgccaggaacgtgctcagatgggacctgtgatggctgcaacttccacttcctgtgggagagcgcggctgcttgcccgctctgctcagtggctgactaccatgctatcgtcagcagctgtgtggctgggatccagaagactacttacgtgtggcgagaacccaagctatgctctggtggcatttctctgcctgagcagagagtcaccatctgcaaaaccatagatttctggctgaaagtgggcatctctgcaggcacctgtactgccatcctgctcaccgtcttgacctgctacttttggaaaaagaatcaaaaactagagtacaagtactccaagctggtgatgaatgctactctcaaggactgtgacctgccagcagctgacagctgcgccatcatggaaggcgaggatgtagaggacgacctcatctttaccagcaagaagtcactctttgggaagatcaaatcatttacctccaagaggactcctgatggatttgactcagtgccgctgaagacatcctcaggaggcccagacatggacctgtgagaggcactgcctgcctcacctgcctcctcaccttgcatagcacctttgcaagcctgcggcgatttgggtgccagcatcctgcaacacccactgctggaaatctcttcattgtggccttatcagatgtttgaatttcagatctttttttatagagtacccaaaccctcctttctgcttgcctcaaacctgccaaatatacccacactttgtttgt

SEQ ID NO: 192176 - DNA, 2421 bp, Homo Sapiens; identical to SEQ ID NO: 184693

SEQ ID NO: 192177 - DNA, 956 bp, Homo Sapiens; identical to SEQ ID NO: 180375
  misc_feature (529)..(537): n is a, c, g, or t

SEQ ID NO: 192178 - DNA, 1134 bp, Homo Sapiens
ctttgtacaaaaaagttggtggggacgtgcttgtccgccatcagggctggcggggacgagaccaagctgctggtggtggacagggaaactgacgagttcttcaagaaatgcagagtgatcccatctcaggagcacctgaatggtcccctgcctgtgcccttcaccaatggggagatacagaaggagaacagtcgtgaagccctggcagaggcagccttggagagccccaggccagccctggtgagatccgcctccagtgacaccagcgaggagctgaattcccaagacagccccccaaaacaggactccacagcgccctcgtctacctcctcctccgaccccatcctagacttcaacatctccctggccatggccaaagagagggcccaccagaaacgcagcagcaaacgggccccgcagatggactggagcaagaaaaacgaactcttcagcaacctctgagcgccctgctgccacccagtgactggcagggccgagccagcattccaccccacctttttccttctccccaattactcccctgaatcaatgtacaaatcagcacccacatcccctttcttgacaaatgatttttctagagaactatgttcttccctgactttagggaaggtgaatgtgttcccgtcctcccgcagtcagaaaggagactctgcctccctcctcctcactgagtgcctcatcctaccgggtgtccctttgccaccctgcctgggacatcgctggaacctgcaccatgccaggatcatgggaccaggcgagagggcaccctcccttcctcccccatgtgataaatgggtccagggctgatcaaagaactctgactgcagaactgccgctctcagtggacagggcatctgttatcctgagacctgtggcagacacgtcttgttttcatttgatttttgttaagagtgcagtattgcagagtctagaggaatttttgtttccttgattaacatgattttcctggttgttacatccagggcatggcagtggcctcagccttaaacttttgttcctactcccaccctcagcgaactgggcagcacggggagggtttggctacccctgcccatccctgagccaggtaccaccattgtaaggaaacacttt

SEQ ID NO: 192179 - DNA, 2065 bp, Homo Sapiens; identical to SEQ ID NO: 184695
  misc_feature (1822)..(1884): n is a, c, g, or t

SEQ ID NO: 192180 - DNA, 1043 bp, Homo Sapiens; identical to SEQ ID NO: 184696
  misc_feature (252)..(294): n is a, c, g, or t
  misc_feature (743)..(803): n is a, c, g, or t

SEQ ID NO: 192181 - DNA, 2268 bp, Homo Sapiens; identical to SEQ ID NO: 184697
  misc_feature (94)..(149): n is a, c, g, or t

SEQ ID NO: 192182 - DNA, 1437 bp, Homo Sapiens
  misc_feature (1069)..(1102): n is a, c, g, or t
tttgtacaaaaaagttggcgcacgcctcccccaagagagcagctgctggccgcagccatggcagcagcccggggggaggatgaggacgaggtctccgaggcccaggagactccagaccacgccatcttccggtggcttgccatctccttcgcctccgcacacctcaccttgaccgagccctaccgcggaggctgccaagcccaggactacaccggcggcatgggcatcgtcaacggggccaagtggaacccccggaccgggactatcaatgacttcagttacctgcataccaactgcctggggctctccttctacctgggctgtgacaagttccctcatgagagtgagctgccccgcgagtgggagaacaacaaggaggcgctgctcaccttcatggagcaggtgcaccgcggcattaagggggtggtgacggacgagcaaggcatccccattgccaacgccaccatctctgtgagtggcattaatcacggcgtgaagacagccagtggtggtgattactggcgaatcttgaacccgggtgagtaccgcgtgacagcccacgcggagggctacaccccgagcgccaagacctgcaatgttgactatgacatcggggccactcagtgcaacttcatcctggctcgctccaactggaagcgcatccgggagatcatggccatgaacgggaaccggcctatcccacacatagacccatcgcgccctatgaccccccaacagcgacgcctgcagcagcgacgcctacaacaccgcctgcggcttcgggcacagatgcggctgcggcgcctcaacgccaccaccaccctaggcccccacactgtgcctcccacgctgccccctgcccctgccaccaccctgagcactaccatagagccctggggcctcataccgccaaccaccgctggctgggaggagtcggagactgagacctacacagaggtggtgacagagtttgggaccgaggtggagcccgagtttgggaccaaggtggagcccgagtttgagacccagttggagcctgagtttgagacccagctggaacccgagtttnnnnnnnnnnnnnnnnnnnnnnnnnnnnnnnnnntagccactggccaggcattccccttcacaacagtagagacctacacagtgaactttggggacttctgagatcagcgtcctaccaagaccccagcccaactcaagctacagcagcagcacttcccaagcctgctgaccacagtcacatcacccatcagcacatggaaggcccctggtatggacactgaaaggaagggctggtcctgcccctttgagggggtgcaaacatgactgggacctaagagccagaggctgtgtagaggctcctgctccacctgccagtctcgtaagagatggggttgctgcagtgttggagtagggcagagggagggagcc

SEQ ID NO: 192183 - DNA, 1003 bp, Homo Sapiens
  misc_feature (366)..(400): n is a, c, g, or t
gccatgagcttgttttattggagtgaccttggctccctccctctgcccctactccaacactgcagcaaccccatctcttacgaaactggcaggtggagcaggagcctctacacagcctctggctcttaagtcccagtcatgtttgcaccccctcaaaggggcaggaccagcccttcctttcagtgtccataccaggggccttccatgtgctgatgggtgatgtgactgtggtcagcaggcttgggaagtgctgctgctgtaacttgagttgggctggggtcttggtaggacgctgatctcaaaagtccccaaagttcactgtgtaggtctctactgttgtgaaggggaatgcctggccagtggctnnnnnnnnnnnnnnnnnnnnnnnnnnnnnnnnnnnaaactcgggttccagctgggtctcaaactcaggctccaactgggtctcaaactcgggctccaccttggtcccaaactcgggctccacctcggtcccaaactctgtcaccacctctgtgtaggtctcagtctccgactcctcccagccagcggtggttggcggtatgaggccccagggctctatggtagtgctcagggtggtggcaggggcagggggcagcgtgggaggcacagtgtgggggcctagggtggtggtggcgttgaggcgccgcagccgcatctgtgcccgaagccgcaggcggtgttgtaggcgtcgctgctgcaggcgtcgctgttggggggtcatagggcgcgatgggtctatgtgtgggataggccggttcccgttcatggccatgatctcccggatgcgcttccagttggagcgagccaggatgaagttgcactgagtggccccgatgtcatagtcaacattgcaggtcttggcgctcggggtgtagccctccgcgtgggctgtcacgcggtactcacccgggttcaagattcgccagtaatcaccaccactggctgcggagggagaacgatccgggtgccccagagccaa

SEQ ID NO: 192184 - DNA, 1008 bp, Homo Sapiens; identical to SEQ ID NO: 184698
  misc_feature (219)..(274): n is a, c, g, or t
  misc_feature (722)..(783): n is a, c, g, or t

SEQ ID NO: 192185 - DNA, 2441 bp, Homo Sapiens; identical to SEQ ID NO: 180378
  misc_feature (405)..(427): n is a, c, g, or t
  misc_feature (1966)..(2000): n is a, c, g, or t

SEQ ID NO: 192186 - DNA, 913 bp, Homo Sapiens; identical to SEQ ID NO: 180379
  misc_feature (91)..(100): n is a, c, g, or t
  misc_feature (631)..(639): n is a, c, g, or t

SEQ ID NO: 192187 - DNA, 431 bp, Homo Sapiens
actttgtacaaaaaagttggcctcgctcgtgcccacctctgctgatctcacaggccatgggactggccctctatgtcctgccagtgctgggccaacacgttgccacccagcacttcccagtggcagaggctgaggctgtggtgctgacactgctggcgatttatgcagctggcctggccctgccccacaatacccaccggtaagaggctgggctggttgttgggggcaggggtagaggtcccctggacatgcagacagcttgtgggttgcctctgagtcctttgtcttacagggtggtaagcacacaggccccagacaggggctggatgtttttttattctggtaaccccgatctaccaagcaatgcagctggtttgcatcgccctcaccaacttctcactgggcttcctgaaggacaacaccatggtgcc

SEQ ID NO: 192188 - DNA, 1655 bp, Homo Sapiens; identical to SEQ ID NO: 184701

SEQ ID NO: 192189 - DNA, 740 bp, Homo Sapiens; identical to SEQ ID NO: 180381
  misc_feature (138)..(158): n is a, c, g, or t

SEQ ID NO: 192190 - DNA, 963 bp, Homo Sapiens
ttgggtagctccgaacaggaagagggcgaaaaaaataaccgtccgcgacgccgagacaaaccggacccgcaaccaccatgaacagcaaaggtcaatatccaacacagccaacctaccctgtgcagcctcctgggaatccagtataccctcagaccttgcatcttcctcaggctccaccctataccgatgctccacctgcctactcagagctctatcgtccgagctttgtgcacccaggggctgccacagtccccaccatgtcagccgcatttcctggagcctctctgtatcttcccatggcccagtctgtggctgttgggcctttaggttccacaatccccatggcttattatccagtcggtcccatctatccacctggctccacagtgctggtggaaggagggtatgatgcaggtgccagatttggagctggggctactgctggcaacattcctcctccacctcctggatgccctcccaatgctgctcagcttgcagtcatgcagggagccaacgtcctcgtaactcagcggaaggggaacttcttcatgggtggttcagatggtggctacaccatctggtgaggaaccaaggccacctttgtgccgggaaagacatcacataccttcagcacttctcacaatgtaactgctttagtcatattaacctgaagttgcagtttagacacatgttgttggggtgtctttctggtgcccaaactttcaggcacttttcaaatttaataaggaaccatgtaatggtagcagtacctccctaaagcattttgaggtaggggaggtatccattcataaaatgaatgtgggtgaagccgccctaaggattttcctttaatttctctggagtaatactgtaccatactggtctttgcttttagtaataaaacatcaaattagtttggagggaactttgatcttcctaagaattaaagttgccaaattattc

SEQ ID NO: 192191 - DNA, 1102 bp, Homo Sapiens
  misc_feature (196)..(238): n is a, c, g, or t
gtaatgcaacttcatcactttattcaaatcttcaaaatagtctttattctacatttttagtataaaaattccacaagttaagtgcaccacagtgtagagagagacatacaacgctgaacttccataacagtcaatggtacagtcaaacatcacatgtacagaacacacaatttagatgaactgaaattataagatnnnnnnnnnnnnnnnnnnnnnnnnnnnnnnnnnnnnnnnnnnnttaaggatccctgaaatattcttaaaccctaatgagatttcactggactcaagtcattttgtagtgagacattcacaatatgaccctattaacccagtctaggaattctggggagccgaatgagtggccgcatcagacactctgacaaaaaatggtaaccagtttttgatctgaaaactcctcttaatttagctctgaacacatcaatcaagcttttgaaatgcatcctcctccttgcccctcatattttaaaccaactgttgttcacagtacagtttgcacgacatctttgttcaaacatagctcagtttttctggcaccaaagcaaatttgggttaggttcgtgtatgcagagacaacctatgaggagggcccataaggcaccctccacttttgcctgaggagatacgaaagcagaagtaatgggatctgtacttggggcacagagagggtttcagaggatccttgtgaaacactagttaaaagatgacgagtggggagaagtgcgaggaaagaaggaaattagtctgactggaaaatatgtcctgcaccattgattcaatggagactggcgggaggaaatggaagactagggttggagatgggatgggtggggcaagggatggaaaggaaaaggcagacaactaatgcgttccatttataacaagtaatatatatcaaagacttaaaggagattaaagaccaatcagaataatttggcaactttaattcttaggaagatcaaagttccctccaaacctaatttgatgttttattactaaaagcaaagaccagtatggtacagtattactccagagaaattaaaggaaaatcagtagggcggctccaacttttttgtacaaa

SEQ ID NO: 192192 - DNA, 2486 bp, Homo Sapiens; identical to SEQ ID NO: 180382
  misc_feature (524)..(534): n is a, c, g, or t
  misc_feature (1063)..(1083): n is a, c, g, or t

SEQ ID NO: 192193 - DNA, 734 bp, Homo Sapiens
actttgtacaaaaaagttggggaatgttttcccttcaacacacatctcatgtgatgctcttattacaggacacagcattgttggttttgccatgtactattttacctatgacccgtggattggcaagttattgtatcttgaggacttcttcgtgatgagtgattatagaggctttggcataggatcagaaattctgaagaatctaagccaggttgcaatgaggtgtcgctgcagcagcatgcacttcttggtagcagaatggaatgaaccatccatcaacttctataaaagaagaggtgcttctgatctgtccagtgaagagggttggagactgttcaagatcgacaaggagtacttgctaaaaatggcaacagaggagtgaggagtgctgctgtagatgacaacctccattctattttagaataaattcccaacttctcttgctttctatgctgtttgtagtgaaataatagaatgagcacccattccaaagctttattaccagtggcgttgttgcatgtttgaaatgaggtctgtttaaagtggcaatctcagatgcagtttggagagtcagatctttctccttgaatatctttcgataaacaacaaggtggtgtgatcttaatatatttgaaaaaaacttcattctcgtgagtcatttaaatgtgtacaatgtacacactggtacttagagtttctgtttgattcttttttaataaactactctttgattt

SEQ ID NO: 192194 - DNA, 1476 bp, Homo Sapiens; identical to SEQ ID NO: 180383
  misc_feature (405)..(427): n is a, c, g, or t
  misc_feature (956)..(967): n is a, c, g, or t

SEQ ID NO: 192195 - DNA, 1228 bp, Homo Sapiens; identical to SEQ ID NO: 180384
  misc_feature (489)..(499): n is a, c, g, or t
  misc_feature (1028)..(1050): n is a, c, g, or t

SEQ ID NO: 192196 - DNA, 1363 bp, Homo Sapiens; identical to SEQ ID NO: 180385
  misc_feature (444)..(454): n is a, c, g, or t
  misc_feature (983)..(1002): n is a, c, g, or t

SEQ ID NO: 192197 - DNA, 1468 bp, Homo Sapiens; identical to SEQ ID NO: 184705
  misc_feature (265)..(273): n is a, c, g, or t
  misc_feature (586)..(679): n is a, c, g, or t
  misc_feature (914)..(931): n is a, c, g, or t

SEQ ID NO: 192198 - DNA, 748 bp, Homo Sapiens; identical to SEQ ID NO: 184706
  misc_feature (234)..(251): n is a, c, g, or t

SEQ ID NO: 192199 - DNA, 2456 bp, Homo Sapiens; identical to SEQ ID NO: 184711

SEQ ID NO: 192200 - DNA, 2026 bp, Homo Sapiens; identical to SEQ ID NO: 184712
  misc_feature (540)..(563): n is a, c, g, or t
  misc_feature (1743)..(1743): n is a, c, g, or t

SEQ ID NO: 192201 - DNA, 947 bp, Homo Sapiens; identical to SEQ ID NO: 184716
  misc_feature (416)..(469): n is a, c, g, or t

SEQ ID NO: 192202 - DNA, 1327 bp, Homo Sapiens; identical to SEQ ID NO: 184718
  misc_feature (850)..(861): n is a, c, g, or t
  misc_feature (1014)..(1030): n is a, c, g, or t
  misc_feature (1037)..(1045): n is a, c, g, or t

SEQ ID NO: 192203 - DNA, 1400 bp, Homo Sapiens
  misc_feature (500)..(536): n is a, c, g, or t
  misc_feature (1142)..(1165): n is a, c, g, or t
ttggctaaaaccattccatttccaagcactttcagtccaataggtgtaggaaatagcgctgtttttgttgtgtgtgcagggagggcagttttctaatggaatggtttgggaatatccatgtacttgtttgcaagcaggactttgaggcaagtgtgggccactgtggtggcagtggaggtggggtgtttgggaggctgcgtgccagtcaagaagaaaaaggtttgcattctcacattgccaggatgataagttcctttccttttctttaaagaagttgaagtttaggaatcctttggtgccaactggtgtttgaaagtagggacctcagaggtttacctagagaacaggtggtttttaagggttatcttagatgtttcacaccggaaggtttttaaacactaaaatatataatttatagttaaggctaaaaagtatatttattgcagaggatgttcataaggccagtatgatttataaatgcaatctccccttgatttaannnnnnnnnnnnnnnnnnnnnnnnnnnnnnnnnnnnnaaccttctgcctttgatgttacagatttaatacagtttatttttaaagatagatccttttataggtgagaaaaaaacaatctggaagaaaaaaaccacacaaagacattgattcagcctgtttggcgtttcccagagtcatctgattggacaggcatgggtgcaaggaaaattagggtactcaacctaagttcggttccgatgaattcttatcccctgccccttcctttaaaaaacttagtgacaaaatagacaatttgcacatcttggctatgtaattcttgtaatttttatttaggaagtgttgaagggaggtggcaagagtgtggaggctgacgtgtgagggaggacaggcgggaggaggtgtgaggaggaggctcccgaggggaaggggcggtgcccacaccggggacaggccgcagctccattttcttattgcgctgctaccgttgacttccaggcacggtttggaaatattcacatcgcttctgtgtatctctttcacattgtttgctgctattggaggatcagttttttgttttacaatgtcatatactgccatgtactagttttagttttctcttagaacattgtattacagatgccnnnnnnnnnnnnnnnnnnnnnnnnatgtgatcaattttgacttaatgtgattactgctctattccaaaaaggttgctgtttcacaatacctcatgcttcacttagccatggtggacccagcgggcaggttctgcctgctttggcgggcagacacgcgggcgcgatcccacacaggctggcgggggccggccccgagccgcgtgcgtgagaaccgcgccgtgtccccagagaccaggctgtgtccctcttctcttccctg

SEQ ID NO: 192204 - DNA, 1264 bp, Homo Sapiens
  misc_feature (966)..(993): n is a, c, g, or t
ttggcggcgcagtagcagcgagcagcagagtccgcacgctccggcgaggggcagaagagcgcgagggagcgcggggcagcagaagcgagagccgagcgcggacccagccaggacccacagccctccccagctgcccaggaagagccccagccatggaacaccagctcctgtgctgcgaagtggaaaccatccgccgcgcgtaccccgatgccaacctcctcaacgaccgggtgctgcgggccatgctgaaggcggaggagacctgcgcgccctcggtgtcctacttcaaatgtgtgcagaaggaggtcctgccgtccatgcggaagatcgtcgccacctggatgctggaggtctgcgaggaacagaagtgcgaggaggaggtcttcccgctggccatgaactacctggaccgcttcctgtcgctggagcccgtgaaaaagagccgcctgcagctgctgggggccacttgcatgttcgtggcctctaagatgaaggagaccatccccctgacggccgagaagctgtgcatctacaccgacaactccatccggcccgaggagctgctgcaaatggagctgctcctggtgaacaagctcaagtggaacctggccgcaatgaccccgcacgatttcattgaacacttcctctccaaaatgccagaggcggaggagaacaaacagatcatccgcaaacacgcgcagaccttcgttgccctctgtgccacagatgtgaagttcatttccaatccgccctccatggtggcagcggggagcgtggtggccgcagtgcaaggcctgaacctgaggagccccaacaacttcctgtcctactaccgcctcacacgcttcctctccagagtgatcaagtgtgacccggactgcctccgggcctgccaggagcagatcgaagccctgctggagtcaagcctgcgccaggcccagcagaacatggaccccaaggccgccnnnnnnnnnnnnnnnnnnnnnnnnnnnntggacctggcttgcacacccaccgacgtgcgggacgtggacatctgagggcgccaggcaacgggcgccaccgccactccgcagcgagggcggagccggcctcaggtgctccactgacagtccctcctctccggagcattttgataccagaaagggaaagcttcattctccttgttgttggttgttttttcctttgctctttcccccttccatctctgacttaagcaaaagaaaaagattacccaaaaactgtctttaaagaggagagagag

SEQ ID NO: 192205 - DNA, 1279 bp, Homo Sapiens
  misc_feature (371)..(407): n is a, c, g, or t
  misc_feature (1013)..(1036): n is a, c, g, or t
ttgggcaggactttgaggcaagtgtgggccactgtggtggcagtggaggtggggtgtttgggaggctgcgtgccagtcaagaagaaaaaggtttgcattctcacattgccaggatgataagttcctttccttttctttaaagaagttgaagtttaggaatcctttggtgccaactggtgtttgaaagtagggacctcagaggtttacctagagaacaggtggtttttaagggttatcttagatgtttcacaccggaaggtttttaaacactaaaatatataatttatagttaaggctaaaaagtatatttattgcagaggatgttcataaggccagtatgatttataaatgcaatctccccttgatttaannnnnnnnnnnnnnnnnnnnnnnnnnnnnnnnnnnnnaaccttctgcctttgatgttacagatttaatacagtttatttttaaagatagatccttttataggtgagaaaaaaacaatctggaagaaaaaaaccacacaaagacattgattcagcctgtttggcgtttcccagagtcatctgattggacaggcatgggtgcaaggaaaattagggtactcaacctaagttcggttccgatgaattcttatcccctgccccttcctttaaaaaacttagtgacaaaatagacaatttgcacatcttggctatgtaattcttgtaatttttatttaggaagtgttgaagggaggtggcaagagtgtggaggctgacgtgtgagggaggacaggcgggaggaggtgtgaggaggaggctcccgaggggaaggggcggtgcccacaccggggacaggccgcagctccattttcttattgcgctgctaccgttgacttccaggcacggtttggaaatattcacatcgcttctgtgtatctctttcacattgtttgctgctattggaggatcagttttttgttttacaatgtcatatactgccatgtactagttttagttttctcttagaacattgtattacagatgccnnnnnnnnnnnnnnnnnnnnnnnnatgtgatcaattttgacttaatgtgattactgctctattccaaaaaggttgctgtttcacaatacctcatgcttcacttagccatggtggacccagcgggcaggttctgcctgctttggcgggcagacacgcgggcgcgatcccacacaggctggcgggggccggccccgaagccgcgtgcgtgagaaccgcgccggtgtcccagagaacaaggctgtgtccctcttctcttccctgcgcctg

SEQ ID NO: 192206 - DNA, 1342 bp, Homo Sapiens; identical to SEQ ID NO: 184720
  misc_feature (117)..(145): n is a, c, g, or t
  misc_feature (1192)..(1228): n is a, c, g, or t

SEQ ID NO: 192207 - DNA, 1240 bp, Homo Sapiens; identical to SEQ ID NO: 184721
  misc_feature (62)..(100): n is a, c, g, or t
  misc_feature (1139)..(1177): n is a, c, g, or t

SEQ ID NO: 192208 - DNA, 617 bp, Homo Sapiens
ccttttaaaagccaactttgtacaaaaaagttgggtttaatctgttatgtactagtgttctgtttgttattgttttgttaattacaccataatgctaatttaaagagactccaaatctcaatgaagccagctcacagtgctgtgtgccccggtcacctagcaagctgccgaaccaaaagaatttgcaccccgctgcgggcccacgtggttggggccctgccctggcagggtcatcctgtgctcggaggccatctcgggcacaggcccaccccgccccacccctccagaacacggctcacgcttacctcaaccatcctggctgcggcgtctgtctgaaccacgcgggggccttgagggacgctttgtctgtcgtgatggggcaagggcacaagtcctggatgttgtgtgtatcgagaggccaaaggctggtggcaagtgcacggggcacagcggagtctgtcctgtgacgcgcaagtctgagggtctgggcggctggcggctgggtctgtgcatttctggttgcaccgcggcgcttcccagcaccaacatgtaaccggcatgtttccagcagaagaccaaaagacaaacatgaaagtctaagaaataacactggtaaa

SEQ ID NO: 192209 - DNA, 1529 bp, Homo Sapiens; identical to SEQ ID NO: 184722
  misc_feature (183)..(221): n is a, c, g, or t
  misc_feature (1258)..(1294): n is a, c, g, or t

SEQ ID NO: 192210 - DNA, 978 bp, Homo Sapiens
  misc_feature (443)..(462): n is a, c, g, or t
  misc_feature (798)..(821): n is a, c, g, or t
cccatcacgacagacaaagcgtccctcaaggcccccgcgtgttcagacagacgccgcagccaggatggttgaggtaagcgtgagccgtgttctggaggggtggggcggggtgggcctgtgcccgagatggcctccgagcacaggatgaccctgccagggcagggccccaaccacgtgggcccgcagcggggtgcaaattcttttggttcggcagcttgctaggtgaccggggcacacagcactgtgagctggcttcattgagatttggagtctctttaaattagcattatggtgtaattaacaaaacaataacaaacagaacactagtacataacagattaaacatacccaaaacttgaacaaattccagaagctattccaatcatcccgaatgagagtcctacaggtacaacgccgtggtggcacgtaagacacacttgttnnnnnnnnnnnnnnnnnnnntatgcaacttccatagctacacgcaaagaataacacagctgtaaaaactactatgatgctacgcccccgatcagatgaagtgcccagcatcacaggcgcagggaagagaagagggacacagcctggtctctggggacaccggcgcggttctcacgcacgcggcctcggggccggcccccgccagcctgtgtgggatcgcgcccgcgtgtctgcccgccaaagcaggcagaacctgcccgctggatccaccatggctaagtgaagcatgaggtattgtgaaacagcaacctttttggaatagagcagtaatcacattaagtcaaaattgatcacatnnnnnnnnnnnnnnnnnnnnnnnnggcatctgtaatacaatgttctaagagaaaactaaaactagtacatggcagtatatgacattgtaaaacaaaaaactgatcctccaatagcagcaaacaatgtgaaagagatacacagaagcgatgtgaatatttccaaaccgtgcctggaagccaa

SEQ ID NO: 192211 - DNA, 2059 bp, Homo Sapiens; identical to SEQ ID NO: 184723
  misc_feature (140)..(163): n is a, c, g, or t
  misc_feature (769)..(805): n is a, c, g, or t
  misc_feature (1842)..(1880): n is a, c, g, or t

SEQ ID NO: 192212 - DNA, 2232 bp, Homo Sapiens; identical to SEQ ID NO: 184724
  misc_feature (381)..(408): n is a, c, g, or t
  misc_feature (679)..(688): n is a, c, g, or t
  misc_feature (868)..(906): n is a, c, g, or t
  misc_feature (1943)..(1981): n is a, c, g, or t

SEQ ID NO: 192213 - DNA, 2158 bp, Homo Sapiens; identical to SEQ ID NO: 184725
  misc_feature (180)..(218): n is a, c, g, or t
  misc_feature (1255)..(1291): n is a, c, g, or t
  misc_feature (1897)..(1920): n is a, c, g, or t

SEQ ID NO: 192214 - DNA, 1787 bp, Homo Sapiens; identical to SEQ ID NO: 184726

SEQ ID NO: 192215 - DNA, 2591 bp, Homo Sapiens; identical to SEQ ID NO: 184727

SEQ ID NO: 192216 - DNA, 914 bp, Homo Sapiens; identical to SEQ ID NO: 184728

SEQ ID NO: 192217 - DNA, 1588 bp, Homo Sapiens; identical to SEQ ID NO: 180386
  misc_feature (698)..(761): n is a, c, g, or t

SEQ ID NO: 192218 - DNA, 1237 bp, Homo Sapiens; identical to SEQ ID NO: 180387

SEQ ID NO: 192219 - DNA, 622 bp, Homo Sapiens
ataaaagccaactttgtacaaaaaagttggcccagcttttcttgccagctcagcagttcacttcctagagcatctgtcccactgggacacaaccactaatttgtcactggaacctccctgggcctgtctcagattgggattaacataaaagagtggaactatccaaaagagacagggagaaataaataaattgcctcccttcctccgctcccctttcccatcaccccttccccatttcctcttccttctctactcatgccagattttgggattacaaatagaagcttcttgctcctgtttaactccctagttacccaccctaatttgcccttcaggacccttctactttttccttcctgccctgtacctctctctgctcctcacccccacccctgtacccagccaccttcctgactgggaaggacataaaaggtttaatgtcagggtcaaactacattgagcccctgaggacaggggcatctctgggctgagcctactgtctccttcccactgtcctttctccaggccctcagatggcacattagggtgggcgtgctgcgggtgggtatcccacctccagcccacagtgctcagttgtactttttattaagctgtaatatct

SEQ ID NO: 192220 - DNA, 1879 bp, Homo Sapiens; identical to SEQ ID NO: 184729

SEQ ID NO: 192221 - DNA, 980 bp, Homo Sapiens
caatgcttttctataaaagcgcaactttgtacaaaaaagttggagatggctacggcagggggtggctctggggctgacccgggaagtcggggtctccttcgccttctgtctttctgcgtcctactagcaggtttgtgcaggggaaactcagtggagaggaagatatatatccccttaaataaaacagctccctgtgttcgcctgctcaacgccactcatcagattggctgccagtcttcaattagtggagacacaggggttatccacgtagtagagaaagaggaggacctacagtgggtattgactgatggccccaaccccccttacatggttctgctggagagcaagcattttaccagggatttaatggagaagctgaaagggagaaccagccgaattgctggtcttgcagtgtccttgaccaagcccagtcctgcctcaggcttctctcctagtgtacagtgcccaaatgatgggtttggtgtttactccaattcctatgggccagagtttgctcactgcagagaaatacagtggaattcgctgggcaatggtttggcttatgaagactttagtttccccatctttcttcttgaagatgaaaatgaaaccaaagtcatcaagcagtgctatcaagatcacaacctgagtcagaatggctcagcaccaaccttcccactatgtgccatgcagctcttttcacacatgcatgctgtcatcagcactgccacctgcatgcggcgcagctccatccaaagcaccttcagcatcaacccagaaatcgtctgtgaccccctgtctgattacaatgtgtggagcatgctaaagcctataaatacaactgggacattaaagcctgacgacagggttgtggttgctgccacccggctggatagtcgttcctttttctggaatgtggccccaggggctgaaagcgcagtggcttccctttgtcacccagctggctgctgctgagcttt

SEQ ID NO: 192222 - DNA, 1277 bp, Homo Sapiens
actttgtacaaaaaagttggcacggtgctgggacgtgctctgtatgagcttgcaggaggaaccaacttcagcgacacagttcaggctgatccccaaacggttacccgcctgctctatgggttcctgattaaagccaacaactcatggttccagtctatcctcaggcaggacctaaggtcctacttgggtgacgggcctcttcaacattacatcgctgtctccagccccaccaacaccacttatgttgtacagtatgccttggcaaatttgactggcacagtggtcaacctcacccgagagcagtgccaggatccaagtaaagtcccaagtgaaaacaaggatctgtatgagtactcatgggtccagggccctttgcattctaatgagacggaccgactcccccggtgtgtgcgttctactgcacgattagccagggccttgtctcctgcctttgaactgagtcagtggagctctactgaatactctacatggactgagagccgctggaaagatatccgtgcccggatatttctcatcgccagcaaagagcttgagttgatcaccctgacagtgggcttcggcatcctcatcttctccctcatcgtcacctactgcatcaatgccaaagctgatgtccttttcattgctccccgggagccaggagctgtgtcatactgaggaggaccccagcttttcttgccagctcagcagttcacttcctagagcatctgtcccactgggacacaaccactaatttgtcactggaacctccctgggcctgtctcagattgggattaacataaaagagtggaactatccaaaagagacagggagaaataaataaattgcctcccttcctccgctcccctttcccatcaccccttccccatttcctcttccttctctactcatgccagattttgggattacaaatagaagcttcttgctcctgtttaactccctagttacccaccctaatttgcccttcaggacccttctactttttccttcctgccctgtacctctctctgctcctcacccccacccctgtacccagccaccttcctgactgggaaggacataaaaggtttaatgtcagggtcaaactacattgagcccctgaggacaggggcatctctgggctgagcctactgtctccttcccactgtcctttctccaggccctcagatggcacattagggtgggcgtgctgcgggtgggtatcccacctccagcccacagtgctcagttgtactttttattaagctgtaatatct

SEQ ID NO: 192223 - DNA, 1283 bp, Homo Sapiens; identical to SEQ ID NO: 180391
  misc_feature (601)..(664): n is a, c, g, or t
  misc_feature (1142)..(1159): n is a, c, g, or t

SEQ ID NO: 192224 - DNA, 1355 bp, Homo Sapiens
ttggcaatgcacttgctccaggaccggcggctaccccgccgcagcggaggcgcggacttttcttttcgggggtctcgccggctcgccgcgctccccaccttgcctggcccgcccggagccagcggttctccaagcacccagcatcctgctagacgcgccgcgcaccgacggaggggacatgggcagagcaatggtggccaggctcgggctggggctgctgctgctggcactgctcctacccacgcagatttattccagtgaaacaacaactggaacttcaagtaactcctcccagagtacttccaactctgggttggccccaaatccaactaatgccaccaccaaggcggctggtggtgccctgcagtcaacagccagtctcttcgtggtctcactctctcttctgcatctctactcttaagagactcaggccaagaaacgtcttctaaatttccccatcttctaaacccaatccaaatggcgtctggaagtccaatgtggcaaggaaaaacaggtcttcatcgaatctactaattccacaccttttattgacacagaaaatgttgagaatcccaaatttgattgatttgaagaacatgtgagaggtttgactagatgatggatgccaatattaaatctgctggagtttcatgtacaagatgaaggagaggcaacatccaaaatagttaagacatgatttccttgaatgtggcttgagaaatatggacacttaatactaccttgaaaataagaatagaaataaaggatgggattgtggaatggagattcagttttcatttggttcattaattctataaggccataaaacaggtaatataaaaagcttccatgattctatttatatgtacatgagaaggaacttccaggtgttactgtaattcctcaacgtattgtttcgacagcactaatttaatgccgatatactctagatgaagttttacattgttgagctattgctgttctcttgggaactgaactcactttcctcctgaggctttggatttgacattgcatttgaccttttatgtagtaattgacatgtgccagggcaatgatgaatgagaatctacccccagatccaagcatcctgagcaactcttgattatccatattgagtcaaatggtaggcatttcctatcacctgtttccattcaacaagagcactacattcatttagctaaacggattccaaagagtagaattgcattgaccgcgactaatttcaaaatgctttttattattattattttttagacagtctcactttgtcgcccagaccggatggcactggtgcgatctcctatccatgtaccatttgcctcccggggacaatc

SEQ ID NO: 192225 - DNA, 1136 bp, Homo Sapiens
  misc_feature (100)..(131): n is a, c, g, or t
  misc_feature (919)..(934): n is a, c, g, or t
ttggggcatttgaggggaggattattgctatgaatgaaaaaaatattttagcttagactaagctacctgccttcaaaatagtttagggaccaccaccatnnnnnnnnnnnnnnnnnnnnnnnnnnnnnnnnctaatgatttggagagaaaactatttacaaaaattccacatatcagtgatacaatttcttgctgtcaccaattttttataatagcagagtggcctgttctaagaaggccatattttttaagttatctttcagggtaacatggaaatactataaagttggatgtcaaactttaatatgttttcagtgttctctaattttttggaatttttgtagactttacacctggaaaaaaagatttgtaaaatcaccggaacaattgtgtgctttattttataggtagtggttattagtattacatccccattttaaaaacaaaaacataataatggttacaacacgtggagttttactaacatacatattaaatcaaagtatattcttaaaagtacttgtgaagtaaaatctttcttgtgcattttcaatacttgtaaactggaaatcagaaaatatttactatgaacaggaaaatctgacatatagccctttttgatatgtttattaataatgattcttaatggggctcataataagtttaatatgcacagcatcttagaaaagtttaacctgcaaacacttttaaaacataatgcctacttgatttatatctataaaaagactgacaggtaattatatttggaaaacatttaatgcactaactttaaagaaattgaaaattcaggtggataaatagtcttacaaaagacaatgtgctttatgttatacctatagctttggtcccatctttaattgagaaacatttatctgtataaaacatatttttggataannnnnnnnnnnnnnnnttgtatcgctacagaaaggctctaaaaagcatttgaagaaaatatttggttcccttttctataatcatcctttaagattcttatagctacatttggtttattcatcatatttacagtatatatattgttcttttcagtgttcacatcttgttccccatttctcacttgtgtcaccagctgtttgtgccatttttagtgtaaa

SEQ ID NO: 192226 - DNA, 1083 bp, Homo Sapiens; identical to SEQ ID NO: 184731
  misc_feature (742)..(773): n is a, c, g, or t

SEQ ID NO: 192227 - DNA, 941 bp, Homo Sapiens; identical to SEQ ID NO: 180393
  misc_feature (353)..(367): n is a, c, g, or t

SEQ ID NO: 192228 - DNA, 1388 bp, Homo Sapiens; identical to SEQ ID NO: 184732
  misc_feature (869)..(900): n is a, c, g, or t

SEQ ID NO: 192229 - DNA, 942 bp, Homo Sapiens; identical to SEQ ID NO: 184733

SEQ ID NO: 192230 - DNA, 1440 bp, Homo Sapiens
  misc_feature (194)..(225): n is a, c, g, or t
  misc_feature (1013)..(1028): n is a, c, g, or t
ttggatatctttcagcattagagatttttctgttcttgaaaatacagtctgtgctctttgatttttgctattgtacggtttcatgcatttttttaaagggcatttgaggggaggattattgctatgaatgaaaaaaatattttagcttagactaagctacctgccttcaaaatagtttagggaccaccaccatnnnnnnnnnnnnnnnnnnnnnnnnnnnnnnnnctaatgatttggagagaaaactatttacaaaaattccacatatcagtgatacaatttcttgctgtcaccaattttttataatagcagagtggcctgttctaagaaggccatattttttaagttatctttcagggtaacatggaaatactataaagttggatgtcaaactttaatatgttttcagtgttctctaattttttggaatttttgtagactttacacctggaaaaaaagatttgtaaaatcaccggaacaattgtgtgctttattttataggtagtggttattagtattacatccccattttaaaaacaaaaacataataatggttacaacacgtggagttttactaacatacatattaaatcaaagtatattcttaaaagtacttgtgaagtaaaatctttcttgtgcattttcaatacttgtaaactggaaatcagaaaatatttactatgaacaggaaaatctgacatatagccctttttgatatgtttattaataatgattcttaatggggctcataataagtttaatatgcacagcatcttagaaaagtttaacctgcaaacacttttaaaacataatgcctacttgatttatatctataaaaagactgacaggtaattatatttggaaaacatttaatgcactaactttaaagaaattgaaaattcaggtggataaatagtcttacaaaagacaatgtgctttatgttatacctatagctttggtcccatctttaattgagaaacatttatctgtataaaacatatttttggataannnnnnnnnnnnnnnnttgtatcgctacagaaaggctctaaaaagcatttgaggaaaatatttggttcccttttctataatcatcctttaagattcttatagctacatttggtttattcatcatatttacagtatatatattgttcttttcagtgttcacatcttgttccccatttctcacttgtgtcaccagctgtttgtgccatttttagtgtaaaagttgcagacctattagatctgcagtttaagttgccatgctgctaggaaattgtcctttttctttctagctgttaacctacttcctggaaaaagtagtagctctctgtagcattatggagtttcagtggaaccaaatttttgccattaaaaactggcattatactgaactatacattgagaaatcaatcaaaataaaatttttacttttc

SEQ ID NO: 192231 - DNA, 1243 bp, Homo Sapiens
  misc_feature (162)..(193): n is a, c, g, or t
  misc_feature (982)..(997): n is a, c, g, or t
ttggtgaaaatacagtctgtgctctttgatttttgctattgtacggtttcatgcatttttttaaagggcatttgaggggaggattattgctatgaatgaaaaaaatattttagcttagactaagctacctgccttcaaaatagtttagggaccaccaccatnnnnnnnnnnnnnnnnnnnnnnnnnnnnnnnnctaatgatttggagagaaaactatttacaaaaattccacatatcagtgatacaatttcttgctgtcaccaattttttataatagcagagtggcctgttctaagaaggccatattttttaagttatctttcagggtaacatggaaatactataaagttggatgtcaaactttaatatgttttcagtgttctctaattttttggaatttttgtagactttacacctggaaaaaaagatttgtaaaatcaccggaacaattgtgtgctttattttataggtagtggttattagtattacatccccattttaaaaacaaaaacataataatggttacaacacgtggagttttactaacatacatattaaatcaaagtatattcttaaaagtacttgtgaagtaaaatctttcttgtgcattttcaatacttgtaaactggaaatcagaaaatatttactatgaacaggaaaatctgacatatagccctttttgatatgtttattaataatgattcttaatggggctcataataagtttaatatgcacagcatcttagaaaagtttaacctgcaaacacttttaaaacataatgcctacttgatttatatctataaaaaagactgacaggtaattatatttggaaaacatttaatgcactaactttaaagaaattgaaaattcaggtggataaatagtcttacaaaagacaatgtgctttatgttatacctatagctttggtcccatctttaattgagaaacatttatctgtataaaacatatttttggataannnnnnnnnnnnnnnnttgtatcgctacagaaaggctctaaaaagcatttgaggaaaatatttggttcccttttctataatcatcctttaagattcttatagctacatttggtttattcatcatatttacagtatatatattgttcttttcagtgttcacatcttgttccccatttctcacttgtgtccacagctgtttgtgccattttttagtgtaaaagttgcagacctattagatctggcagtttaagttgccctggct

SEQ ID NO: 192232 - DNA, 1089 bp, Homo Sapiens
  misc_feature (63)..(94): n is a, c, g, or t
  misc_feature (882)..(897): n is a, c, g, or t
tggaaatattttagcctaaaataagctacctgccttcaaaatagtttagggaccaccaccatnnnnnnnnnnnnnnnnnnnnnnnnnnnnnnnnctaatgatttggagagaaaactatttacaaaaattccacatatcagtgatacaatttcttgctgtcaccaattttttataatagcagagtggcctgttctaagaaggccatattttttaagttatctttcagggtaacatggaaatactataaagttggatgtcaaactttaatatgttttcagtgttctctaattttttggaatttttgtagacttttctcctggaaaaaaagatttgtaaaatcaccggaacaattgtgtgctttattttataggtagtggttattagtattacatccccattttaaaaacaaaaacataataatggttacaacacgtggagttttactaacatacatattaaatcaaagtatattcttaaaagtacttgtgaagtaaaatctttcttgtgcattttcaatacttgtaaactggaaatcagaaaatatttactatgaacaggaaaatctgacatatagccctttttgatatgtttattaataatgattcttaatggggctcataataagtttaatatgcacagcatcttagaaaagtttaacctgcaaacacttttaaaacataatgcctacttgatttatatctataaaaagactgacaggtaattatatttggaaaacatttaatgcactaactttaaagaaattgaaaattcaggtggataattattcttacaaaagacaatgtgctttatgttatacctatagctttggtcccatctttaattgagaaacatttatctgtataaaacatatttttggataannnnnnnnnnnnnnnnttgtatcgctacagaaaggctctaaaaagcatttgaggaaaatatttggttcccttttctataatcatcctttaagattcttatagctacatttggtttattcatcatatttacagtatatatattgttcttttcagtgttcacatcttgttccccatttctcacttgtgtcaccagctgtttgtgccattt

SEQ ID NO: 192233 - DNA, 1363 bp, Homo Sapiens
  misc_feature (278)..(293): n is a, c, g, or t
  misc_feature (1081)..(1112): n is a, c, g, or t
aacagctagaaagaaaaaaggacaatttcctagcagcatggcaacttaaaatgcagatataataggtctgcaacttttacactaaaaatggcacaaacagctggtgacacaagtgagaaatggggaactagatgtgaacactgaaaagaacaatatatatactgtaaatatgatgaataaaccaaatgtagctataagaatcttaaaggatgattatagaaaagggaaccaaatattttcctcaaatgctttttagagcctttctgtagcgatacaannnnnnnnnnnnnnnnttatccaaaaatatgttttatacagataaatgtttctcaattaaagatgggaccaaagctataggtataacataaagcacattgtcttttgtaagactatttatccacctgaattttcaatttctttaaagttagtgcattaaatgttttccaaatataattacctgtcagtctttttatagatataaatcaagtaggcattatgttttaaaagtgtttgcaggttaaacttttctaagatgctgtgcatattaaacttattatgagccccattaagaatcattattaataaacatatcaaaaagggctatatgtcagattttcctgttcatagtaaatattttctgatttccagtttacaagtattgaaaatgcacaagaaagattttacttcacaagtacttttaagaatatactttgatttaatatgtatgttagtaaaactccacgtgttgtaaccattattatgtttttgtttttaaaatggggatgtaatactaataaccactacctataaaataaagcacacaattgttccggtgattttacaaatctttttttccaggtgtaaagtctacaaaaattccaaaaaattagagaacactgaaaacatattaaagtttgacatccaactttatagtatttccatgttaccctgaaagataacttaaaaaatatggccttcttagaacaggccactctgctattataaaaaattggtgacagcaagaaattgtatcactgatatgtggaatttttgtaaatagttttctctccaaatcattagnnnnnnnnnnnnnnnnnnnnnnnnnnnnnnnnatggtggtggtccctaaactattttgaaggcaggtagcttagtctaagctaaaatatttttttcattcatagcaataatcctcccctcaaatgccctttaaaaaaatgcatgaaaccgtacaatagcaaaaatcaaagagcacagactgtattttcaagaacagaaaaatctctaatgctgaaagatatagtagaaagcagatttctttggggacattaatcaattagtttataattcattatgaagccaa

SEQ ID NO: 192234 - DNA, 891 bp, Homo Sapiens
  misc_feature (575)..(592): n is a, c, g, or t
ttggtgtaaagccagagttttgttcccggattagctgcctcttgcctgtgccatttctgagactgtgttaaccccccatgccttgtccttctcttggcagtaatccagtccctcatagcactggtgaatgacccccagcctgagcacccgcttcgggctgacctagctgaagaatactctaaggaccgtaaaaaattctgtaagaatgctgaagagtttacaaagaaatatggggaaaagcgacctgtggactaaaatctgccacgattggttccagcaagtgtgagcagagaccccgtgcagtgcattcagacaccccgcaaagcaggactctgtggaaattgacacgtgccaccgcctggcgttcgcttgtggcagttactaactttctacagttttcttaatcaaaagtggtctaggtaacctgtaaagaaaggattaaaaatttaagatgttctagttctgctctctttgttttaaaaatcactgcttcaatctacttcaaaagaatggtgtttcttttcttgtccaattttatccaaaatcttcaagttacatttaacccataaggtttnnnnnnnnnnnnnnnnnncggttgtggttccctttcttccctacccttgccactcccactttctggcaccgagtttatttttcacttacttacttccccagaccccgggctcgcctccacaaaggagaagagactgccctggcggtcctggtggcttttcttagcatgtgtggcactgttgcccagtgtgggagttggtttaaattctcctgactccagtttataacatcccttttaaaaaatttaaaaacaaacagccacacccctcctccagtccttctcctcagattcttgtgtgaaactccagctgatgttac

SEQ ID NO: 192235 - DNA, 955 bp, Homo Sapiens
  misc_feature (72)..(93): n is a, c, g, or t
ttgggttctggggacgtgtgaatcctggagggtgggctgtgtctgtggggagtcagggccatccatgtattnnnnnnnnnnnnnnnnnnnnnntccaggctgtcttggggagtccgggctgtgtggaggggtccaagctatgcctttggggatcaggcctgtgggaggctctgggttatgtcttggcgggggtccaggctgtgtcttaggggctgggccatgttctggggacgtgtgaatcctggagggtggggccccggtctcgcgggtggctgtgtccctcgagttcaggcagcacctctcggaactttctggatttgcgtgctggcgtctgtcggcctcgatacccacaggctgcgcccctctcagcacaggaagtcctggagaacctgaaggaccgctggtaccaggcggacagcccccctgcagacctgctgctgacggaggaggagttcctgtcgttcctccaccccgagcacagccggggaatgctcaggttcatggtgaaggagatcgtccgggacctggaccaggacggtgacaagcagctctctgtgcccgagttcatctccctgcccgtgggcaccgtggagaaccagcagggccaggacattgacgacaactgggtgaaagacagaaaaaaggagtttgaggagctcattgactccaaccacgacggcatcgtgaccgccgaggagctggagagctacatggaccccatgaacgagtacaacgcgctgaacgaggccaagcagatgatcgccgtcgccgacgagaaccagaaccaccacctggagcccgaggaggtgctcaagtacagcgagttcttcacgggcagcaagctggtggactacgcgcgcagcgtgcacgaggagttttgagcgcccggccgcgccccgcgccgccccccacgcaccaccggggcggcctcgcgggtgactccggggctccgtgg

SEQ ID NO: 192236 - DNA, 707 bp, Homo Sapiens
ctttgtacaaaaaagttggcacacttccgcgccgtggaccctgacggggacggtcacgtgtcttgggacgagtataaggtgaagtttttggcgagtaaaggccatagcgagaaggaggttgccgacgccatcaggctcaacgaggaactcaaagtggacgaggaaacacaggaagtcctggagaacctgaaggaccgctggtaccaggcggacagcccccctgcagacctgctgctgacggaggaggagttcctgtcgttcctccaccccgagcacagccggggaatgctcaggttcatggtgaaggagatcgtccgggacctggaccaggacggtgacaagcagctctctgtgcccgagttcatctccctgcccgtgggcaccgtggagaaccagcagggccaggacattgacgacaactgggtgaaagacagaaaaaaggagtttgaggagctcattgactccaaccacgacggcatcgtgaccgccgaggagctggagagctacatggaccccatgaacgagtacaacgcgctgaacgaggccaagcagatgatcgccgtcgccgacgagaaccagaaccaccacctggagcccgaggaggtgctcaagtacagcgagttcttcacgggcagcaagctggtggactacgcgcgcagcgtgcacgaggagttttgagcgcccggccgcgccccgcgccgcccccc

SEQ ID NO: 192237 - DNA, 1105 bp, Homo Sapiens; identical to SEQ ID NO: 180394
  misc_feature (108)..(126): n is a, c, g, or t
  misc_feature (1025)..(1035): n is a, c, g, or t

SEQ ID NO: 192238 - DNA, 1745 bp, Homo Sapiens; identical to SEQ ID NO: 184740

SEQ ID NO: 192239 - DNA, 931 bp, Homo Sapiens
ttggggtagctggcaggagccgtgggcaagggaagaggccacaccctgccctgctctgctgcagccagaatgggtgtgaaggcgtctcaaacaggccttgtggtcctggtgctgctccagtgctgctctgcatacaaactggtctgctactacaccagctggtcccagtaccgggaaggcgatgggagctgcttcccagatgcccttgaccgcttcctctgtacccacatcatctacagctttgccaatataagcaacgatcacatcgacacctgggagtggaatgatgtgacgctctacggcatgctcaacacactcaagaacaggaaccccaacctgaagactctcttgtctgtcggaggatggaactttgggtctcaaagattttccaagatagcctccaacacccagagtcgccggactttcatcaagtcagtaccgccatttctgcgcacccatggctttgatgggctggaccttgcctggctctaccctggacggggagacaaacagcattttaccaccctaatcaaggaaatgaaggccgaatttataaaggaagcccagccagggaaaaagcagctcctgctcagcgcagcactgtctgcggggaaggtcaccattgacagcagctatgacattgccaagatatcccaacacctggatttcattagcatcatgacctacgattttcatggagcctggcgtgggaccacaggccatcacagtcccctgttccgaggtcagaggatgcaagtcctgacagattcagcaacactgtgagttcccagaagagggagggccaggagggggccgcaagacctgccatctgccagtgctcacacaccaatctctctagccctcagtacagtcctgcagaggggggtcatgagcccattccacagataagaaactgagcccaaagtctggg

SEQ ID NO: 192240 - DNA, 937 bp, Homo Sapiens
  misc_feature (56)..(67): n is a, c, g, or t
ttggggcttttattttccctgatattatttctatttaatactcttttctctcaagnnnnnnnnnnnngtttgttttttctttattgtccttcatagcaggccaagtattgcctctctgcaatagacagctactgtcaatacatgctgtaatttgacattctgggtcacagatataaggtatttaaaatctatttatgctttatagagaaaccagacattaaaacttcatgcactacttatttcgaattactgtaccttatccaaatttacacctagctattaggatcttcaacccaggtaacaggaataattctgtggtttcatttttctgtaaacaactgaaagaataattagatcatattctagtatgttctgaaatatctttaagactgatcttaaaaactaacttctaagatgatttcatcttctcatagtatagagtttactttgtacacgtttgaaaccaactactgtagaagatgaggaatctattgtaattttttgctttattttcatctgccagtggacttatttgaaattttcactttagtcaaattattttttgtattagtttttgatgcagacataaaaatagcaatcattttaaattgtcaaaatttccagattactggtaaaaattatttgaaaacaaacttatgggtaataaaggctagtcagaaccctataccataaagtgtagttaccatacagattaatatgtagcaaaaatgtatgcttgatatttctcaactgtgttaatttttctgctgtattccagctgaccaaaacaatattaagaatgcatctttataaatgggtgctaattgataatggaaataatttagtaatggactatacaggatgttaataatgaagccatatgtttatgtctggatttaaaaattttaaacaatcatttactatgtcattttttctt

SEQ ID NO: 192241 - DNA, 962 bp, Homo Sapiens
attagatagagcaatgctttccctttaatgccaactttgtacaaaaaagttggatccaaatttacacctagctattaggatcttcaacccaggtaacaggaataattctgtggtttcatttttctgtaaacaactgaaagaataattagatcatattctagtatgttctgaaatatctttaagactgatcttaaaaactaacttctaagatgatttcatcttctcatagtatagagtttactttgtacacgtttgaaaccaactactgtagaagatgaggaatctattgtaattttttgctttattttcatctgccagtggacttatttgaaattttcactttagtcaaattattttttgtattagtttttgatgcagacataaaaatagcaatcattttaaattgtcaaaatttccagattactggtaaaaattatttgaaaacaaacttatgggtaataaaggctagtcagaaccctataccataaagtgtagttaccatacagattaatatgtagcaaaaatgtatgcttgatatttctcaactgtgttaatttttctgctgtattccagctgaccaaaacaatattaagaatgcatctttataaatgggtgctaattgataatggaaataatttagtaatggactatacaggatgttaataatgaagccatatgtttatgtctggatttaaaaattttaaacaatcatttactatgtcatttttctttaccttgaagaacataaactgttatttcacttctacaaatcagcaagatattatttatggcaagaaatattccattgaaatattgtgctgtaacatgggaaagtgtaaatgtttttcatggtttctatcaatgtgaaataaaatttaattctgacttttctgtgactttgagtattttaatatttggaatgttaacatttgaaatgaatgtctataatgccatggaggaaa

SEQ ID NO: 192242 - DNA, 1017 bp, Homo Sapiens; identical to SEQ ID NO: 184743

SEQ ID NO: 192243 - DNA, 1398 bp, Homo Sapiens; identical to SEQ ID NO: 184745

SEQ ID NO: 192244 - DNA, 1035 bp, Homo Sapiens; identical to SEQ ID NO: 184747

SEQ ID NO: 192245 - DNA, 704 bp, Homo Sapiens
ctttgtacaaaaaagttggcttaggcgcagacggggaagcggagccaacatgccagtggcccggagctgggtttgtcgcaaaacttatgtgaccccgcggagacccttcgagaaatctcgtctcgaccaagagctgaagctgatcggcgagtatgggctccggaacaaacgtgaggtctggagggtcaaatttaccctggccaagatccgcaaggccgcccgggaactgctgacgcttgatgagaaggacccacggcgtctgttcgaaggcaacgccctgctgcggcggctggtccgcattggggtgctggatgagggcaagatgaagctggattacatcctgggcctgaagatagaggatttcttagagagacgcctgcagacccaggtcttcaagctgggcttggccaagtccatccaccacgctcgcgtgctgatccgccagcgccatatcagggtccgcaagcaggtggtgaacatcccgtccttcattgtccgcctggattcccagaagcacatcgacttctctctgcgctctccctacgggggtggccgcccgggccgcgtgaagaggaagaatgccaagaagggccagggtggggctggggctggagacgacgaggaggaggattaagtccacctgtccctcctgggctgctggattgtctcgttttcctgccaaataaacaggatcagcgctttac

SEQ ID NO: 192246 - DNA, 714 bp, Homo Sapiens
ctttgtacaaaaaagttggggtggtttgcttaatgcgcagacggggaagcggagccaacatgccagtggcccggagctgggtttgtcgcaaaacttatgtgaccccgcggagacccttcgagaaatctcgtctcgaccaagagctgaagctgatcggcgagtatgggctccggaacaaacgtgaggtctggagggtcaaatttaccctggccaagatccgcaaggccgcccgggaactgctgacgcttgatgagaaggacccacggcgtctgttcgaaggcaacgccctgctgcggcggctggtccgcattggggtgctggatgagggcaagatgaagctggattacatcctgggcctgaagatagaggatttcttagagagacgcctgcagacccaggtcttcaagctgggcttggccaagtccatccaccacgctcgcgtgctgatccgccagcgccatatcagggtccgcaagcaggtggtgaacatcccgtccttcattgtccgcctggattcccagaagcacatcgacttctctctgcgctctccctacgggggtggccgcccgggccgcgtgaagaggaagaatgccaagaagggccagggtggggctggggctggagacgacgaggaggaggattaagtccacctgtccctcctgggctgctggattgtctcgttttcctgccaaataaacaggatcagcgctttac

SEQ ID NO: 192247 - DNA, 760 bp, Homo Sapiens; identical to SEQ ID NO: 180399

SEQ ID NO: 192248 - DNA, 1184 bp, Homo Sapiens
aactttgtacaaaaaagttggctttccaacgctgtaaaaaaggacagaggctgttccctatggcagaaggcaaccacagaaaaaagccacttaaggtgttggaatccctgggcaaagatttcctcactggtgttttggataacttggtggaacaaaatgtactgaactggaaggaagaggaaaaaaagaaatattacgatgctaaaactgaagacaaagttcgggtcatggcagactctatgcaagagaagcaacgtatggcaggacaaatgcttcttcaaaccttttttaacatagaccaaatatcccccaataaaaaagctcatccgaatatggaggctggaccacctgagtcaggagaatctacagatgccctcaagctttgtcctcatgaagaattcctgagactatgtaaagaaagagctgaagagatctatccaataaaggagagaaacaaccgcacacgcctggctctcatcatatgcaatacagagtttgaccatctgcctccgaggaatggagctgactttgacatcacagggatgaaggagctacttgagggtctggactatagtgtagatgtagaagagaatctgacagccagggatatggagtcagcgctgagggcatttgctaccagaccagagcacaagtcctctgacagcacattcttggtactcatgtctcatggcatcctggagggaatctgcggaactgtgcatgatgagaaaaaaccagatgtgctgctttatgacaccatcttccagatattcaacaaccgcaactgcctcagtctgaaggacaaacccaaggtcatcattgtccaggcctgcagaggtgcaaaccgtggggaactgtgggtcagagactctccagcatccttggaagtggcctcttcacagtcatctgaaacctggaggaagatgctgtttacaagacccacgtggagaaggacttcattgctttctgctcttcaacgccacacaacgtgtcctggagagacagcacaatgggctctatcttcatcacacaactcatcacatgcttccagaaatattcttggtgctgccacctagaggaagtatttcggaaggtacagcaatcatttgaaactccaaaggccaaagctcaaatgcccaccatagaacgactgtccatgacaagatatttctacctctttcctg

SEQ ID NO: 192249 - DNA, 2273 bp, Homo Sapiens; identical to SEQ ID NO: 184749
  misc_feature (346)..(414): n is a, c, g, or t
  misc_feature (1791)..(1827): n is a, c, g, or t
  misc_feature (1834)..(1892): n is a, c, g, or t

SEQ ID NO: 192250 - DNA, 1619 bp, Homo Sapiens; identical to SEQ ID NO: 180403

SEQ ID NO: 192251 - DNA, 1367 bp, Homo Sapiens
acaaattgatgagcaatgcttttctataaataagcgcaactttgtacaaaaaagttgggttcaagatgttgccaataacacaaatgaagaagctggggatggcactaccactgctactgtactggcacgctctatagccaaggaaggcttcgagaagattagcaaaggtgctaatccagtggaaatcaggagaggtgtgatgttagctgttgatgctgtaattgctgaacttaaaaagcagtctaaacctgtgaccacccctgaagaaattgcacaggttgctacgatttctgcaaacggagacaaagaaattggcaatatcatctctgatgcaatgaaaaaagttggaagaaagggtgtcatcacagtaaaggatggaaaaacactgaatgatgaattagaaattattgaaggcatgaagtttgatcgaggctatatttctccatactttattaatacatcaaaaggtcagaaatgtgaattccaggatgcctatgttctgttgagtgaaaagaaaatttctagtatccagtccattgtacctgctcttgaaattgccaatgctcaccgtaagcctttggtcataatcgctgaagatgttgatggagaagctctaagtacactcgtcttgaataggctaaaggttggtcttcaggttgtggcagtcaaggctccagggtttggtgacaatagaaagaaccagcttaaagatatggctattgctactggtggtgcagtgtttggagaagagggattgaccctgaatcttgaagacgttcagcctcatgacttaggaaaagttggagaggtcattgtgaccaaagacgatgccatgctcttaaaaggaaaaggtgacaaggctcaaattgaaaaacgtattcaagaaatcattgagcagttagatgtcacaactagtgaatatgaaaaggaaaaactgaatgaacggcttgcaaaactttcagatggagtggctgtgctgaaggttggtgggacaagtgatgttgaagtgaatgaaaagaaagacagagttacagatgcccttaatgctacaagagctgctgttgaagaaggcattgttttgggagggggttgtgccctccttcgatgcattccagccttggactcattgactccagctaatgaagatcaaaaaattggtatagaaattattaaaagaacactcaaattccagcaatgaccattgctaagaatgcaggtgttgaaggatctttgatagttgagaaaattatgcaaagttcctcagaagttggttatgatgctatggctggagattttgtgatatggtggaaaacgaatcattgacccaacaaacgttgtgagaactgctttattggatgctgctggtg

SEQ ID NO: 192252 - DNA, 1096 bp, Homo Sapiens
aatagaacaactttgtacaaaaaagttggcactcgccgccgacgacctgtctcgccgagcgcacgccttgccgccgccccgcagaaatgcttcggttacccacagtctttcgccagatgagaccggtgtccagggtactggctcctcatctcactcgggcttatgccaaagatgtaaaatttggtgcagatgcccgagccttaatgcttcaaggtgtagaccttttagccgatgctgtggccgttacaatggggccaaagggaagaacagtgattattgagcagagttggggaagtcccaaagtaacaaaagatggtgtgactgttgcaaagtcaattgacttaaaagataaatacaagaacattggagctaaacttgttcaagatgttgccaataacacaaatgaagaagctggggatggcactaccactgctactgtactggcacgctctatagccaaggaaggcttcgagaagattagcaaaggtgctaatccagtggaaatcaggagaggtgtgatgttagctgttgatgctgtaattgctgaacttaaaaagcagtctaaacctgtgaccacccctgaagaaattgcacaggttgctacgatttctgcaaacggagacaaagaaattggcaatatcatctctgatgcaatgaaaaaagttggaagaaagggtgtcatcacagtaaaggatggaaaaacactgaatgatgaattagaaattattgaaggcatgaagtttgatcgaggctatatttctccatactttattaatacatcaaaaggtcagaaatgtgaattccaggatgcctatgttctgttgagtgaaaagaaaatttctagtatccagtccattgtacctgctcttgaaattgccaatgctcaccgtaagcctttggtcataatcgctgaagatgttgatggagaagctctaagtacactcgtcttgaataggctaaaggttggtcttcacgttgtggcagtcaaggctccagggtttggtgacaatagaaagaaccagcttaagatatggctattgctactggtggtgcagtgtttggagaagaggattgaccctgaatcttgaagacgttc

SEQ ID NO: 192253 - DNA, 979 bp, Homo Sapiens
atagggcaactttgtacaaaaaagttggtgaagacgttcagcctcatgacttaggaaaagttggagaggtcattgtgaccaaagacgatgccatgctcttaaaaggaaaaggtgacaaggctcaaattgaaaaacgtattcaagaaatcattgagcagttagatgtcacaactagtgaatatgaaaaggaaaaactgaatgaacggcttgcaaaactttcagatggagtggctgtgctgaaggttggtgggacaagtgatgttgaagtgaatgaaaagaaagacagagttacagatgcccttaatgctacaagagctgctgttgaagaaggcattgttttgggagggggttgtgccctccttcgatgcattccagccttggactcattgactccagctaatgaagatcaaaaaattggtatagaaattattaaaagaacactcaaaattccagcaatgaccattgctaagaatgcaggtgttgaaggatctttgatagttgagaaaattatgcaaagttcctcagaagttggttatgatgctatggctggagattttgtgaatatggtggaaaaaggaatcattgacccaacaaaggttgtgagaactgctttattggatgctgctggtgtggcctctctgttaactacagcagaagttgtagtcacagaaattcctaaagaagagaaggaccctggaatgggtgcaatgggtggaatgggaggtggtatgggaggtggcatgttctaactcctagactagtgctttacctttattaatgaactgtgacaggaagcccaaggcagtgttcctcaccaataacttcagagaagtcagttggagaaaatgaagaaaaaggctgggctgaaaatcactataaccatcagttactggttttcagttgacaaaatatataatggtttactgctgtcattgttcatgcctacagataatttattttgtattttttgaataaaaaa

SEQ ID NO: 192254 - DNA, 742 bp, Homo Sapiens
  misc_feature (276)..(363): n is a, c, g, or t
atagcttgctctttcacaagagatgtctacggagacttttaatctataatccaggagtatataaccatgcagcacagaccaattagccaaatgcaaaataaactagattcttaccacaactatcctataaacactgcaactattctttccaaaaggaccctaatcttatgtgaaaacacctactgtgggggaaccagaaacctagctatctggccaaaaggaaaaaatagcaattcagtggttaattggtgaaagcaggaaatgtatgccctttannnnnnnnnnnnnnnnnnnnnnnnnnnnnnnnnnnnnnnnnnnnnnnnnnnnnnnnnnnnnnnnnnnnnnnnnnnnnnnnnnnnnnnnttggtcttcttagttttgttctttttgtctctcttcttcaacccatccatgttagctctaaggaggtttgaataagccatctgaaacttattcacttccttggagctcaccacagtgctgatcttcttcttcccatcggtagctcttaacagacacttgttgtctgcgggctcaaagccctccacagtacctttctttggaatgggtttggttcgaccgtcatacttcttcaaggtgatatagacgctgcccgacgtccggcacttctggaaaagtctggtcagctccgtcaggaactgctcgctctccaacaacaccatcgcggcgacgctggctcgactccctccgcttaagcccaacttttttgtacaaagttggc

SEQ ID NO: 192255 - DNA, 643 bp, Homo Sapiens
  misc_feature (360)..(447): n is a, c, g, or t
ctttgtacaaaaaagttgggtcgagccagcctccccgcgatggtgttgttggagagcgagcagttcctgacggagctgaccagacttttccagaagtgccggacgtcgggcagcgtctatatcaccttgaagaagtatgacggtcgaaccaaacccattccaaagaaaggtactgtggagggctttgagcccgcagacaacaagtgtctgttaagagctaccgatgggaagaagaagatcagcactgtggtgagctccaaggaagtgaataagtttcagatggcttattcaaacctccttagagctaacatggatgggttgaagaagagagactaaaagaacaaaactaagaagaccaannnnnnnnnnnnnnnnnnnnnnnnnnnnnnnnnnnnnnnnnnnnnnnnnnnnnnnnnnnnnnnnnnnnnnnnnnnnnnnnnnnnnnnntaaagggcatacatttcctgctttcaccaattaaccactgaattgctattttttccttttggccagatagctaggtttctggttcccccacagtaggtgttttcacataagattagggtccttttggaaagaatagttgcagtgtttataggatagttgtggtaagaatctagtttattttgcatttggctaattg

SEQ ID NO: 192256 - DNA, 913 bp, Homo Sapiens
  misc_feature (45)..(71): n is a, c, g, or t
tacaaaaaagttgggtgcaacagcggctccgggccgccgccgtcnnnnnnnnnnnnnnnnnnnnnnnnnnncgcggttcccggcgctaacgcggccccgcggtcggcgctctattcgccttccgacccgctgacgctgctgcaggcggacacggtgcgcggcgcggtgctgggctcccgcagcgcctgggccgtggagttcttcgcctcctggtgcggccactgcatcgccttcgccccgacgtggaaggcgctggccgaagacgtcaaagcctggaggccggccctgtatctcgccgccctggactgtgctgaggagaccaacagtgcagtctgcagagacttcaacatccctggcttcccgactgtgaggttcttcaaggcctttaccaagaacggctcgggagcagtatttccagtggctggtgctgacgtgcagacgctgcgggagaggctcattgacgccctggagtcccatcatgacacgtggcccccagcctgtcccccactggagcctgccaagctggaggagattgatggattctttgcgagaaataacgaagagtacctggctctgatctttgaaaagggaggctcctacctgggtagagaggtggctctggacctgtcccagcacaaaggcgtggcggtgcgcagggtgctgaacacagaggccaatgtggtgagaaagtttggtgtcaccgacttcccctcttgctacctgctgttccggaatggctctgtctcccgagtccccgtgctcatggaatccaggtccttctataccgcttacctgcagagactctctgggctcaccagggagctgcccagaccacagttgcaccaaccactgctaacaagatagctcccactgtttggaaattggcagatcgctccaagatctacatggctga

SEQ ID NO: 192257 - DNA, 1061 bp, Homo Sapiens; identical to SEQ ID NO: 184751

SEQ ID NO: 192258 - DNA, 522 bp, Homo Sapiens
ctttgtacaaaaaagttggcgtttcatgacgatcctgtgtacccggagctatccgcacctccggagagtcttccaggagttcatcaagatgaccaactatgacgtggagcacaccatcaagaaggagatgtctggggatgtcagggatgcatttgtggccattgttcaaagtgtcaagaacaagcctctcttctttgccgacaaactttacaaatccatgaagggtgctggcacagatgagaagactctgaccaggatcatggtatcccgcagtgagattgacctgctcaacatccggagggaattcattgagaaatatgacaagtctctccaccaagccattgagggtgacacctccggagacttcctgaaggccttgctggctctctgtggtggtgaggactagggccacagctttggcgggcacttctgccaagaaatggttatcagcaccagccgccatggccaagcctgattgttccagctccagagactaaggaaagggcaggggtggggggaggg

SEQ ID NO: 192259 - DNA, 2880 bp, Homo Sapiens; identical to SEQ ID NO: 184756
  misc_feature (1938)..(1957): n is a, c, g, or t
  misc_feature (2687)..(2731): n is a, c, g, or t

SEQ ID NO: 192260 - DNA, 3166 bp, Homo Sapiens; identical to SEQ ID NO: 184760
  misc_feature (2999)..(3007): n is a, c, g, or t

SEQ ID NO: 192261 - DNA, 1205 bp, Homo Sapiens; identical to SEQ ID NO: 184761

SEQ ID NO: 192262 - DNA, 1313 bp, Homo Sapiens
ttggcattgagtaggtggatgagtggataaatgggtgtgtgggtaggtgaatagatgaatagattgataaatagggggatgggtggattggtagatgggtagatggagggatacattgctgtgtggataggtgggtgaatggatgaaggagggagggatgggcaggtagatggatagattagtggatggatgggtggatgggctgacaaatggcttgttcccagaccgtttgtccttgggtggagtcatgcaggtatctattgcagctgggcctgaactgatatctgaagagagaagtggagacagcgaccagacagatgaggatggagaacctggctcagaggcccaggcccaggcccagccctttggcagcaaatccctcacagatgagtcctgctcagagaaggcagcccctcacaaggctgagggcctggaggaggctgatactggggcctctgggtgccactcccatccggaagagcagccgaccagcatctcaccttccagacacggcgccctggctgagctctgcccgcctggaggctcccacaggatggccctggggactgctgctgcactcgggtcgaatgtcatcaggaatgagcagctgcccctgcagtacttggccgatgtggacacctctgatgaggaaagcatccgggctcacgtgatggcctcccaccattccaagcggagaggccgggcgtcttctgagagtcagggtctaggtgctggagtgcgcacggaggccgatgtagaggaggaggccctgaggaggaagctggaggagctgaccagcaacgtcagtgaccaggagacctcgtccgaggaggaggaagccaaggacgaaaaggcagagcccaacagggacaaatcagttgggcctctcccccaggcggacccggaggtgggcacggctgcccatcaaaccaacagacaggaaaaaagcccccaggaccctggggaccccgtccagtacaacaggaccacagatgaggagctgtcagagctggaggacagagtggcagtgacggcctcagaagtccagcaggcagagagcgaggtttcagacattgaatccaggattgcagccctgagggccgcagggctcacggtgaagccctcgggaaagccccggaggaagtcaaacctcccgatatttctccctcgagtggctgggaaacttggcaagagaccagaggacccaaatgcagacccttcaagtgaggccaaggcaatggctgtgccctatcttctgagaagaaagttcagtaattccctgaaaagtcaaggtaaagatgatgattcttttg

SEQ ID NO: 192263 - DNA, 1164 bp, Homo Sapiens
ttgggtttgtccttgggtggagtcatgcaggtatctattgcagctgggcctgaaccgatatctgaagagagaagtggagacagcgaccagacagatgaggatggagaacctgactcagaggcccaggcccaggcccagccctttggcagcaaaaaaaagcgcctcctctccgtccacgacttcgacttcgagggagactcagatgactccactcagcctcaaggtcactccctgcacctgtcctcagtccctgaggccagggacagcccacagtccctcacagatgagtcctgctcagagaaggcagcccctcacaaggctgagggcctggaggaggctgatactggggcctctgggtgccactcccatccggaagagcagccgaccagcatctcaccttccagacacggcgccctggctgagctctgcccgcctggaggctcccacaggatggccctggggactgctgctgcactcgggtcgaatgtcatcaggaatgagcagctgcccctgcagtacttggccgatgtggacacctctgatgaggaaagcatccgggctcacgtgatggcctcccaccattccaagcggagaggccgggcgtcttctgagagtcagatctttgagctgaataagcatatttcagctgtggaatgcctgctgacctacctggagaacacagttgtgcctcccttggccaagggtctaggtgctggagtgcgcacggaggccgatgtagaggaggaggccctgaggaggaagctggaggagctgaccagcaacgtcagtgaccaggagacctcgtccgaggaggaggaagccaaggacgaaaaggcagagcccaacagggacaaatcagttgggcctctcccccaggcggacccggaggtgggcacggctgcccatcaaaccaacagacaggaaaaaagcccccaggaccctggggacctcgtccagtacaacaggaccacagatgaggagctgtcagagctggaggacagagtggcagtgacggcctcagaagtccagcaggcagagagcgaggtttcagacattgaatccaggattgcagctctgagggccgcagggctcacggtgaagctctcgggaaagcttcggaggaagtcaaacctcccgatatttctctctcgagtggctgggaaa

SEQ ID NO: 192264 - DNA, 1572 bp, Homo Sapiens; identical to SEQ ID NO: 184762
  misc_feature (315)..(362): n is a, c, g, or t

SEQ ID NO: 192265 - DNA, 917 bp, Homo Sapiens
tttgtacaaaaaagttggcatcaaaccaacagacaggaaaaaagcccccaggaccctggggaccccgtccagtacaacaggaccacagatgaggagctgtcagagctggaggacagagtggcagtgacggcctcagaagtccagcaggcagagagcgaggtttcagacattgaatccaggattgcagccctgagggccgcagggctcacggtgaagccctcgggaaagccccggaggaagtcaaacctcccgatatttctccctcgagtggctgggaaacttggcaagagaccagaggacccaaatgcagacccttcaagtgaggccaaggcaatggctgtgccctatcttctgagaagaaagttcagtaattccctgaaaagtcaaggtaaagatgatgattcttttgatcggaaatcagtgtaccgaggctcgctgacacagagaaaccccaacgcgaggaaaggaatggccagccacaccttcgcgaaacctgtggtggcccaccagtcctaacgggacaggacagagagacagagcagccctgcactgttttccctccaccacagccatcctgtccctcattggctctgtgctttccactgtacacagtcaccgtcccaatgagaaacaagaaggagcaccctccacatggactcccacctgcaagtggacagcgacattcagtcctgcactgctcacctgggtttactgatgactcctggctgccccaccatcctctctgatctgtgagaaacagctaagctgctgtgacttccctttaggacaatgttgtgtaaatctttgaaggacacaccgaagacctttatactgtgatcttttacccctttcactcttggctttcttatgttgctttcatgaatggaatggaaaaaagatgactcagttaaggcacc

SEQ ID NO: 192266 - DNA, 917 bp, Homo Sapiens
ttggtgagacatcaatcagtaggtgtaagatgtaccttggttcagtccagtaaggtgggacaacccttaagtgggggcttcctggttgtagtagataagagacaaaaggttgcattcttttgagttcttgatcagccttccactgaacacacaatttagtctggctcagtgagtctgcatttttacagaagcgataggggaaaggaagcaatcagctatgcaggtgagcctcagggggatgactgtgaatagaatgggaggcagctttgccctaagcagttcccagcttgactttttcctttagcttggtgattgtggagtctcaagatttgttttcttttcacaatctgaaattcaaagttccctgggtatcctgtattttcatttgcacactttggcgccctagtcccagagtcctggagcggcatactgggggtggctgtgcagtcccagcatccccaacccagcatgtatagagagcatccatccttacatccagctgacccatgcccatgctcctccctgtggctggaggttcaacaataacataagtctcttctttgccctccagatatttctccctcgagtggctgggaaacttggcaagagaccagaggacccaaatgcagacccttcaagtgaggccaaggcaatggctgtgccctatcttctgaaaagaaagttcagtaattccctgaaaagtcaaggtaaagatgatgattcttttgatcggaaatcagtgtaccgaggctcgctgacacagagaaaccccaacgcgaggaaaggaatggccagccacaccttcgcgaaacctgtggtggcccaccagtcctaacgggacaggacagagagacagagcagccctgcactgttttccctccaccacagccatcctgtccctcattggctctgtgctt

SEQ ID NO: 192267 - DNA, 945 bp, Homo Sapiens; identical to SEQ ID NO: 180405

SEQ ID NO: 192268 - DNA, 1841 bp, Homo Sapiens; identical to SEQ ID NO: 184765
  misc_feature (1624)..(1633): n is a, c, g, or t

SEQ ID NO: 192269 - DNA, 2473 bp, Homo Sapiens; identical to SEQ ID NO: 184766
  misc_feature (1392)..(1672): n is a, c, g, or t
  misc_feature (1674)..(1693): n is a, c, g, or t

SEQ ID NO: 192270 - DNA, 1421 bp, Homo Sapiens; identical to SEQ ID NO: 184768

SEQ ID NO: 192271 - DNA, 1698 bp, Homo Sapiens; identical to SEQ ID NO: 184771

SEQ ID NO: 192272 - DNA, 993 bp, Homo Sapiens
  misc_feature (502)..(510): n is a, c, g, or t
  misc_feature (843)..(851): n is a, c, g, or t
gagcaatgcttttctataatagccaactttgtacaaaaaagttggattactctgtcctcagaagctttccataattacatgaatgctgccatggtgcacatcaacagggccctgaaactcattattcgtctctttctggtagaagatctggttgactccttgaagctggctgtcttcatgtggctgatgacctatgttggtgctgtttttaacggaatcacccttctaattcttgctgaactgctcattttcagtgtcccgattgtctatgagaagtacaagacccagattgatcactatgttggcatcgcccgagatcagaccaagtcaattgttgaaaagatccaagcaaaactccctggaatcgccaaaaaaaaggcagaataagtacatggaaaccagaaatgcaacagttactaaaacaccatttaatagttataacgtcgttacttgtactatgaaggaaaatactcagtgtcagcttgagcctgcattccaagcnnnnnnnnnaatttggtgttttctcccatcctttccctttaaccctcagtatcaagcacaaaaattgatggactgataaaagaactatcttagaactcagaagaagaaagaatcaaattcataggataagtcaataccttaatggtggtagagcctttacctgtagcttgaaaggggaaagattggaggtaagagagaaaatgaaagaacacctctgggtccttctgtccagttttcagcactagtcttactcagctatccattatagttttgcccttaagaagtcatgattaacttatgaaaaaattatttggggacaggagtgtgataccttccttgggnnnnnnnnngcagccctcaaatcctatcttcctgccccacaatgtgagcagctacccctgatactccttttctttaatgatttaactatcaacttgataaataacttacacgtgatagtgataattcctgattccaagaatgccatccgat

SEQ ID NO: 192273 - DNA, 1644 bp, Homo Sapiens; identical to SEQ ID NO: 184773
  misc_feature (491)..(499): n is a, c, g, or t
  misc_feature (832)..(840): n is a, c, g, or t

SEQ ID NO: 192274 - DNA, 1780 bp, Homo Sapiens; identical to SEQ ID NO: 184774
  misc_feature (987)..(995): n is a, c, g, or t
  misc_feature (1327)..(1335): n is a, c, g, or t

SEQ ID NO: 192275 - DNA, 1299 bp, Homo Sapiens
  misc_feature (88)..(96): n is a, c, g, or t
  misc_feature (1152)..(1165): n is a, c, g, or t
ttggatccattatacttttgcccttaagaagtcatgattaacttatgaaaaaattatttggggacaggagtgtgataccttccttggnnnnnnnnngcagccctcaaatcctatcttcctgccccacaatgtgagcagctacccctgatactccttttctttaatgatttaactatcaacttgataaataacttataggtgatagtgataattcctgattccaagaatgccatctgataaaaaagaatagaaatggaaagtgggactgagagggagtcagcaggcatgctgcggtggcggtcactccctctgccactatccccagggaaggaaaggctccgccatttgggaaagtggtttctacgtcactggacaccggttctgagcattagtttgagaactcgttcccgaatgtgctttcctccctctcccctgcccacctcaagtttaataaataaggttgtacttttcttactataaaataaatgtctgtaactgctgtgcactgctgtaaacttgttagagaaaaaaataacctgcatgtgggctcctcagttattgagtttttgtgatcctatctcagtctgggggggaacattctcaagaggtgaaatacagaaagcctttttttcttgatcttttcccgagattcaaatctccgattcccatttgggggcaagtttttttcttcaccttcaatatgagaattcagcgaacttgaaagaaaaatcatctgtgagttccttcaggttctcactcatagtcatgatccttcagagggaatatgcactggcgagtttaaagtaagggctatgatatttgatggtcccaaagtacggcagctgcaaaaagtagtggaaggaaattgtctacgtgtcttggaaaaattagttaggaatttggatgggtaaaaggtacccttgccttactccatcttattttcttagccccctttgagtgttttaactggtttcatgtcctagtaggaagtgcattctccatcctcatcctctgccctcccaggaagtcagtgattgtctttttgggcttcccctccaaaggaccttctgcagtggaagtgccacatccagttcttttcttttgttgctgctgtgtttagataattgaagagatctttgtgccacacaggannnnnnnnnnnnnnaagaaaaacctatagatgaaaaattactaatgaaactgtgtgtacgtgtctgtgcgtgcaacataaaaatacagtagcacctaaggagcttgaatcttggttcctgtaaaatttcaaattgatgtggtattaat

SEQ ID NO: 192276 - DNA, 1983 bp, Homo Sapiens; identical to SEQ ID NO: 184776
  misc_feature (1436)..(1449): n is a, c, g, or t
  misc_feature (1576)..(1670): n is a, c, g, or t

SEQ ID NO: 192277 - DNA, 892 bp, Homo Sapiens
ccccacttccacggtgcaggaggaaagggggcacaccaggcaacccaggacgaagaaagagacagtcagcagctgcgtcatctgggagggtcagggaggcatatgggtgatctgtcagcactgccattgcccggacagccttttgggcagcgtcgctgctgcctgccacaacagtgcgaggtccccccatgccgcagagaccgcgcaggtgggagggacccgagactggcacagtggagacggcgaagtcccggaacgtgtccgccacgatctcagctcctcggtgattggtccatttggagaggcctacgaaaaactcccggccggtgaagagaacgtcagtgccatccagcgtcgcgttctcgtctcctatttccacaattcggagccccaggtcttgcagggctttgcggactccatcgacctctggcctacgagcggggctccagggccgcgtgattagggccgtgtccccttggatcacggccgtgtcgccaagcagcggtcccagcggcaatgactcctcaggtggcagttctagcagctgtagccccagtcgttgcctcagtttacctcccagcaccccgtgctccctttgagctttggccagatccagagcgggaaggccagcccccgcaccttcccccgacgccaggctctctgggactccccggatcagggcatgggagcagcggcccagcccctcccccggcgtccccatcccatccacacagactccccctccaaccgctcggatttcttagttttcttgtttcttcacctgtctgggagaagaaacagaaaaggaggagacagagaaaaagacatgcagacaagggcgttgggggtggttaagagcgcccaggtcttccccctgccatctctaggccaa

SEQ ID NO: 192278 - DNA, 729 bp, Homo Sapiens
actttgtacaaaaaagttgggaccgtcgcgcccctgccccatcgtagtatatgagctcgcctacacaaggacccgcgctaaaagccagagctcccagtccccgaggcttgaagacggggactcccttctccaccaactctgtcctcggggggtggggccccagccgagatcacagcgcgacaggagtgggggtggccgctggagacaggtgaagaaacaagaaaactaagaaatccgagcggttggagggggagtctgtgtggatgggatggggacgccgggggaggggctgggccgctgctcccatgccctgatccggggagtcccagagagcctggcgtcgggggaaggtgcgggggctggccttcccgctctggatctggccaaagctcaaagggagcacggggtgctgggaggtaaactgaggcaacgactggggctacagctgctagaactgccacctgaggagtcattgccgctgggaccgctgcttggcgacacggccgtgatccaaggggacacggccctaatcacgcggccctggagccccgctcgtaggccagaggtcgatggagtccgcaaagccctgcaagacctggggctccgaattgtggaaataggagacgagaacgcgacgctggatggcactgacgttctcttcaccggccgggagtttttcgtaggcctctccaaatggacccaatcaccgaggagctgaaatcgtggcgg

SEQ ID NO: 192279 - DNA, 2092 bp, Homo Sapiens; identical to SEQ ID NO: 184780
  misc_feature (1249)..(1257): n is a, c, g, or t
  misc_feature (1828)..(1844): n is a, c, g, or t

SEQ ID NO: 192280 - DNA, 896 bp, Homo Sapiens
gggcggccgctcactccctttctcctcctcctcttcctcttcagtctccaacgactctgcccccgatggtcctcgtgggttgggttgttttgggggggttgtgctgggggggagggggttcaaatatttattgtattttttgtttgtggcagcaactcaacagattctgctgctgggaagggcctcagcgttcctgaagagagatgtaggggacccactggttgttgccccggctttcttcgcagtagctggccacctccaccaagccgtggctcttccaggcgtccgtgtgagggttcgtgaccaggagacaatgcaggtctcgggcctcggtggtgccctgggtctcggccggctctcccaggagctgcgccaggcgctgcatgcccgacacccgcacgatgttgatgtcgttgtcacagcagaaggactggatgagcgtgaagtggatttgcagggcgatgtcatcctcctcctcctcgtcaatggccaagaggcagaggaccacgctgtctgggtccacattcatcaacttggccgactcgtacacccccactgtgaggcgatcctggcgctgagcggccaccaaaagctcctccaccgcggcggtcaccgtctgcatcttctgcgccgcgttgtcgcacgccacgagctcttccagcgtcatgttgcaattataatccacagtggatgcggctccacggcagtccccagggagaaattgcaaaatccgagccagagagcccaaaaccttcccacagagctagagcgctcgtccaagaccttcgggaagcagcgaaatccttccagaaaaggcggaaaaatatattgcaaagtccttggcgaggataatccaggaagttgcgccaaccaacggtagtccgacgcttcgccaa

SEQ ID NO: 192281 - DNA, 1221 bp, Homo Sapiens; identical to SEQ ID NO: 184782
  misc_feature (377)..(421): n is a, c, g, or t

SEQ ID NO: 192282 - DNA, 1229 bp, Homo Sapiens; identical to SEQ ID NO: 184785

SEQ ID NO: 192283 - DNA, 770 bp, Homo Sapiens
ctttgtacaaaaaagttgggagtgtccttgcaggggccggagtaggagcactggggtgggggtggaattggggttactcgatgtaagggattccttgttgttgtgttgagatccagtgcagttgtgatttctgtggatcccagcttggttccaggaattttgtgtgattggcttaaatccagttttcaatcttcgacagctgggctggaacgtgaactcagtagctgaacctgtctgacccggtcacgttcttggatcctcagaactctttgctcttgtcggggtgggggtgggaactcacgtggggagcggtggctgagaaaatgtttggattctggaatacatattccatgggactttccttccctctcctgcttcctcttttcctgctccctaacctttcgccgaatggggcagcaccactgacgtttctgggcggccagtgcggctgccaggttcctgtactactgccttgtacttttcattttggctcaccgtggattttctcataggaagtttggtcagagtgaattgaatattgtaagtcagccactgggacccgaggatttctgggaccccgcagttgggaggaggaagtagtccagccttccaggtggcgtgagaggcaatgactcgttacctgccgcccatcaccttggaggccttccctggccttgagtagaaaaagtcggggatcggggcaagagaggctgagtaccgatgggaaactattgtgcacaagtctttccagaggagtttcttaatgaaat

SEQ ID NO: 192284 - DNA, 899 bp, Homo Sapiens
ttgggtttttgaaggctttagttctgctttctgcctctcctccacagccccaacctcccacccctgatacatggaggtctcctgctaggcggcctgcccagctgccgcccccggactctgatctctgtagtggccccctcctccccggccccttttcgccccctgcctgccatactgcgcctaactcggtattaatccaaagcttattttgtaagagtgagctctggtggagacaaatgaggtctattacgtgggtgccctctccaaaggcggggtggcggtggaccaaaggaaggaagcaagcatctccgcatcgcatcctcttccattaaccagtggccggttgccactctcctcccctccctcagagacaccaaactgccaaaaacaagacgcgtagcagcacacacttcacaaagccaagcctaggccgccctgagcatcctggttcaaacgggtgcctggtcagaaggccagccgcccacttcccgtttcctctttaactgaggagaagctgatccagtttccggaaacaaaatccttttctcatttggggaggggggtaatagtgacatgcaggcacctcttttaaacaggcaaaacaggaagggggaaaaggtgggattcatgtcgaggctagaggcatttggaacaacaaatctacgtagttaacttgaagaaaccgatttttaaagttggtgcatctagaaagctttgaatgcagaagcaaacaagcttgatttttctagcatcctcttaatgtgcagcaaaagcaggcgacaaaatctcctggctttacagacaaaaatatttcagcaaacgttggggcatcatggtttttgaaggctttagttctgctttctgcctctcctccacagccccaaacctcccacccctga

SEQ ID NO: 192285 - DNA, 1461 bp, Homo Sapiens
ttggtcccagctggtgctgaagctcgtcagttcaccatccgccctcggcttccgcggggcgctgggccgccagcctcggcaccgtcctttcctttctccctcgcgttaggcaggtgacagcagggacatgtctcgggagatgcaggatgtagacctcgctgaggtgaagcctttggtggagaaaggggagaccatcaccggcctcctgcaagagtttgatgtccaggagcaggacatcgagactttacatggctctgttcacgtcacgctgtgtgggactcccaagggaaaccggcctgtcatcctcacctaccatgacatcggcatgaaccacaaaacctgctacaaccccctcttcaactacgaggacatgcaggagatcacccagcactttgccgtctgccacgtggacgcccctggccagcaggacggcgcagcctccttccccgcagggtacatgtacccctccatggatcagctggctgaaatgcttcctggagtccttcaacagtttgggctgaaaagcattattggcatgggaacaggagcaggcgcctacatcctaactcgatttgctctaaacaaccctgagatggtggagggccttgtccttatcaacgtgaacccttgtgcggaaggctggatggactgggccgcctccaagatctcaggatggacccaagctctgccggacatggtggtgtcccacctttttgggaaggaagaaatgcagagtaacgtggaagtggtccacacctaccgccagcacattgtgaatgacatgaaccccggcaacctgcacctgttcatcaatgcctacaacagccggcgcgacctggagattgagcgaccaatgccgggaacccacacagtcaccctgcagtgccctgctctgttggtggttggggacagctcgcctgcagtggatgccgtggtggagtgcaactcaaaattggacccaacaaagaccactctcctcaagatggcggactgtggcggcctcccgcagatctcccagccggccaagctcgctgaggccttcaagtacttcgtgcagggcatgggatacatgccctcggctagcatgacccgcctgatgcggtcccgcacagcctctggttccagcgtcacttctctggatggcacccgcagccgctcccacaccagcgagggcacccgaagccgctcccacaccagcgagggcacccgcagccgctcgcacaccagcgagggggcccacctggacatcacccccaactcgggtgctgctgggaacagcgccgggcccaagtccatggaggtctcctgctagcggcctgcccagctgccgcccccggactctgatctctgtagtggccccctcctccccggccccttttcgcccctgcctgccatactgcgcctaactcggtattaatccaaagcttattttgtaagagtgagctctggtggagacaaatg

SEQ ID NO: 192286 - DNA, 1544 bp, Homo Sapiens; identical to SEQ ID NO: 180410

SEQ ID NO: 192287 - DNA, 1009 bp, Homo Sapiens
actttgtacaaaaaagttggcttttaaacaggcaaaacaggaagggggaaaaggtgggattcatgtcgaggctagaggcatttggaacaacaaatctacgtagttaacttgaagaaaccgatttttaaagttggtgcatctagaaagctttgaatgcagaagcaaacaagcttgatttttctagcatcctcttaatgtgcagcaaaagcaggcaacaaaatctcctggctttacagacaaaaatatttcagcaaacgttgggcatcatggtttttgaaggctttagttctgctttctgcctctcctccacagccccaacctcccacccctgatacatgagccagtgattattcttgttcagggagaagatcatttagatttgttttgcattccttagaatggagggcaacattccacagctgccctggctgtgatgagtgtccttgcaggggccggagtaggagcactggggtgggggcggaattggggttactcgatgtaagggattccttgttgttgtgttgagatccagtgcagttgtgatttctgtggatcccagcttggttccaggaattttgtgtgattggcttaaatccagttttcaatcttcgacagctgggctggaacgtgaactcagtagctgaacctgtctgacccggtcacgttcttggatcctcagaactctttgctcttgtcggggtgggggtgggaactcacgtggggagcggtggctgagaaaatgtaaggattctggaatacatattccatgggactttccttccctctcctgcttcctcttttcctgctccctaacctttcgccgaatggggcagcaccactgacgtttctgggcggccagtgcggctgccaggttcctgtactactgccttgtacttttcattttggctcaccgtggattttctcataagaagtttggtcagagtgaattgaatatttgtaagtcagccactgggaaccgaggatttctgggaccccgcagttggggagg

SEQ ID NO: 192288 - DNA, 1192 bp, Homo Sapiens; identical to SEQ ID NO: 184787

SEQ ID NO: 192289 - DNA, 1048 bp, Homo Sapiens
ttggctaatttcataagtttaacaaaattaaaagttttgtttgactacattattctttgtatttaggtacctagtagaactgggttgtatcaagccgctctgtgatctcctcacggtcatggactctaagattgtacaggttgccctaaatggcttggaaaatatcctgaggcttggagaacaggaagccaaaaggaatggcactggcattaacccttactgtgctttgattgaagaagcttatggtctggataaaattgagttcttacagagtcatgaaaaccaggagatctaccaaaaggcctttgatcttattgagcattacttcgggaccgaagatgaagacagcagcattgcaccccaggttgaccttaaccagcagcagtacatcttccaacagtgtgaggctcctatggaaggtttccagctttgaagcaatactctgctttcacgttcctgtgtcagaccaggctacccagtcgagtcctcttgtggagcccacagtcctcatggagctaacttctcaaatgttttccataatactgtttgcgctcatttgcttgccttgcgcacctgctctcttacacacatctggaaaacctccggctctctgtggtggaatacccttctaataaaagggtaaccagaacggcccactctcttttacggaaaaatccctaggctttggagatccgcacttacattagagttatgggaatatacacatattaatgtggctccctttttcttgtgggggaataaaagaggactcctcctcattccctttaacatgggggaaaaaactgacattaaaagatgagactaaatctttatcttgaattttacacaactacttacgacaagggagatgtttacacctgttgtgtatacttcagagtacttttcatgagttcttccacagtgaacccttggattacctggtggctttttctagccagatttgcattaatccttactgagattggatggttttctttcctctattggcgcccttcttccaatattaaagttaaaaccatccactccc

SEQ ID NO: 192290 - DNA, 2172 bp, Homo Sapiens; identical to SEQ ID NO: 184789

SEQ ID NO: 192291 - DNA, 926 bp, Homo Sapiens; identical to SEQ ID NO: 184791

SEQ ID NO: 192292 - DNA, 3863 bp, Homo Sapiens; identical to SEQ ID NO: 184793
  misc_feature (3399)..(3484): n is a, c, g, or t

SEQ ID NO: 192293 - DNA, 965 bp, Homo Sapiens
  misc_feature (247)..(267): n is a, c, g, or t
ttggggagaggggagcatctggcaaggggcccatttctcagcacagtacatttcctgtctcagctctggaagactatgcacccaagcaccaaacttccaaccagagagagagacgtcctccgataacaaaaatccttgcttcctctgtctgtgactttacacacagttgttcaaagttgttaaatgtcaagagtcaatcacatccctaggacatacctcccaactctcctgactcttatgttattgnnnnnnnnnnnnnnnnnnnnntcctttatgatgatattcaacttgagtggggttttttttccactttggtcctggatataatgaaatgatacatattaggataaattttcactgtgtatagtagcaatacgaacacacatgccaatgtatcaacatatctacttggttacattttggtttatgataattaaccttgattcatgtattgggaagctacagggactacgtaatacctgcttatcacataggaaaattatgtccatgattctgagctcccttcttcaaaagtttcctcctgggtgttctatgttctctctttatcctgaaatacatttattaggttgtgaggtatgttgaagaagtagaagccaggggtatgctttcagcatttattgcaaccaaaagttaaccccatcacggttaacgagcatctttggtctcttgtggaatttgaactaaaactatgagccttattcaatatctataattctatgatttttttaaattatgggaaattaatgaaagatgtttacatgaataatgtttgcccttactgtgttatgaatgagttttttgtagtgtgtctgggtgcatgatgcaagagagtaggaaaaatgtttctgaaacaaaacttgacaaatatttgtaatgaaagtaaatttaaagattgctataattgcgctatagaaacaatgcaagtattaaacaaaatatacaat

SEQ ID NO: 192294 - DNA, 919 bp, Homo Sapiens; identical to SEQ ID NO: 184796

SEQ ID NO: 192295 - DNA, 933 bp, Homo Sapiens
ttggcgctgctcttctaagatggctgccgctaccggtgcggtggcagcctcggccgcctcgggtcaggcggaagggaaaaagatcaccgatctgcgggtcatcgatctgaagtccgagctgaagcggcggaacttagacatcaccggagtcaagaccgtgctcatctcccgactcaagcaggctattgaagaggaaggaggcgatccagataatattgaattaactgtttcaactgatactccaaacaagaaaccaactaaaggcaaaggtaaaaaacatgaagcagatgagttgagtggagatgcttctgtggaagatgatgcttttatcaaggactgtgaattggagaatcaagaggcacatgagcaagatggaaatgatgaactaaaggactctgaagaatttggtgaaaatgaagaagaaaatgtgcattccaaggagttactctctgcagaagaaaacaagagagctcatgaattaatagaggcagaaggaatagaagatatagaaaaagaggacatcgaaagtcaggaaattgaagctcaagaaggtgaagatgatacctttctaacagcccaagatggtgaggaagaagaaaatgagaaagatatagcaggttctggtgatggtacacaagaagtatctaaacctcttccttcagaagggagcctagctgaggctgatcacacagctcatgaagagatggaagctcatacgactgtgaaagaagctgaggatgacaacatctcggtcacaatccaggctgaagatgccatcactctggattttgatggtgatgacctcctagaaacaggtaaaaatgtgaaaattacagattctgaagcaagtaagccaaaagatgggcaggacgccattgcacagagcccggagaagaaagcaaggattatgagatgaatgcgaaccataaagat

SEQ ID NO: 192296 - DNA, 1799 bp, Homo Sapiens; identical to SEQ ID NO: 184798

SEQ ID NO: 192297 - DNA, 1159 bp, Homo Sapiens; identical to SEQ ID NO: 184799

SEQ ID NO: 192298 - DNA, 2117 bp, Homo Sapiens; identical to SEQ ID NO: 184801
  misc_feature (1433)..(1444): n is a, c, g, or t

SEQ ID NO: 192299 - DNA, 1210 bp, Homo Sapiens
  misc_feature (910)..(921): n is a, c, g, or t
ttggctcggcctttctgtgttcctggcccgcggccgtcgggggtgagctgcgccgaccgctctgagggttcgtggcccaccgctccttcgcggtccctgccgccaccgtccacgctcagcgttgtagagaagatggtgggtcggaacagcgccatcgccgccggtgtatgcggggcccttttcattgggtactgcatctacttcgaccgcaaaagacgaagtgaccccaacttcaagaacaggcttcgagaacgaagaaagaaacagaagcttgccaaggagagagctgggctttccaagttacctgaccttaaagatgctgaagctgttcagaagttcttccttgaagaaatacagcttggtgaagagttactagctcaaggtgaatatgagaagggcgtagaccatctgacaaatgcaattgctgtgtgtggacagccacagcagttactgcaggtcttacagcaaactcttccaccaccagtgttccagatgcttctgactaagctcccaacaattagtcagagaattgtaagtgctcagagcttggctgaagatgatgtggaatgagaaacaaatgtcaacataataaaatctcagttaaaaatattttaaaaattcttggtagttgagcagctctgggggaataagggcaaatatgcttgttatgaactacactgaaatctaccaaagttaatgtttactttgtgtagatccatttgtctattttatttatttttcccagtgaaaagtgtattttgatagagaacttttcattctataaatacactatgagttactaaaatatcatggattttgtttattcctgaaacatagttacatagttaaactgtacatatgacatggcttatgttaaaaatacccagtgctcagttttgaaagataggcnnnnnnnnnnnngtataggagaaactgaagaatgtacacttttttagagggcacattttgctgtaaatctggaaatttgatagacttgactgtgtttgtgaaaactgagcattaaaggttttgattgatcctttctttccatttaatctctgagacgtaaatatgtgaggtgtgctgctgtgctgggttaacagcttccttccctttctgtgtagcagtcttgaaatgttctgtttaaatcagtaggcttaatgtgttctgggtatttatctccttgtattttaaatatatgtagttgcaa

SEQ ID NO: 192300 - DNA, 2338 bp, Homo Sapiens; identical to SEQ ID NO: 184802
  misc_feature (115)..(126): n is a, c, g, or t

SEQ ID NO: 192301 - DNA, 1079 bp, Homo Sapiens
  misc_feature (909)..(968): n is a, c, g, or t
tttgtacaaaaaagttggcttaaacagtgcttttttgttacacaggagggcttttttggggggatgaccagtacagacatgccagttagttttactagtgggatcccaaatccaaagcagtgtagtggtgattggtcagtgactaaccaggcagctaagaagtcttaggcagcagcccagacatgtatagaggggcagttagagggagaacaggggtgggaaagggagcaaggggcagatagctcagcaaggaaagaatgggctcagaaaaaggagggctggctggaggagtgaggggcagcttaagtttggggagggtagaaacgccgtttccttgggaactggagtgcagtatgagctgggtgtcacttggctctgaacatactggctttgctgtaatgcttgaaaaggcgttggtatcttcattttacagttcattaacccaagtacgttttcttatttaaatgacaactttggtgctttaaaatgaggtaccactttttaaagctagctgtgtcgagttaaagaaaaaatcagcagttttttctcccagaaatgtaattgccaaacactattcatccccatcttaagttttacaaggtgatgtaatcagcttgttgtagtgatgctggccaaatggtgctcagcaggtgagaacaaaaaaaccccagatttcagtgaactaatacacagcttgagcgtttccatgtgctaatgttgcacacttactaaaaaactttggaaatggaaaataatgtattagtgcaacagttgatgtgcttctttgggcaaagatatagttttgttccacaatttgtacttaaaagcgaaagaacattgaaaacatagacttactggctgtagcaatgctggcctgttaactgataactaaaacttaggttcacgttnnnnnnnnnnnnnnnnnnnnnnnnnnnnnnnnnnnnnnnnnnnnnnnnnnnnnnnnnnnntccttttgccccttggtaagtttattttaccatcctcccacctgcctttctgactttattaaatcaacatgtggaccacagtgttaatgagatgttattgcagaagagatt

SEQ ID NO: 192302 - DNA, 645 bp, Homo Sapiens
  misc_feature (360)..(419): n is a, c, g, or t
  misc_feature (528)..(567): n is a, c, g, or t
gatgagcaatgctttttctataatagccaactttgtacaaaaaagttggaggtgatgtaatcagcttgttgtagtgatgctggccaaatggtgctcagcaggtgagaacgaaaaaaccccagatttcagtgaactaatacacagcttgagcgtttccatgtgctaatgttgcacacttactaaaaaactttggaaatggaaaataatgtattagtgcaacagttgatgtgcttctttgggcaaagatatagttttgttccacaatttgtacttaaaagcgaaagaacattgaaaacatagacttactggctgtagcaatgctggcctgttaactgataactagaacttaggttcacgttnnnnnnnnnnnnnnnnnnnnnnnnnnnnnnnnnnnnnnnnnnnnnnnnnnnnnnnnnnnntccttttgccccttggtaagtttattttaccatcctcccacctgccattctgactttattaaatcaacatgtggaccagagtgttaatgagatgttattgcagaagagnnnnnnnnnnnnnnnnnnnnnnnnnnnnnnnnnnnnnnnnctttttgtaacgtaaaaaatgcagttttattattgcttgtgcctcaactgtttaagtgaatattaaagggcttggaga

SEQ ID NO: 192303 - DNA, 823 bp, Homo Sapiens
tcacagccccagggccccgatcacgggccgggcctcgggagcaggggtgctcagcaagggggcaggcccggccggctggtgctgcggggatgttgggtccgcgggggcgggagccgggtcggcgggtgcgcgcatgcgcagagcttcgggcgggaaggccacgttggtgcagaagaggccgagcagcagctggcgctggcactcctcccacttggccagcgcgtcccccagcgagaggttgttgcgcatccagccgggcagtgcctctctgtaggcggcgcaggacagcggcacggacggcagcgactggacgcggcgcagctccacctgctccggcagcctggagggcaggtgcctgcccagcttcctcttggcgcgcatcaccaggtactggcagatgctgcccgtctgctccttcatccaccggatgtcctcgggaacgtcgggcagccactccagcaagcggatggtgaaggacagagcgctctccagcggcagcgtgtagggcaccatcatggccgtggccagacgcacaggcagcatgttggagagggtggtcagcaggtccgtgggctccacgcaggcctccagcagggcctcattgagccgggcgggcaggtgctccaggatgtgatcttctccgggcagctgcgagtaatcctccgcttgggcgctctccactgcctggtccttgtcctctgggccgtgggggcgggcgggggacaacgccagcaaggggttgggccggttcaggaggccgttccgctgcagaaagcgcaggccatctctcttgtagccctgcttgccaacttttttgtacaaa

SEQ ID NO: 192304 - DNA, 1609 bp, Homo Sapiens; identical to SEQ ID NO: 180414

SEQ ID NO: 192305 - DNA, 941 bp, Homo Sapiens; identical to SEQ ID NO: 180416
  misc_feature (43)..(62): n is a, c, g, or t

SEQ ID NO: 192306 - DNA, 882 bp, Homo Sapiens
ttggcaagatggcggcgcaacagcgggactgcgggggtgctgcgcagctggcggggccggcggcggaggctgaccccctaggacgcttcacgtgtcccgtgtgcttagaggtgtacgagaagccggtacaggtgccctgcggacacgtcttttgctctgcatgcctgcaggaatgtctgaagccgaagaagcctgtctgtggggtgtgtcgcagcgctctggcacctggcgtccgagccgtggagctcgagcggcagatcgagagcacagagacttcttgccatggctgccgtaagaatttcttcctgtccaagatccggtcccacgtggctacttgttccaaataccagaattacatcatggaaggtgtgaaggccaccattaaggatgcatctcttcagccaaggaatgttccaaaccgttacacctttccttgtccttactgtcctgagaagaactttgatcaggaaggacttgtggaacactgcaaattattccatagcacggataccaaatctgtggtttgtccgatatgtgcctcgatgccctggggagaccccaactaccgcagcgccaacttcagagagcacatccagcgccggcaccggttttcttatgacacttttgtggattatgatgttgatgaagaggacatgatgaatcaggtgttgcagcgctccatcatcgaccagtgagcagagtccgtgcttgctatctgtctcatgttacagagcttccattacatattaaacgtgaaatctatgactcctgtaccttacctgttcaacagacctgaaaatgagccatggcattgggacagggtcacttctgacacgggaagtgggtccccaggtcagcccttctcttccctttgggctcttg

SEQ ID NO: 192307 - DNA, 1123 bp, Homo Sapiens
actttgtacaaaaaagtagggttttaaagaatgccatagatgttgattcttaactgctacagataacctgtaattgagcagatttaaaattcaggcatacttttccatttatccaagtgctttcatttttccagatggcttcagaagtaggctcgtgggcagggcgcagacctgatctttctagggttgacatagaaagcagtagttgtgggtgaaagggcaggttgtcttcaaactctgtgaggtagaatcctttgtctatacctccatgaacattgactcgtgtgttcagagcctttggcctctctgtggagtctggctctctggctcctgtgcattctttgaatagtcactcgtaaaaactgtcagtgcttgaaactgtttcctttactcatgttgaagggactttgttggcttttagagtgttggtcatgactccaagagcagagcagggaagagcccaagcatagacttggtgccgtggtgatggctgcagtccagttttgtgatgctgcttttacgtgtccctcgataacagtcagctagacacactcaggaggactactgaggctctgcgaccttcaggagctgagcctgcctctctcctttagatgacagaccttcatctgggaacgtgctgagccagcaccctcagatgatttccctccaaactgctgactaggtcatcctctgtctggtagagacattcacatctttgcttttattctgtgctctctgtacttttgaccaaaaattgaccaaagtaagaaaatgcaagttctaaaaatagactaaggatgcctttgcagaacaccaaagcatcccaaggaactggtagggaagtggcgcctgtctcctggagtggaagaggcctgctccctggctctgggtctgctgggggcacagtaaatcagtcttggcacccacatccagggcagagaggtctgtggttctcagcatcagaaggcagcgcagcccctctcctcttcaagctacagggttgtcacctgctgagtcctcaggttgtttggcctctctggtccatcttgggcattaggttctccagcagagctctggccagctgcctcttctttaactgggaacacaggctctcacaagatca

SEQ ID NO: 192308 - DNA, 1362 bp, Homo Sapiens
ctttgtacaaaaaagttggctctctggcctgtgcattctttgaatagtcactcgtaaaaactgtcagtgcttgaaactgtttcctttactcatgttgaagggactttgttggcttttagagtgttggtcatgactccaagagcagagcagggaagagcccaagcatagacttggtgccgtggtgatggctgcagtccagttttgtgatgctgcttttacgtgtccctcgataacagtcagctagacacactcaggaggactactgaggctctgcgaccttcaggagctgagcctgcctctctcctttagatgacagaccttcatctgggaacgtgctgagccagcaccctcagatgatttccctccaaactgctgactaggtcatcctctgtctggtagagacattcacatctttgcttttattctgtgctctctgtacttttgaccaaaaattgaccaaagtaagaaaatgcaagttctaaaaatagactaaggatgcctttgcagaacaccaaagcatcccaaggaactggtagggaagtggcgcctgtctcctggagtggaagaggcctgctccctggctctgggtctgctgggggcacagtaaatcagtcttggcacccacatccagggcagagaggtctgtggttctcagcatcagaaggcagcgcagcccctctcctcttcaggctacagggttgtcacctgctgagtcctcaggttgtttggcctctctggtccatcttgggcattaggttctccagcagagctctggccagctgcctcttctttaactgggaacacaggctctcacaagatcagaacccccactcacccccaagatcttatctagcaagcctgtagtattcagtttctgttgtaggaagagagcgaggcatccctgaattccacgcatctgctggaaacgagccgtgtcagatcgcacatccctgcgcccccatgcccccatgcccctctgagtcacacaggacagaggaggcagagcttctgcccactgttatcttcactttctttgtccagtcttttgtttttaataagcagtgaccctccctactcttctttttaatgatttttgtagttgatttgtctgaactgtggctactgtgcattccttgaataatcacttgtaaaaattgtcagtgcttgaagctgtttcctttactcacattgaagggacttcgttggttttttggagtcttggttgtgactccaagagcagagtgaggaagacccccaagcatagactcgggtactgtgatgatggctgcagtccagttttatgattctgcttttatgtgtcccttgataacagtgacttaacaatatacattcctcataaat

SEQ ID NO: 192309 - DNA, 2337 bp, Homo Sapiens; identical to SEQ ID NO: 184806
  misc_feature (501)..(530): n is a, c, g, or t

SEQ ID NO: 192310 - DNA, 1905 bp, Homo Sapiens; identical to SEQ ID NO: 184807
  misc_feature (57)..(84): n is a, c, g, or t

SEQ ID NO: 192311 - DNA, 3375 bp, Homo Sapiens; identical to SEQ ID NO: 184809

SEQ ID NO: 192312 - DNA, 1046 bp, Homo Sapiens; identical to SEQ ID NO: 184810

SEQ ID NO: 192313 - DNA, 559 bp, Homo Sapiens
  misc_feature (497)..(506): n is a, c, g, or t
tgtacaaagaagaaagctttgcggttgtggctatgtggtgcctgaggtggtgccaccctgtggcctgatgtctgtcctgtgttgcagcagcagcagtgagcggggttcccggagaggccagcgtggggacagccgctcccccagccacaagcgcaggagggagacacctagccctcggcccatgagacaccgctcctccaggtgcgtgtcctggaaggctgatgcccccttccgggagccagttgtggtggtgggtggcggccccattttgggagtggcccagaaactggccttgagggctggggtgggaactccctgttgacccatatcttctcttgcaggtctccataaattgtctttggggtattccaccacacccaatgctctggagccacaaggagtgtcccttcttccccagcagagccgtgggagggtccttgtctgctctcctttgaaccttggcagcccttggatggagggctccctttccctccccnnnnnnnnnnctttgttcctgtgaaatgttaatctccgtgagttcttcctggttcatgtgttc

SEQ ID NO: 192314 - DNA, 1097 bp, Homo Sapiens; identical to SEQ ID NO: 180420
  misc_feature (80)..(89): n is a, c, g, or t

SEQ ID NO: 192315 - DNA, 873 bp, Homo Sapiens; identical to SEQ ID NO: 184811
  misc_feature (189)..(249): n is a, c, g, or t
  misc_feature (414)..(506): n is a, c, g, or t

SEQ ID NO: 192316 - DNA, 821 bp, Homo Sapiens; identical to SEQ ID NO: 184812
  misc_feature (709)..(718): n is a, c, g, or t

SEQ ID NO: 192317 - DNA, 772 bp, Homo Sapiens; identical to SEQ ID NO: 184813
  misc_feature (222)..(279): n is a, c, g, or t
  misc_feature (466)..(577): n is a, c, g, or t

SEQ ID NO: 192318 - DNA, 3476 bp, Homo Sapiens; identical to SEQ ID NO: 184814

SEQ ID NO: 192319 - DNA, 1009 bp, Homo Sapiens; identical to SEQ ID NO: 184815

SEQ ID NO: 192320 - DNA, 1427 bp, Homo Sapiens; identical to SEQ ID NO: 184818

SEQ ID NO: 192321 - DNA, 960 bp, Homo Sapiens; identical to SEQ ID NO: 184820

SEQ ID NO: 192322 - DNA, 924 bp, Homo Sapiens; identical to SEQ ID NO: 184821

SEQ ID NO: 192323 - DNA, 1613 bp, Homo Sapiens; identical to SEQ ID NO: 184822

SEQ ID NO: 192324 - DNA, 1295 bp, Homo Sapiens; identical to SEQ ID NO: 184826

SEQ ID NO: 192325 - DNA, 2619 bp, Homo Sapiens; identical to SEQ ID NO: 180423

SEQ ID NO: 192326 - DNA, 1248 bp, Homo Sapiens; identical to SEQ ID NO: 184832
  misc_feature (125)..(143): n is a, c, g, or t

SEQ ID NO: 192327 - DNA, 604 bp, Homo Sapiens; identical to SEQ ID NO: 180424

SEQ ID NO: 192328 - DNA, 1128 bp, Homo Sapiens
ttggctgcccttctttgttgactgaggaaagctcgctccctgcccaggtttttcattgttgatcgaaattaacaccaggtggtgaatagagcccctcctaaggttgctcaggataaatcatttattaaataggtctgcttatcaggaggggcgtgaaggctcccaaaaggaaatgctggcacctgggcccagaagccagggcctctaactcctggggttgatttcttcagtgaagttgcaccctacaaagggaatatggccaaagcggcactcaactgaaggctgatatcaggcgattagacagccatgcattctgcgtttgtctggaatggattgtagagagatggacttatatgaggactaccagtccccgtttgattttgatgcaggagtgaacaaaagctatctctacttgtctcctagtggaaattcatctccacccggatcacctactcttcagaaatttggtctgctgagaacagacccagtccctgaggaaggagaagatgttgctgccacgatcagtgccacagagaccctctcggaagaggagcaggaagagctaagaagagaacttgcaaaggtagaagaagaaatccagactctgtctcaagtgttagcagcaaaagagaagcatctagcagagatcaagcggaaacttggaatcaattctctacaggaactaaaacagaacattgccaaagggtggcaagacgtgacagcaacatctgcttacaagaagacatctgaaaccttatcccaggctggacagaaggcctcagctgctttttcgtctgttggctcagtcatcaccaaaaagctggaagatgtaaaaaactccccaacttttaaatcatttgaagaaaaggtcgaaaacttaaagtctaaagtaggggaaccaagcctgctggtggtgattttggagaagtcttgaattcggctgcaaatgctagtgccaccaccacggagcctcttccagaaaagacacaggagagcctgtgagattcctacctttgttctgctacccactgccagatgctgcaagcgaggtccaagcacatcttgtccacatgcattgccatgatttctaccagatgtgcttttattttagctttactattcctttga

SEQ ID NO: 192329 - DNA, 2179 bp, Homo Sapiens; identical to SEQ ID NO: 184836
  misc_feature (1908)..(1969): n is a, c, g, or t

SEQ ID NO: 192330 - DNA, 1009 bp, Homo Sapiens
actttgtacaaaaaagttgggggacattccctataatgatctaagaagctacagattgtcatagttgttttcctgctttacaaaattgctccagatctggaatgccagtttgacctttgtcttctataatatttcctttttttcgcctctttgaatctctgtatatttgattcttaactaaaattgttctcttaaatattctgaatcctggtaattaaaagtttgggtgtattttctttacctccaaggaaagaactactagctacaaaaaatattttggaataagcattgttttggtataaggtacatattttggttgaagacaccagactgaagtaaacagctgtgcatccaatttattatagttttgtaagtaacaatatgtaatcaaacttctaggtgacttgagagtggaacctcctatatcattatttagcaccgtttgtgacagtaaccatttcagtgtattgtttattataccacttatatcaacttatttttcaccaggttaaaattttaatttctacaaaataacattctgaatcaagcacactgtatgttcagtaggttgaactatgaacactgtcatcaatgttcagttcaaaagcctgaaagtttagatctagaagctggtaaaaatgacaatatcaatcacattaggggaaccattgttgtcttcacttaatccatttagcactatttaaaataagcacaccaagttatatgactaataactcttgaggatgtaatgcattaataaaaatcaactcatcattttctacttgttttcaatgtgttggaaactgtaaaatgatactgtagaacctgtctcctactttgaaaactgaatgtcagggctgagtgaatcaaagtgtctagacatatttgcatagaggccaaggtattctattctaataactgcttactcaacactaccaccttatccttatactgtatatgattatggcctacaatgttgtatttgttatttattaaattgtgattgttt

SEQ ID NO: 192331 - DNA, 1114 bp, Homo Sapiens
cataaagaacaactttgtacaaaaaagttggcttaaatattcccgaatcctggtaattaaaagtttgggtgtattttctttacctccaaggaaagaactactagctacaaaaaatattttggaataagcattgttttggtataaggtacatattttggttgaagacaccagactgaagtaaacagctgtgcatccaatttattatagttttgtaagtaacaatatgtaatcaaacttctaggtgacttgagagtggaacctcctatatcattatttagcaccgtttgtgacagtaaccatttcagtgtattgtttattataccacttatatcaacttatttttcaccaggttaaaattttaatttctacaaaataacattctgaatcaagcacactgtatgttcagtaggttgaactatgaacactgtcatcaatgttcagttcaaaagcctgaaagtttagatctagaagctggtaaaaatgacaatatcaatcacattaggggaaccattgttgtcttcacttaatccatttagcactatttaaaataagcacaccaagttatatgactaatataacttgaaaattttttatactgaggggttggtgataactcttgaggatgtaatgcattaataaaaatcaactcatcattttctacttgttttcaatgtgttggaaactgtaaaatgatactgtagaacctgtctcctactttgaaaactgaatgtcagggctgagtgaatcaaagtgtctagacatatttgcatagaggccaaggtattctattctaataactgcttactcaacactaccaccttttccttatactgtatatgattatggcctacaatgttgtatttgttatttattaaattgtgattgttttattattgtttatgccaaatgttaactgccaagcttggagtgacctaaagcattttttaaagcatggctagatttacttcagtataaattatcttatgaaaaccaaattttaaaagccacaggtgttgattgtttataaataacatgctgccattcttgattgctagaatttttgtaagtactttggagcaattaaaactatgtgctatcccatgtgaaaagctta

SEQ ID NO: 192332 - DNA, 551 bp, Homo Sapiens
ctttgtacaaaaaagttggcccgcagtactcactcataaaaaaagaactcccaaccccagggacaccgcctccccattttccggggcagagtggggacatcacagaggcccccagccctgtgccccgctggattgcactttgagcccgtggggtgaggagttggcaatttggatagacaggatttgggggttctgccataataggaggggaaaatcaccccccagccacctcggggaactccacaccaagggtgagggcgcctttccctcgagactgggtgtgaccagaggaaaaggaagtgcccaacatctcccaccctccccaggtgccccctttttctttgatgggtgcgttcccgcagaccaaagagagtgtgactcccttgccagctccagagtgggggggctgtcccagggggcaagaaggggtgtaagggcccattgacaaaatcattggggtttgtagtcccaacttgctgctgtcaccaccgaactcaatcatttttttcccttgtaaatgcccctcccccagctgctgccttcatattgaa

SEQ ID NO: 192333 - DNA, 1715 bp, Homo Sapiens; identical to SEQ ID NO: 184843
  misc_feature (1409)..(1440): n is a, c, g, or t

SEQ ID NO: 192334 - DNA, 1341 bp, Homo Sapiens; identical to SEQ ID NO: 184844
  misc_feature (114)..(145): n is a, c, g, or t

SEQ ID NO: 192335 - DNA, 1659 bp, Homo Sapiens; identical to SEQ ID NO: 184845
  misc_feature (1373)..(1417): n is a, c, g, or t

SEQ ID NO: 192336 - DNA, 922 bp, Homo Sapiens; identical to SEQ ID NO: 184846

SEQ ID NO: 192337 - DNA, 5761 bp, Homo Sapiens; identical to SEQ ID NO: 184849

SEQ ID NO: 192338 - DNA, 2297 bp, Homo Sapiens; identical to SEQ ID NO: 184850

SEQ ID NO: 192339 - DNA, 1455 bp, Homo Sapiens; identical to SEQ ID NO: 180428
  misc_feature (178)..(189): n is a, c, g, or t
  misc_feature (1151)..(1199): n is a, c, g, or t

SEQ ID NO: 192340 - DNA, 1467 bp, Homo Sapiens; identical to SEQ ID NO: 180429
  misc_feature (171)..(219): n is a, c, g, or t
  misc_feature (1181)..(1193): n is a, c, g, or t

SEQ ID NO: 192341 - DNA, 552 bp, Homo Sapiens; identical to SEQ ID NO: 180430
  misc_feature (405)..(453): n is a, c, g, or t

SEQ ID NO: 192342 - DNA, 2369 bp, Homo Sapiens; identical to SEQ ID NO: 184852

SEQ ID NO: 192343 - DNA, 2304 bp, Homo Sapiens; identical to SEQ ID NO: 184853
  misc_feature (1953)..(2009): n is a, c, g, or t

SEQ ID NO: 192344 - DNA, 856 bp, Homo Sapiens
actttgtacaaaaaagttggcgaaagcgtgtcgatattgtcatgaaccatcacctgcaggaaacaagtttcacaaaagaagcctacaagaagtacatcaaagattacatgaaatcaatcaaagggaaacttgaagaacagagaccagaaagagtaaaaccttttatgacaggggctgcagaacaaatcaagcacatccttgctaatttcaaaaactaccagttctttattggtgaaaacatgaatccagatggcatggttgctctattggactaccgtgaggatggtgtgaccccatatatgattttctttaaggatggtttagaaatggaaaaatgttaacaaatgtggcaattattttggatctatcacctgtcatcataactggcttctgcttgtcatccacacaacaccaggacttaagacaaatgggactgatgtcatcttgagctcttcatttattttgactgtgatttatttggagtggaggcattgtttttaagaaaaacatgtcatgtaggttgtctaaaaataaaatgcatttaaactcatttgagagaatgccttttagtttaatgcatatttaaactaaattgatcctgtagtgttcctggagaagctagagcctgattgtaggctactactcatcaattaacttctacagtggagactacttctgggactggaatataaaaaagaatcaaaaggttctgattttgagttgcaataaagggaaagaccatgctcatagcagtgcccacatctgaagtgtggagccttacccatttcatcacctacaatggaagtagttaactggaagagattacccagagataaaaagagactcattctgtgga

SEQ ID NO: 192345 - DNA, 1860 bp, Homo Sapiens; identical to SEQ ID NO: 180431
  misc_feature (166)..(195): n is a, c, g, or t
  misc_feature (1468)..(1513): n is a, c, g, or t

SEQ ID NO: 192346 - DNA, 712 bp, Homo Sapiens; identical to SEQ ID NO: 180432

SEQ ID NO: 192347 - DNA, 1051 bp, Homo Sapiens
gagcaatgcttttttataatggccaactttgtacaaaaaagttggtgcctccccccgagcgccgctccggctgcaccgcgctcgctccgagtttcaggctcgtgctaagctagcgccgtcgtcgtctcccttcagtcgccatcatgattatctaccgggacctcatcagccacgatgagatgttctccgacatctacaagatccgggagatcgcggacgggttgtgcctggaggtggaggggaagatggtcagtaggacagaaggtaacattgatgactcgctcattggtggaaatgcctccgctgaaggccccgagggcgaaggtaccgaaagcacagtaatcactggtgtcgatattgtcatgaaccatcacctgcaggaaacaagtttcacaaaagaagcctacaagaagtacatcaaagattacatgaaatcaatcaaagggaaacttgaagaacagagaccagaaagagtaaaaccttttatgacaggggctgcagaacaaatcaagcacatccttgctaatttcaaaaactaccagttctttattggtgaaaacatgaatccagatggcatggttgctctattggactaccgtgaggatggtgtgaccccatatatgattttctttaaggatggtttagaaatggaaaaatgttaacaaatgtggcaattattttggatctatcacctgtcatcataactggcttctgcttgtcatccacacaacaccaggacttaagacaaatgggactgatgtcatcttgagctcttcatttattttgactgtgatttatttggagtggaggcattgtttttaagaaaaacatgtcatgtaggttgtctaaaaataaaatgcatttaaactcatttgagagaatgccttttagtttaatgcatatttaaactaaattgatcctgtagtgttcctggagaagctagagcctgattgtaggctactactcatcaattaacttctacagtggagactacttctgggactggaatataaaaaagaatcaaaggttctgattttagttgcaataaagg

SEQ ID NO: 192348 - DNA, 646 bp, Homo Sapiens
ccaactttgtacaaaaaagttggaaacatgaatccagatggcatggttgctctattggactaccgtgaggatggtgtgaccccatatatgattttctttaaggatggtttagaaatggaaaaatgttaacaaatgtggcaattattttggatctatcacctgtcatcataactggcttctgcttgtcatccacacaacaccaggacttaagacaaatgggactgatgtcatcttgagctcttcatttattttgactgtgatttatttggagtggaggcattgtttttaagaaaaacatgtcatgtaggttgtctaaaaataaaatgcatttaaactcatttgagagaatgccttttagtttaatgcatatttaaactaaattgatcctgtagtgttcctggagaagctagagcctgattgtaggctactactcatcaattaacttctacagtggagactacttctgggactggaatataaaaaagaatcaaaggttctgattttgagttgcaataaagggaaagaccatgctcatagcagtgccaacatctgaagtgtggagccttacccatttcatcacctacaacggaagtagttaactggcagagattaccaagagaataaaaagagactcattcagtggaaa

SEQ ID NO: 192349 - DNA, 721 bp, Homo Sapiens
ttaaagccaactttgtacaaaaaagttggtgccattatctaccgggacctcatcagccacgatgagatgttctccgacatctacaagatccgggagatcgcggacgggttgtgcctggaggtggaggggaagatggtcagtaggacagaaggtaacattgatgactcgctcattggtggaaatgcctccgctgaaggccccgagggcgaaggtaccgaaagcacagtaatcactggtgtcgatattgtcatgaaccatcacctgcaggaaacaagtttcacaaaagaagcctacaagaagtacatcaaagattacatgaaatcaatcaaagggaaacttgaagaacagagaccagaaagagtaaaaccttttatgacaggggctgcagaacaaatcaagcacatccttgctaatttcaaaaactaccagttctttattggtgaaaacatgaatccagatggcatggttgctctattggactaccgtgaggatggtgtgaccccatatatgattttctttaaggatggtttagaaatggaaaaatgttaacaaatgtggcaattattttggatctatcacctgtcatcataactggcttctgcttgtcatccacacaacaccacgacttaagacaaatgggactgatgtcatcttgagctcttcatttattttgactgtgatttatttggagtggaggcattgtctttaagaaaaacatgtc

SEQ ID NO: 192350 - DNA, 1644 bp, Homo Sapiens; identical to SEQ ID NO: 184855

SEQ ID NO: 192351 - DNA, 1809 bp, Homo Sapiens; identical to SEQ ID NO: 184856

SEQ ID NO: 192352 - DNA, 879 bp, Homo Sapiens; identical to SEQ ID NO: 184858
  misc_feature (185)..(245): n is a, c, g, or t
  misc_feature (592)..(606): n is a, c, g, or t

SEQ ID NO: 192353 - DNA, 1216 bp, Homo Sapiens; identical to SEQ ID NO: 184859
  misc_feature (347)..(397): n is a, c, g, or t
  misc_feature (762)..(770): n is a, c, g, or t

SEQ ID NO: 192354 - DNA, 1340 bp, Homo Sapiens; identical to SEQ ID NO: 184861
  misc_feature (423)..(432): n is a, c, g, or t

SEQ ID NO: 192355 - DNA, 1030 bp, Homo Sapiens
  misc_feature (817)..(827): n is a, c, g, or t
ttggctcacagtaaagcctatttccccaggaaaaaaataaatgcctttgaatgaaaattctgaaattgtaaatgtctattttaatattcacctatgaaagaatctgtgaatatatgtaaatacgtttaataaattttattggtcatgttaaatcattgtaaaacttttttacattgcttaatgttttaagcttaatagcctttgcacttttaaaataaaaaccaagtatgcaaatcaaagatatttggtagtcaaaataagtaaaagaaatataggaatattccagtcaatctctgaaatgtttatgaaaaacaggttaatatgttgtatttttttccttgtatcaagatgcaaaacataatttgcaaaattttataattgaaataaaacttggtatgctgttttataataaattagcaatatactttaaaaaaaatccagtttctcctataacatgatgtaaattaaatattcaggaatatttcaggtctgaaatctgctgctgaacttgttagacatttttgaaaggaaaattaggttagcgtacaatttatcataaatatatgaggtaaaatttgcaaaactttccacagtactttcttgaattataatactgaatgttttctgttccgatagagaaaagtgaagcaaatatgtgaggaatgaagtgatctagtgcaagttggtaattccagctaatgggagagaatgtaaatgtgcaaaggtacatattaagcttagggatttttgaatttttacgtcagtttatattttaattcttactgtacttggcatgcgcaataaagcagcacatgtnnnnnnnnnnntacacagtgcaaggactttattataaaggttggatgtagttttccttagaaatttaggtgagagattttggccttttttattggataaattgggccagaaaggcagggtagatttcgaagcactggttctgttgaagtaagtttattaaggcttgggaacattaaagctaatttataaaagcaatactttttaatatgaaaac

SEQ ID NO: 192356 - DNA, 1112 bp, Homo Sapiens
ctttgtacaaaaaagttgggaaatggaagattctgttaaatactttgaataaacttggggggagggaaataaaattgcagaaaactgcagagcactaaaacttaaagaagggctacatctttatccagaaacctgttgctcttttgcacggaatgtttaaattcagagttgggatgggggttggggtgaagcacacttattatcttcagttgcagtgatttcaaatttaggattttttgttgttggtttgaactgtccccttagtttcttgttatttccaatttgttctgcttagtcattacttttaattcttttcttactaaaattttatggtggttgggggaagggagttagcatcactaacctgacagttgttgccaggaatttgctttgtttactgctagtatattagaaatcctagatctcagaatcacaatagtaataaacaacaggggtcattttttcctaacttactctgtgttcaggtgtggaatttctgtctcccaagaggaaatgtgacttcactttggtgccaatggacagaaaattctacctgtgctacataggagaagtttggaatgcacttaatagctggtttttacaccttgatttcgaggtggaaagaaattgatcatgaatctctaataaatttaaatctcttaaaccagtaggtgcttaatattttttgatttgattaatgcccatttaaatctcatgggttctattaaaaatatatatatatagggccccaatccattgccatcaaattgcccttggacttttccaaggtatattatggggttttatgcaaaattccaagctaccatgtaactttttttaaccatttaacaaggagggggaactgtttcctaccttctttacatgttgtgcattgttgtggtccagaaatgccaaacctttttaaagatggtgcaactttgagtccttggcttgactatacaggccttgaacttcatggcatatcaactttgccatatctgcggagagctgttctataaagaaatagctcagagttgcaaatatcacatgtgaatgatacggtaacctttaagaattgtctgtattggatttgaagactgtttgccctaaat

SEQ ID NO: 192357 - DNA, 2449 bp, Homo Sapiens; identical to SEQ ID NO: 184863

SEQ ID NO: 192358 - DNA, 1920 bp, Homo Sapiens; identical to SEQ ID NO: 184864

SEQ ID NO: 192359 - DNA, 1156 bp, Homo Sapiens
aactttgtacaaaaaagttggctcagaacaccaactgctgaggctgccttgggaagaggatgatcctaaacaaagctctgctgctgggggccctcgctctgaccaccgtgatgagcccctgtggaggtgaagacattgtggctgaccacgttgcctcttgtggtgtaaacttgtaccagttttacggtccctctggccagtacacccatgaatttgatggagatgagcagttctacgtggacctggagaggaaggagactgcctggcggtggcctgagttcagcaaatttggaggttttgacccgcagggtgcactgagaaacatggctgtggcaaaacacaacttgaacatcatgattaaacgctacaactctaccgctgctaccaatgaggttcctgaggtcacagtgttttccaagtctcccgtgacactgggtcagcccaacaccctcatttgtcttgtggacaacatctttcctcctgtggtcaacatcacatggctgagcaatgggcagtcagtcacagaaggtgtttctgagaccagcttcctctccaagagtgatcattccttcttcaagatcagttacctcaccttcctcccttctgctgatgagatttatgactgcaaggtggagcactggggcctggaccagcctcttctgaaacactgggagcctgagattccagcccctatgtcagagctcacagagactgtggtctgtgccctggggttgtctgtgggcctcatgggcattgtggtgggcactgtcttcatcatccaaggcctgcgttcagttggtgcttccagacaccaagggcccttgtgaatcccatcctggaagggaaggtgcatcgccatctacaggagcagaagaatggacttgctaaatgacctagcactattctctggcccgatttatcatatcccttttctcctccaaatgtttctcctctcaccttttctctgggacttaaggtgctatattccctcagagctcacaaatgcctttcaattctttccctgacctcctttcctgaatttttttattttctcaaatgttacctactaagggatgcctgggtaagccactcagctacctaattcctcaatgacctttatctaaaatctccatggaagcaataaattcccttttga

SEQ ID NO: 192360 - DNA, 786 bp, Homo Sapiens
tgtacaaagaagatgatcctaaacaaccctctgatgctgggggccctcgccctgaccaccgtgatgagcccttgtggaggtgaagacattgtggctgaccacgttgcctcttacggtgtaaacttgtaccagtcttacggtccctctggccagttcacccatgaatttgatggagacgaggagttctatgtggacctggagaggaaggagactgtctggcagttgcctctgttccacagacttaaagatttgacccgcaatttgcactgacaaacatcgctgtgctaaaacataacttgaacatcctgattaaacgctccaactctaccgctgctaccaatgaggttcctgaggtcacagtgttttccaagtctcccgtgacactgggtcagcccaacaccctcatctgtcttgtggacaacatctttcctcctgtggtcaacatcacctggctgagcaatgggcactcagtcacagaaggtgtttctgagaccagcttcctctccaagagtgatcattccttcttcaagatcagttacctcaccttcctcccttctgctgatgagatttatgactgcaaggtggagcactggggcctggatgagcctctttctgaaacactggggagcctgagattccagcacctatgtcagagctcacagagactgtggtctgtgccctggggttgtctgtggacctcgtgggcattgtggaggggaccgtcttgatctcccgagggcttgcgttcagttggtgcttccaaaacaccaagggcccttgtgaatc

SEQ ID NO: 192361 - DNA, 1794 bp, Homo Sapiens; identical to SEQ ID NO: 184868
  misc_feature (1485)..(1498): n is a, c, g, or t
  misc_feature (1600)..(1623): n is a, c, g, or t

SEQ ID NO: 192362 - DNA, 1349 bp, Homo Sapiens; identical to SEQ ID NO: 184869

SEQ ID NO: 192363 - DNA, 1604 bp, Homo Sapiens; identical to SEQ ID NO: 184870
  misc_feature (113)..(133): n is a, c, g, or t
  misc_feature (178)..(187): n is a, c, g, or t

SEQ ID NO: 192364 - DNA, 1682 bp, Homo Sapiens; identical to SEQ ID NO: 184871
  misc_feature (172)..(192): n is a, c, g, or t
  misc_feature (237)..(246): n is a, c, g, or t

SEQ ID NO: 192365 - DNA, 2179 bp, Homo Sapiens; identical to SEQ ID NO: 184872
  misc_feature (196)..(213): n is a, c, g, or t
  misc_feature (1340)..(1355): n is a, c, g, or t
  misc_feature (1457)..(1480): n is a, c, g, or t
  misc_feature (1827)..(1847): n is a, c, g, or t
  misc_feature (1892)..(1902): n is a, c, g, or t

SEQ ID NO: 192366 - DNA, 1060 bp, Homo Sapiens
ccaactttgtacaaaaaagttgggtcacatgaatattcgtattgttaactaaatgatttatattttactgatttaatattacagtgtaagaatgtcagtcattgttagttcttgtctagttttcattaaaagaacaaagatcttttatatggatatcttataaatatataatcattgctaagtaagaagttaagttgttgctatcgcaacaatcctggcagacaattgagtaatattttgatgatttattttgtttgtaattagttattataagaagatctagatcctagatattagaataaaatttattttctactgtatccatttcaaatgttaaaatattgtttaatatttttgaaatccctgagtatcaggccttgttataaataagctgcataatcaataaatagaacaagggactttttgttgataatccaaatactcaaagtttacgtaatgaaaattatagcgtgtgtgcaaactcttgagggttgattatgctgcaatttagcatgttggaacgtctagggagaaggttgactttttgcacttctgtatatagtcaaaagagagaaacctgtataatagtaagatcttattttgaataaaaacgtctataattacaaggagttttgttaaggctaatacaatgacagactgagcaaaattgcttgcaaaagtggcacagagttagcactccataccccttcaaacatgttgctttgctttcttgtggacagcttgtagtttgccaggattttttcagctggaaagatacgccatcctttcaaaccctcatgactgacaaaaactccatggggccaaatctgcctgaagatcattaccaaaaatagcaggtacttctaccattaaggtgaaatcatggatcagatattccttacatttttcaaaactactgcatgtttaaaacttcaacaaaaaagagagaaagaactatactaagaacatatattattcagatcagtttctgccaatttcagtggtttattgttcacaaaaaaatcttcaaacaagtattgactttcacaaaatttaaatc

SEQ ID NO: 192367 - DNA, 3327 bp, Homo Sapiens; identical to SEQ ID NO: 184874
  misc_feature (2023)..(2040): n is a, c, g, or t

SEQ ID NO: 192368 - DNA, 768 bp, Homo Sapiens
  misc_feature (451)..(465): n is a, c, g, or t
ttgggttaggagttaatgttgcaaagagtagtttacatcttcactttctgaagacacttgaatttaggaccgatgtatctgtgacaagcatgccagaagtggcaggggccatcagggctaaccacttcacacctaccatcgtcccatggggatccaagacctgagataaagcaacagcctgcccagatccctctgttcatcctatcccttccaaggttggtccatgccaacataacctctgggcatcagacatcagcaggtctgtgtgcctcagccctgttaaggggcaggtttctctttagccctcttcctgcacttgggagcaaaggcactaccagtagagaagggccatccagccgtgccccagcctggacccctggggctcagatagaggtgctgagcccctgtgtcaaagttgttaaatgtttttgttttgttccattgtagctcnnnnnnnnnnnnnnncccctttcctggtgattgattttacaaaagaaagtaagctgcttaaaaggccctggaagggaagtgaggaggagggacaaggaagatgactagttacggagggtgagggttgttttttgccaaaaagcctgggtagagtgatctgaattatctggcaccctcctgaatggaaccccagagtacctcctgtgtggaagagtccctggattttccctaacaccccaccctctcccccttcagccatgctgatggcagagaagataagaacttggagcccatttctcactggaaagaaaactttgt

SEQ ID NO: 192369 - DNA, 1629 bp, Homo Sapiens; identical to SEQ ID NO: 180437
  misc_feature (480)..(491): n is a, c, g, or t
  misc_feature (678)..(828): n is a, c, g, or t

SEQ ID NO: 192370 - DNA, 2402 bp, Homo Sapiens; identical to SEQ ID NO: 184876
  misc_feature (363)..(396): n is a, c, g, or t
  misc_feature (934)..(943): n is a, c, g, or t
  misc_feature (1100)..(1146): n is a, c, g, or t
  misc_feature (1368)..(1379): n is a, c, g, or t
  misc_feature (1515)..(1542): n is a, c, g, or t
  misc_feature (2181)..(2215): n is a, c, g, or t

SEQ ID NO: 192371 - DNA, 2550 bp, Homo Sapiens; identical to SEQ ID NO: 184877
  misc_feature (118)..(151): n is a, c, g, or t
  misc_feature (155)..(171): n is a, c, g, or t
  misc_feature (1965)..(1974): n is a, c, g, or t
  misc_feature (2131)..(2177): n is a, c, g, or t
  misc_feature (2399)..(2411): n is a, c, g, or t

SEQ ID NO: 192372 - DNA, 691 bp, Homo Sapiens; identical to SEQ ID NO: 184878
  misc_feature (172)..(181): n is a, c, g, or t
  misc_feature (338)..(384): n is a, c, g, or t
  misc_feature (606)..(619): n is a, c, g, or t

SEQ ID NO: 192373 - DNA, 1996 bp, Homo Sapiens; identical to SEQ ID NO: 184879

SEQ ID NO: 192374 - DNA, 859 bp, Homo Sapiens; identical to SEQ ID NO: 180438

SEQ ID NO: 192375 - DNA, 1056 bp, Homo Sapiens; identical to SEQ ID NO: 180440
  misc_feature (331)..(342): n is a, c, g, or t

SEQ ID NO: 192376 - DNA, 1276 bp, Homo Sapiens; identical to SEQ ID NO: 180441

SEQ ID NO: 192377 - DNA, 813 bp, Homo Sapiens; identical to SEQ ID NO: 180442
  misc_feature (459)..(470): n is a, c, g, or t

SEQ ID NO: 192378 - DNA, 516 bp, Homo Sapiens
cctttaaaagccaactttgtacaaaaaagttggcaaggaccaaagctgacagggatcaagcatgaattgcaagcaaactgctacgaggaggtcaaggaccgctgcaccctggcagagaagctggggggcagtgccgtcatctccctggagggcaagcctttgtgagccccttctggccccctgcctggagcatctggcagccccacacctgcccttgggggttgcaggctgcccccttcctgccagaccggaggggctggggggatcccagcagggggagggcaatcccttcaccccagttgccaaacagaccccccaccccctggattttccttctccctccatcccttgacggttctggccttcccaaactgcttttgatcttttgattcctcttgggctgaagcagaccaagttccccccaggcaccccagttgtgggggagcctgtattttttttaacaacatccccattccccacctggtcctcccccttcccatgctgccaacttctaac

SEQ ID NO: 192379 - DNA, 1224 bp, Homo Sapiens
ttggctccgttacccagcgagcgaggcggcggcgcagggccagcggactccatttcccgtcggctcgcggtgggagcgccggaagcccgccccacccctcattgtgcggctcctactaaacggaaggggccgggagaggccgcgttcagtcgggtcccggcagcggctgcagcgctctcgtcttctgcggctctcggtgccctctccttttcgtttccggaaacatggcctccggtgtggctgtctctgatggtgtcatcaaggtgttcaacgacatgaaggtgcgtaagtcttcaacgccagaggaggtgaagaagcgcaagaaggcggtgctcttctgcctgagtgaggacaagaagaacatcatcctggaggagggcaaggagatcctggtgggcgatgtgggccagactgtcgacgatccctacgccacctttgtcaagatgctgccagataaggactgccgctatgccctctatgatgcaacctatgagaccaaggagagcaagaaggaggatctggtgtttatcttctgggcccccgagtctgcgccccttaagagcaaaatgatttatgccagctccaaggacgccatcaagaagaagctgacagggatcaagcatgaattgcaagcaaactgctacgaggaggtcaaggaccgctgcaccctggcagagaagctggggggcagtgccgtcatctccctggagggcaagcctttgtgagccccttctggccccctgcctggagcatctggcagccccacacctgcccttgggggttgcaggctgcccccttcctgccagaccggaggggctggggggatcccagcagggggagggcaatcccttcaccccagttgccaaacagaccccccaccccctggattttccttctccctccatcccttgacggttctggccttcccaaactgcttttgatcttttgattcctcttgggctgaagcagaccaagttccccccaggcaccccagttgtgggggagcctgtattttttttaacaacatccccattccccacctggtcctcccccttcccatgctgccaacttctaaccgcaatagtgactctgtgcttgtctgtttagttctgtgtataaatggaatgttgtggagatgacccctccctgtgccggctggttcctctcccttttcccctgtcacggctactcatggaagcacgaccagtacaggaccttccgatt

SEQ ID NO: 192380 - DNA, 907 bp, Homo Sapiens
  misc_feature (761)..(773): n is a, c, g, or t
gagcaatgctttttctataatagccaactttgtacaaaaaagttggggcagcggctgcagcgctctcgtcttctgcggctctcggtgccctctccttttcgtttccggaaacatggcctccggtgtggctgtctctgatggtgtcatcaaggtgttcaacgacatgaaggtgcgtaagtcttcaacgccagaggaggtgaagaagcgcaagaaggcggtgctcttctgcctgagtgaggacaagaagaacatcatcctggaggagggcaaggagatcctggtgggcgatgtgggccagactgtcgacgatccctacgccacctttgtcaagatgctgccagataaggactgccgctatgccctctatgatgcaacctatgagaccaaggagagcaagaaggaggatctggtgtttatcttctgggcccccgagtctgcgccccttaagagcaaaatgatttatgccagctccaaggacgccatcaagaagaagctgacagggatcaagcatgaattgcaagcaaactgctacgaggaggtcaaggaccgctgcaccctggcagagaagctggggggcagtgccgtcatctccctggagggcaagcctttgtgagccccttctggccccctgcctggagcatctggcagccccacacctgcccttgggggttgcaggctgcccccttcctgccagaccggaggggctggggggatcccagcagggggagggcaatccccttcaccccagttgccaaacagannnnnnnnnnnnntggattttccttctccctccatcccttgacggttctggcctttccccaaactgcttttgatcttttgattcctcttgggctgaagcagaccaagttcccccccaggcaccccagttgtggggggaggcctggta

SEQ ID NO: 192381 - DNA, 653 bp, Homo Sapiens
ttgtacaaaaaagttggcatggccatcgccttccccgcagcgcccctgctgaccgtcatcctggccctcgtcgggatggaggccatcatgtcggagttcttcaacgacaccaccaccgccttctacatcatcctcatcgtgtggctcgcggaccagtatgacgccatctgctgccacaccagcaccagcaagcggcattggctgcggtgagcgtggcgcgggggcagggtggagtgggtgctggtgggcaggggtagggggctgccagagggaggggcgctggaggcgggggtggtggctgcgccacgcgggaaccccaggggctgggcctggcagggtgggacctgcagccccgacgccctcaccccgccccgcaggttcttctatctctaccacttcgccttctatgcctatcactaccgcttcaatgggcagtatagcagcctggccctggtcacctcctggctcttcatccagcattccatgatctacttcttccaccactacgagctgcctgccatcctgcagcaggtccgcatccaggagatgctgcttcaggcgccgccactgggccccgggacccccacggcgctgcccgatgacatgaacaacaactcgggcgccccggctacagcccttgactctgtcggcca

SEQ ID NO: 192382 - DNA, 1373 bp, Homo Sapiens
ttggccacagcctacggcccccagccgtccctacattcgcacaagcgcttactacctgccaggggcctgagtggccgacccccgaggaatgtgcagtctggcctcatcctgcacttacctcactctaagctgcaggcgacagccggtgtccagccccacctttgccactgactggctgccctcgggcccgaacacggctttgctcatcccaccctggccagacctagcccctcttagaagccgcaagtggcagggctgggccgggccccgcgcaggcctcctgtggctagcctgcacctgccacccgcccaggactgaagccggcttcatctgtgtgttccaggctgagatcgtcaaaaggctgaacgggatttgtgcccaggtcctgccctacctctcccaagagcaccagcagcaggtcttgggagccattgagagggccaagcaggtcaccgctcccgagctgaactctatcatccgacagcagctccaagcccaccagctgtcccagctgcaggccctggccctgcccttgaccccactacccgtggggctgcagccgccttcgctgccggcggtcagcgcaggcaccggcctcctctcgctgtccgcgctgggttcccaggcccacctctccaaggaagacaagaacgggcacgatggtgacacccaccaggaggatgatggcgagaagtcggattagcagggggccgggacggggaggttgggaggggggacagaggggagacagaggcacggagagaaaggaatgtttagcacaagacacagcggagctcgggattggctaaactcccatagtatttatggtggccgccggcgggggccccagcccagcttgcaggccacctctagctttcttcctaccccattcccggcttccctcctcctcccctgcagcctggttaggtggatacctgccctgacatgtgaggcaagctaaggcctggagggtcagatgggagaccaggtcccaagggagcaagacctcgcgaagcgcagcagccccggcccttcccccgttttgaacatgtgtaaccgacagtctgcctgggccacagccctctcaccctggtactgcatgcacgcaatgctagctgcccctttcccgtcctgggcaccccgagtctcccccgaccccgggtcccaggtatgctcccacctccacctgccccactcaccacctctgctagttccagacacctccacgcccacctggtcctctcccatcgcccacaaaagggggggcacgagggacgagcttagctgacctgggaggagcagggtgagggtgggcgacccaggattccccctccccttcccaaataaagatgagggtactatagttgtcttgg

SEQ ID NO: 192383 - DNA, 459 bp, Homo Sapiens
actttgtacaaaaaagttggcctgccctgacatgtgaggcaagctaaggcctggagggtcagatgggagaccaggtcccaagggagcaagacctcgcgaagcgcagcagccccggcccttcccccgttttgaacatgtgtaaccgacagtctgcctgggccacagccctctcaccctggtactgcatgcacgcaatgctagctgcccctttcccgtcctgggcaccccgagtctcccccgaccccgggtcccaggtatgctcccacctccacctgccccactcaccacctctgctagttccagacacctccacgcccacctggtcctctcccatcgcccacaaaagggggggcacgagggacgagcttagctgagctgggaggagcagggtgagggtgggcgacccaggattccccctccccttcccaaataaagatgagggtactaaagttgtcttgg

SEQ ID NO: 192384 - DNA, 1234 bp, Homo Sapiens; identical to SEQ ID NO: 180443

SEQ ID NO: 192385 - DNA, 1270 bp, Homo Sapiens; identical to SEQ ID NO: 184891

SEQ ID NO: 192386 - DNA, 1689 bp, Homo Sapiens; identical to SEQ ID NO: 180446
  misc_feature (349)..(362): n is a, c, g, or t
  misc_feature (784)..(800): n is a, c, g, or t
  misc_feature (1326)..(1361): n is a, c, g, or t
  misc_feature (1542)..(1578): n is a, c, g, or t

SEQ ID NO: 192387 - DNA, 1432 bp, Homo Sapiens; identical to SEQ ID NO: 184892
  misc_feature (1125)..(1183): n is a, c, g, or t

SEQ ID NO: 192388 - DNA, 1384 bp, Homo Sapiens; identical to SEQ ID NO: 180447
  misc_feature (246)..(278): n is a, c, g, or t
  misc_feature (477)..(494): n is a, c, g, or t
  misc_feature (830)..(851): n is a, c, g, or t

SEQ ID NO: 192389 - DNA, 1253 bp, Homo Sapiens; identical to SEQ ID NO: 180448
  misc_feature (64)..(77): n is a, c, g, or t
  misc_feature (499)..(515): n is a, c, g, or t
  misc_feature (1041)..(1073): n is a, c, g, or t

SEQ ID NO: 192390 - DNA, 1205 bp, Homo Sapiens; identical to SEQ ID NO: 180449
  misc_feature (312)..(338): n is a, c, g, or t
  misc_feature (794)..(835): n is a, c, g, or t

SEQ ID NO: 192391 - DNA, 763 bp, Homo Sapiens; identical to SEQ ID NO: 180450

SEQ ID NO: 192392 - DNA, 2287 bp, Homo Sapiens; identical to SEQ ID NO: 184895

SEQ ID NO: 192393 - DNA, 1115 bp, Homo Sapiens; identical to SEQ ID NO: 184896
  misc_feature (915)..(956): n is a, c, g, or t

SEQ ID NO: 192394 - DNA, 907 bp, Homo Sapiens
aactttgtacaaaaaagttggattagtgatgcagacgacgtcgtgagtgccatgatcgtcaagatgaatgaagctgctgaggaagacagacagttgaacaatcaaaaaaagccagcactgaaaaaattaactttactgcctgctgtagttatgcaccttaagaagcaggaccttaaagaaacattcattgacagtggtgtgatgtctgccatcaaagaatggctctcacctctaccagataggagtttgcctgcactcaagatccgggaggagctgctgaagatcctgcaagagctgcctagtgtgagccaggagaccctgaagcatagtgggattggacgagcagtgatgtatctctataaacaccccaaggagtcaaggtctaacaaggacatggcagggaaattaatcaatgagtggtctaggcctatatttggtcttacctcaaactacaaaggaatgacaagagaagaaagggagcagagagatctagaacagatgcctcaacgacgaagaatgaacagcactggtggtcagacacccagaagagacctggaaaaggtgctgacaggagaggagaaggctcttagacctggagatcctggattctgtgcccgtgcaagggtcccaatgccttcaaacaaggactatgttgtcaggcccaaatggaatgtggaaatggagtcatccaggtttcaggcgacctccaagaagggtatcagtcgactggataaacagatgagaaagttcacagatataaagaaaaaagcagatctgcacacgcagtgaaaatcagcattgaggggcaacaaaatgccattgtgaccttgcctggatgtgtccccatctctactctaagaatgcgcaatggactctttggagaaagagatattttaaaacattttta

SEQ ID NO: 192395 - DNA, 1021 bp, Homo Sapiens; identical to SEQ ID NO: 184902

SEQ ID NO: 192396 - DNA, 1024 bp, Homo Sapiens
actttgtacaaaaaagttggagcacgtgcctcggcagccccttctctgtgaaggtgacaggcgagggccgggtgaaagagagcatcacccgcaggcgtcgggctccttcagtggccaacgttggtagtcattgtgacctcagcctgaaaatccctgaaattagcatccaggatatgacagcccaggtgaccagcccatcgggcaagacccatgaggccgagatcgtggaaggggagaaccacacctactgcatccgctttgttcccgctgagatgggcacacacacagtcagcgtgaagtacaagggccagcacgtgcctgggagccccttccagttcaccgtggggcccctaggggaagggggagcccacaaggtccgagctgggggccctggcctggagagagctgaagctggagtgccagccgaattcagtatctggacccgggaagctggtgctggaggcctggccattgctgtcgagggccccagcaaggctgagatctcttttgaggaccgcaaggacggctcctgtggtgtggcttatgtggtccaggagccaggtgactacgaagtctcagtcaagttcaacgaggaacacattcccgacagccccttcgtggtgcctgtggcttctccgtctggcgacgcccgccgcctcactgtttctagccttcaggagtcagggctaaaggtcaaccagccagcctcttttgcagtcagcctgaacggggccaagggggcgatcgatgccaaggtgcacagcccctcaggagccctggaggagtgctatgtcacagaaattgaccaagataagtatgctgtgcgcttcatccctcgggagaatggcgtttacctgattgacgtcaagttcaacggcacccacatccctggaagccccttcaagatccgagttggggagcctgggcatggaggggacccaggcttggtgtctgcttacggagcaagtctggaagcggtgtcacacggaacccagctgagttcgtcgtgaacacgagcatgcgg

SEQ ID NO: 192397 - DNA, 1116 bp, Homo Sapiens; identical to SEQ ID NO: 184904

SEQ ID NO: 192398 - DNA, 2068 bp, Homo Sapiens; identical to SEQ ID NO: 184905

SEQ ID NO: 192399 - DNA, 1409 bp, Homo Sapiens
ctttgtacaaaaaagttggggccattgctgccaagggccccagcaaggctgagatctcttttgaggaccgcaaggacggctcctgtggtgtggcttatgtggtccaggagccaggtgactacgaagtctcagtcaagttcaacgaggaacacattcccgacagccccttcgtggtgcctgtggcttctccgtctggcgacgcccgccgcctcactgtttctagccttcaggagtcagggctaaaggtcaaccagccagcctcttttgcagtcagcctgaacggggccaagggggcgatcgatgccaaggtgcacagcccctcaggagccctggaggagtgctatgtcacagaaattgaccaagataagtatgctgtgcgcttcatccctcgggagaatggcgtttacctgattgacgtcaagttcaacggcacccacatccctggaagccccttcaagatccgagttggggagcctgggcatggaggggacccaggcttggtgtctgcttacggagcaggtctggaaggcggtgtcacagggaacccagctgagttcgtcgtgaacacgagcaatgcgggagctggtgccctgtcggtgaccattgacggcccctccaaggtgaagatggattgccaggagtgccctgagggctaccgcgtcacctatacccccatggcacctggcagctacctcatctccatcaagtacggcggcccctaccacattgggggcagccccttcaaggccaaagtcacaggcccccgtctcgtcagcaaccacagcctccacgagacatcatcagtgtttgtagactctctgaccaaggccacctgtgccccccagcatggggccccgggtcctgggcctgctgacgccagcaaggtggtggccaagggcctggggctgagcaaggcctacgtaggccagaagagcagcttcacagtagactgcagcaaagcaggcaacaacatgctgctggtgggggttcatggcccaaggaccccctgcgaggagatcctggtgaagcacgtgggcagccggctctacagcgtgtcctacctgctcaaggacaagggggagtacacactggtggtcaaatggggggacgagcacatcccaggcagcccctaccgcgttgtggtgccctgagtctggggcccgtgccagccggcagcccccaagcctgccccgctacccaagcagccccgccctcttcccctcaaccccggcccaggccgccctggccgcccgcctgtcactgcagccgcccctgccctgtgccgtgctgcgctcacctgcctccccagccagccgctgaactctcggctttcacttgggcagagggagccatttggtggcgctgcttgtcttctttggttctgggaggggtgagggatgggggtcctg

SEQ ID NO: 192400 - DNA, 954 bp, Homo Sapiens; identical to SEQ ID NO: 184908

SEQ ID NO: 192401 - DNA, 1234 bp, Homo Sapiens
  misc_feature (1057)..(1082): n is a, c, g, or t
tttgtacaaaaaagttgggtcaaaaaatactgtcatactctaagcttctattttccacactggacatacttctagttgtattctccatactattagactgtgtagtgatgtgacttccaagtagaatttaatctccccattgagtgtgtcatggtacaaatcactattcgtttttggtgttttttagggatgtgcaatgtgcattacataatgacagaaatactgagaaggttctgtgtgcccatttgaaaggagtgggaggaatacagcagtttgtttttcaacatgaatctgatattgatttaaactgtgtttcacttacaagttttaaaaaaatgacagggtttaatggagcgtgcataaaaatgtactgttttcaccttttgtttatatgtaaatgtttgtaagtatatgggcctatctgtaagtgggtaagtctgtatgtgtgtatcatacacatcaacctccatgtccttagtcctgggtttttgaaaaagtgctaaaacggacaagtagaataaatgttgctgtggaatgccatgctttagaacaaaccctttttgatcttaatgcttctgaaaactaggtctgactctggggatttttttccagccgaaggaaaatcacttccgttatgtccccctctaatttagccgctcgacattttacacaacccggatatgttgtatattttgacccaaagttacaggtaggtttaagagaatttttagccatgacttttggagcactattccattgtcagttattaataaagaattccattgcttagctaaccaacaggttttttttgtttccaagagagttatttgaaaagttaacagaacaatgagataacagtgacagtttaacaaagataaaattctgaactgcgttttattcatttgtgtactatgtgattttttaaatgtcccctttagtatttaatggaaaattggttcctgcaaagacaaagggtgagagttagcgtcctgtagatacacacagagactaggccgtatattaactagaagcagctttatgtctagctggtcttttnnnnnnnnnnnnnnnnnnnnnnnnnnagattcctgagagatgtctctggaaagggaaagttttgagaactaatggctatttttgaggacaaaaattacatcttaagctaattccttaaatacatacagtagtgaattttcaggacaatattgcctcacaaccctgcttacattgaaaa

SEQ ID NO: 192402 - DNA, 830 bp, Homo Sapiens
tccgggaaggccaagctgacgcacccggggaaggcgatcctggcaggcggcctggcgggtggcatcgagatctgcatcaccttccccaccgagtacgtgaagacgcagctgcagctggacgagcgctcgcacccgccgcggtaccggggcatcggggactgcgtgcggcagacggttcgcagccatggcgtcctgggcctgtaccgcggccttagctccctgctctacggttccatccccaaggcggccgtcaggtttggaatgttcgagttcctcagcaaccacatgcgggatgcccagggacggctggacagcacgcgtgggctgctgtgcggcctgggcgctggcgtggccgaggccgtggtggtcgtgtgccccatggagaccatcaaggtgaagttcatccacgaccagacctccccaaaccccaagtacagaggattcttccacggggttagggagattgtgcgggaacaagggctgaaggggacgtaccagggcctcacagccactgtcctgaagcagggctcgaaccaggccatccgcttcttcgtcatgacctccctgcgcaactggtaccgaggggacaaccccaacaagcccatgaaccctctgatcactggggtcttcggagctattgcaggcgcagccagtgtctttggaaacactcctctggatgtgattaagacccggatgcagggcctggaggcgcacaaataccggaacacgtgggactgcggcttgcagatcctgaagaaggaggggctcatggcattctacaaggcactgtcctccgcctggcggtctgcctggatgtggccatagtgttg

SEQ ID NO: 192403 - DNA, 954 bp, Homo Sapiens; identical to SEQ ID NO: 184915
  misc_feature (104)..(127): n is a, c, g, or t

SEQ ID NO: 192404 - DNA, 2247 bp, Homo Sapiens; identical to SEQ ID NO: 184916
  misc_feature (1701)..(1725): n is a, c, g, or t

SEQ ID NO: 192405 - DNA, 859 bp, Homo Sapiens
  misc_feature (210)..(234): n is a, c, g, or t
ttggctttaagttcatacctgagctaagaaggataattgtcttttggtaactaggtctacaggtttacatttttctgtgttacactcaaggataaaggcaaaatcaattttgtaatttgtttagaagccagagtttatcttttctataagtttacagcctttttcttatatatacagttattgccacctttgtgaacatggcaagggacnnnnnnnnnnnnnnnnnnnnnnnnnctagtaccagcctaggaattcggttagtactcatttgtattcactgtcactttttctcatgttctaattataaatgaccaaaatcaagattgctcaaaagggtaaatgatagccacagtattgctccctaaaatatgcataaagtagaaattcactgccttcccctcctgtccatgaccttgggcacagggaagttctggtgtcatagatatcccgttttgtgaggtagagctgtgcattaaacttgcacatgactggaacgaagtatgagtgcaactcaaatgtgttgaagatactgcagtcatttttgtaaagaccttgctgaatgtttccaatagactaaatactgtttaggccgcaggagagtttggaatccggaataaatactacctggaggtttgtcctctccatttttctctttctcctcctggcctggcctgaatattatactactctaaatagcatatttcatccaagtgcaataatgtaagctgaatcttttttggacttctgctggcctgttttatttcttttatataaatgtgatttctcagaaattgatattaaacactatcttatcttctcctgaactgttgattttaattaaaattaagtgctaattacc

SEQ ID NO: 192406 - DNA, 1481 bp, Homo Sapiens; identical to SEQ ID NO: 184917
  misc_feature (870)..(894): n is a, c, g, or t

SEQ ID NO: 192407 - DNA, 943 bp, Homo Sapiens
ttcaaactgggacttgtactgctgtcatatatctcctgaaagatgtctttaaaacgcccatcatattcttcagaatagtgttttggtgctcagatacaaaggccaaccttagacagagccatttggaaggaactgtgtgcaaaatcttcaattgacttatcttgattatacatccccatggcaacaccaccacttcttcaaagttatgtaccaggtatgtcaccttttgggttccgtcacttggtgtgtaggttatctctacttttccaggcccaggaacaacaaaatcagttgctctgtattgatccccataagcatgacgacctatgatgataggttttacccatccactcacaagccgggggatatttttgcagataatggcttctctgaagaccgtgccacccagaatatttcgtatggtgccatttggtgatttccacatttgtttcaacttgaactcctcaaccctcttctcatcaggagtgatagtggcacatttgacgccaacattatgcttctttatagcttctgcagcatccttggtgacttggtcgttggtggcatcacgattctctatgcctaaatcatagctatgtagatccaattccacgtagggaaaaatgagtttctctttaatcaattcccaaatgattcgtgtcatttcatctccttgcatctctaccacagaaccgccactgatttttttggacattttgacttcaataaaccttgacagtgaatagatttcttatcaccccagttcctcccagtcttgcagactcaactgaatgtagtttatcgcctgccgggatgatatgctggcgaagagttggggcgccacagccgctcacaagctcagactcacaaccacagcctggcaatcccaaaccggactcccagtgcctccgcttctgaagtagccaacttttttgtacaaagt

SEQ ID NO: 192408 - DNA, 1210 bp, Homo Sapiens
  misc_feature (1038)..(1082): n is a, c, g, or t
gccaactttgtacaaaaaagttggcgaagaagctggcaggggcacgagccgggggcgggtttgaagacgcgtcgttgggttttggaggccgtgaaacagccgtttgagtttggctgcgggtggagaacgtttgtcaggggcccggccaagaaggaggcccgcctgttacgatggtgtccatgagtttcaagcggaaccgcagtgaccggttctacagcacccggtgctgcggctgttgccatgtccgcaccgggacgatcatcctggggacctggtacatggtagtaaacctattgatggcaattttgctgactgtggaagtgactcatccaaactccatgccagctgtcaacattcagtatgaagtcatcggtaattactattcgtctgagagaatggctgataatgcctgtgttctttttgccgtctctgttcttatgtttataatcagttcaatgctggtttatggagcaatttcttatcaagtgggttggctgattccattcttctgttaccgactttttgacttcgtcctcagttgcctggttgctattagttctctcacctatttgccaagaatcaaagaatatctggatcaactacctgattttccctacaaagatgacctcctggccttggactccagctgcctcctgttcattgttcttgtgttctttgccttattcatcatttttaaggcttatctaattaactgtgtttggaactgctataaatacatcaacaaccgaaacgtgccggagattgctgtgtaccctgcctttgaagcacctcctcagtacgttttgccaacctatgaaatggccgtgaaaatgcctgaaaaagaaccaccacctccttacttacctgcctgaagaaattctgcctttgacaataaatcctataccagctttttgtttgtttatgttacagaatgctgcaattcagggctcttcaaacttgtttgatataaaatatgttgtcttttgtttaagcatttattttcaaacactaaggagctttttgacatctgttaaacgnnnnnnnnnnnnnnnnnnnnnnnnnnnnnnnnnnnnnnnnnnnnngaagacaatctacgttaagcaagagcaaagtgccattgtttgcctttaattggggggtgggaaagggaaagagggtacttgccacatagtttcccttttaactgcactttccttatataatcgtttgc

SEQ ID NO: 192409 - DNA, 726 bp, Homo Sapiens
  misc_feature (347)..(388): n is a, c, g, or t
ttggggcttatctaattaactgtgtttggaactgctataaatacatcaacaaccgaaacgtgccggagattgctgtgtaccctgcctttgaagcacctcctcagtacgttttgccaacctatgaaatggccgtgaaaatgcctgaaaaagaaccaccacctccttacttacctgcctgaagaaattctgcctttgacaataaatcctataccagctttttgtttgtttatgttacagaatgctgcaattcagggctcttcaaacttgtttgatataaaatatgttgtcttttgtttaagcatttattttcaaacactaaggagctttttgacatctgttaaacgtcnnnnnnnnnnnnnnnnnnnnnnnnnnnnnnnnnnnnnnnnnngaagacaatctaggttaagcaagagcaaagtgccattgtttgcctttaattggggggtgggaagggaaagagggtacttgccacatagtttcctttttaactgcactttctttatataatcgtttgcattttgttacttgctaccctgagtactttcaggaagactgacttaaatattcggggtgagtaagtagttgggtataagatctgaacttttcatctgcacaagcaagaaaaaatatttgacattgtgacttgactgtggaagatgatggttgcatgtttctagtttgtatatgtttccatctttgtgataagatgatttaataaatctcttt

SEQ ID NO: 192410 - DNA, 1165 bp, Homo Sapiens
  misc_feature (985)..(1026): n is a, c, g, or t
ccaactttgtacaaaaaagttgggttttggttggcgtgaaacagccgtttgagtttggctgcgggtggagaacgtttgtcaggggcccggccaagaaggaggcccgcctgttacgatggtgtccatgagtttcaagcggaaccgcagtgaccggttctacagcacccggtgctgcggctgttgccatgtccgcaccgggacgatcatcctggggacctggtacatggtagtaaacctattgatggcaattttgctgactgtggaagtgactcatccaaactccatgccagctgtcaacattcagtatgaagtcatcggtaattactattcgtctgagagaatggctgataatgcctgtgttctttttgccgtctctgttcttatgtttataatcagttcaatgctggtttatggagcaatttcttatcaagtgggttggctgattccattcttctgttaccgactttttgacttcgtcctcagttgcctggttgctattagttctctcacctatttgccaagaatcaaagaatatctggatcaactacctgattttccctacaaagatgacctcctggccttggactccagctgcctcctgttcattgttcttgtgttctttgccttattcatcatttttaaggcttatctaattaactgtgtttggaactgctataaatacatcaacaaccgaaacgtgccggagattgctgtgtaccctgcctttgaagcacctcctcagtacgttttgccaacctatgaaatggccgtgaaaatgcctgaaaaagaaccaccacctccttacttacctgcctgaagaaattctgcctttgacaataaatcctataccagctttttgtttgtttatgttacagaatgctgcaattcagggctcttcaaacttgtttgatataaaatatgttgtcttttgtttaagcatttattttcaaacactaaggagctttttgacatctgttaaacgtcnnnnnnnnnnnnnnnnnnnnnnnnnnnnnnnnnnnnnnnnnngaagacaatctacgttaagcaagagcaaagtgccattgtttgcctttattggggggtgggaaagggaaagaggggtacttgccacatagtttcctttttaactgcacttttctttatataatcgtttgcatttttgtta

SEQ ID NO: 192411 - DNA, 1199 bp, Homo Sapiens
  misc_feature (936)..(977): n is a, c, g, or t
actttgtacaaaaaagttgggaacgtttgtccggggcccggccaagaaggaggcccgcctgttacgatggtgtccatgagtttcaagcggaaccgcagtgaccggttctacagcacccggtgctgcggctgttgccatgtccgcaccgggacgatcatcctggggacctggtacatggtagtaaacctattgatggcaattttgctgactgtggaagtgactcatccaaactccatgccagctgtcaacattcagtatgaagtcatcggtaattactattcgtctgagagaatggctgataatgcctgtgttctttttgccgtctctgttcttatgtttataatcagttcaatgctggtttatggagcaatttcttatcaagtgggttggctgattccattcttctgttaccgactttttgacttcgtcctcagttgcctggttgctattagttctctcacctatttgccaagaatcaaagaatatctggatcaactacctgattttccctacaaagatgacctcctggccttggactccagctgcctcctgttcattgttcttgtgttctttgccttattcatcatttttaaggcttatctaattaactgtgtttggaactgctataaatacatcaacaaccgaaacgtgccggagattgctgtgtaccctgcctttgaagcacctcctcagtacgttttgccaacctatgaaatggccgtgaaaatgcctgaaaaagaaccaccacctccttacttacctgcctgaagaaattctgcctttgacaataaatcctataccagctttttgtttgtttatgttacagaatgctgcaattcagggctcttcaaacttgtttgatataaaatatgttgtcttttgtttaagcatttattttcaaacactaaggagctttttgacatctgttaaacgtcnnnnnnnnnnnnnnnnnnnnnnnnnnnnnnnnnnnnnnnnnngaagacaatctaggttaagcaagagcaaagtgccattgtttgcctttaattggggggtgggaagggaaagagggtacttgccacatagtttcctttttaactgcactttctttatataatcgtttgcattttgttacttgctaccctgagtactttcagaagactgacttaaatattcggggtgagtaagtagttgggtataagatctgaacttttcatctg

SEQ ID NO: 192412 - DNA, 1188 bp, Homo Sapiens
  misc_feature (1018)..(1049): n is a, c, g, or t
gccaactttgtacaaaaaagttggggtttgaagacgcgtcgttgggttttggaggccgtgaaacagccgtttgagtttggctgcgggtggagaacgtttgtcaggggcccggccaagaaggaggcccgcctgttacgatggtgtccatgagtttcaagcggaaccgcagtgaccggttctacagcacccggtgctgcggctgttgccatgtccgcaccgggacgatcatcctggggacctggtacatggtagtaaacctattgatggcaattttgctgactgtggaagtgactcatccaaactccatgccagctgtcaacattcagtatgaagtcatcggtaattactattcgtctgagagaatggctgataatgcctgtgttctttttgccgtctctgttcttatgtttataatcagttcaatgctggtttatggagcaatttcttatcaagtgggttggctgattccattcttctgttaccgactttttgacttcgtcctcagttgcctggttgctattagttctctcacctatttgccaagaatcaaagaatatctggatcaactacctgattttccctacaaagatgacctcctggccttggactccagctgcctcctgttcattgttcttgtgttctttgccttattcatcatttttaaggcttatctaattaactgtgtttggaactgctataaatacatcaacaaccgaaacgtgccggagattgctgtgtaccctgcctttgaagcacctcctcagtacgttttgccaacctatgaaatggccgtgaaaatgcctgaaaaagaaccaccacctccttacttacctgcctgaagaaattctgcctttgacaataaatcctataccagctttttgtttgtttatgttacagaatgctgcaattcagggctcttcaaacttgtttgatataaaatatgttgtcttttgtttaagcatttattttcaaacactaaggagctttttgacatctgttaaacgctcttgttttttgnnnnnnnnnnnnnnnnnnnnnnnnnnnnnnnngaagacaatctaagttaagcaagagcaaagtgccattgtttgcctttaattggggggtgggaagggaaagagggtacttgccacatagtttccttttttaactgcactttctttatataatcgtttgcattttgttact

SEQ ID NO: 192413 - DNA, 374 bp, Homo Sapiens
gttaagtcttttacattttaatagtttttgaagacaatctaggttaagcaagagcaaagtgccattgtttgcctttaattggggggtgggaagggaaagagggtacttgccacatagtttcctttttaactgcactttctttatataatcgtttgcattttgttacttgctaccctgagtactttcaggaagactgacttaaatattcggggtgagtaagtagttgggtataagatctgaacttttcatctgcagaggcaagaaaaatatttgacattgtgacttgactgtggaagatgatggttgcatgtttctagtttgtatatgtttccatctttgtgataagatgatttaataaatctctttaaatactt

SEQ ID NO: 192414 - DNA, 1195 bp, Homo Sapiens
  misc_feature (986)..(1027): n is a, c, g, or t
gccaactttgtacaaaaaagttgggttttggaggccgtgaaacagccgtttgagtttggctgcgggtggagaacgtttgtcaggggcccggccaagaaggaggcccgcctgttacgatggtgtccatgagtttcaagcggaaccgcagtgaccggttctacagcacccggtgctgcggctgttgccatgtccgcaccgggacgatcatcctggggacctggtacatggtagtaaacctattgatggcaattttgctgactgtggaagtgactcatccaaactccatgccagctgtcaacattcagtatgaagtcatcggtaattactattcttctgagagaatggctgataatgcctgtgttctttttgccgtctctgttcttatgtttataatcagttcaatgctggtttatggagcaatttcttatcaagtgggttggctgattccattcttctgttaccgactttttgacttcgtcctcagttgcctggttgctattagttctctcacctatttgccaagaatcaaagaatatctggatcaactacctgattttccctacaaagatgacctcctggccttggactccagctgcctcctgttcattgttcttgtgttctttgccttattcatcatttttaaggcttatctaattaactgtgtttggaactgctataaatacatcaacaaccgaaacttgccggagattgctgtgtaccctgcctttgaagcacctcctcagtacgttttgccaacctatgaaatggccgtgaaaatgcctgaaaaagaaccaccacctccttacttacctgcctgaagaaattctgcctttgacaataaatcctataccagctttttgtttgtttatgttacagaatgctgcaattcagggctcttcaaacttctttgatataaaatatgttgtcttttgtttaagcatttattttcaaacactaaggagctttttgacatctgttaaacgtcnnnnnnnnnnnnnnnnnnnnnnnnnnnnnnnnnnnnnnnnnngaagacaatctaggttaagcaagagcaaagtgccattgtttgcctttaattggggggtgggaagggaaagagggtacttgccacatagtttcctttttaactgcactttctttatataatcgtttgcattttgttacttgctaccctgagtactttcaggaagactga

SEQ ID NO: 192415 - DNA, 1123 bp, Homo Sapiens; identical to SEQ ID NO: 180453

SEQ ID NO: 192416 - DNA, 520 bp, Homo Sapiens
ttgtacaaaaaagttggctcagctctggtattgctcataacttaccaagaggctaatactaaacttggaaaattgtttaagtatgttttatcaagcagtctgggttttgttttttaatatactttttaatggatatgtgaaaactgaaggaaatgttaaaggttttttaatggtgcaagtgaaggtgccagttgctatttgatatcacactctacaaaagcttcattactttatttgatggtggttgctaagcagccattgcacagagcataagtctactgggtgcctttacatgccagaggctgatgctgcactgttgatgtcatgtgaggaaataatgcacatgctctaactgctcaacaggaaatgaacctagaaacagaaaatgaaaaggttgattgaaataaaacttgatcaacgcgactgtattttgaaacattccaggaaggttacttcttgtcaaacttgcctggcagtgtttgttcaaaacttgtatttaataaatgaacatctgacttac

SEQ ID NO: 192417 - DNA, 1170 bp, Homo Sapiens
  misc_feature (972)..(980): n is a, c, g, or t
ttggggcggcacagggccgaggcgtagtgtgggtgactcctccgttccttgggtcccgtcgtctgtgatactgcagcgcagccatggcagaaccgcagcccccgtccggcggcctcacggacgaggccgccctcagttgctgctccgacgcggaccccagtaccaaggattttctattgcagcagaccatgctacgagtgaaggatcctaagaagtcactggatttttatactagagttcttggaatgacgctaatccaaaaatgtgattttcccattatgaagttttcactctacttcttggcttatgaggataaaaatgacatccctaaagaaaaagatgaaaaaatagcctgggcgctctccagaaaagctacacttgagctgacacacaattggggcactgaagatgatgagacccagagttaccacaatggcaattcagaccctcgaggattcggtcatattggaattgctgttcctgatgtatacagtgcttgtaaaaggtttgaagaactgggagtcaaatttgtgaagaaacctgatgatggtaaaatgaaaggcctggcatttattcaagatcctgatggctactggattgaaattttgaatcctaacaaaatggcaaccttaatgtagtgctgtgagaattctcctttgagatttcagaagaaaggaaacaatgtgattcaagatatttacataccagaagcatctaggactgatggatcactgtcccgattcaaattattcttcagtccatttccccttcctatttcagctgttccttttcacctaactgttcagtcattctggttttcaagcagtgctttatctcatgtccttgaatatagttgtgtaactttattttttaggtaataattagaacagttcccttcagaggctgcatttgccttcttctgccacctaaatattacttcccttcaaatctgcctttgaatcatcatttttnnnnnnnnnttaacatgtttttgttgtagttatcttctggggtttcaattcctcagaaacaacttttttcacaacggaaaggaaagaacactagtgttctttcagtaaagtacaaagtgtttattttacaaaagagtgatactcttgagagcaattcaaatcatgctgacaggatactgatagaaaaagtgatttcttc

SEQ ID NO: 192418 - DNA, 799 bp, Homo Sapiens
ctttgtacaaaaaagttggatttatttggccaaaggggaggaggaaggaaatgatatggtacccagacactgggctaggctgcaactttatctcatttaatactcccagctgtcatgtgagaaagaaagcaggctaggcatgtgaaatcactttcatggattattaatggatttaagagggcatcaatcagctcaactcaagatttcataatcatttttagtatttagattgtgcctcaaagttgtagtacctcacaatacctccactggtttcctgttgtaaaaaccttcagtgagtttgaccattgtgctcttggctcttgggctggagtaccgtggtgagggagtaaacactagaagtctttagtacaaaactgctctagggacacctggtgattcctacacaagtgatgtttatatttctcataaagagtcttccctatcccaaggtcttcatgatgccagtagccatatatgataaattatgttcagtgataacttagttatcagaaatcagctcagtggtcttccccgccatgattcacatttgatgagtttttaaaaatcaaagtgattttgaaaatctctaatggctcagaaaataaaaacatccagtttgtggatgactatatttagatttctctagactctagtggaagacctttggaaaggccatgccaaccgtgcttgtactgctagaagcactttatgtttcctttttgggtgaaatggatttatgtgagtgctttaaacaaatagcaatacttatagactgaaataaaatgaaacttcaaataaa

SEQ ID NO: 192419 - DNA, 1086 bp, Homo Sapiens
  misc_feature (952)..(960): n is a, c, g, or t
tttgtacaaaaaagttggcctccgttccttgggtcccgtcgtctgtgatactgcagcgcagccatggcagaaccgcagcccccgtccggcggcctcacggacgaggccgccctcagttgctgctccgacgcggaccccagtaccaaggattttctattgcagcagaccatgctacgagtgaaggatcctaagaagtcactggatttttatactagagttcttggaatgacgctaatccaaaaatgtgattttcccattatgaagttttcactctacttcttggcttatgaggataaaaatgacatccctaaagaaaaagatgaaaaaatagcctgggcgctctccagaaaagctacacttgagctgacacacaattggggcactgaagatgatgagacccagagttaccacaatggcaattcagaccctcgaggattcggtcatattggaattgctgttcctgatgtatacagtgcttgtaaaaggtttgaagaactgggagtcaaatttgtgaagaaacctgatgatggtaaaatgaaaggcctggcatttattcaagatcctgatggctactggattgaaattttgaatcctaacaaaatggcaaccttaatgtagtgctgtgagaattctcctttgagatttcagaagaaaggaaacaatgtgattcaagatatttacataccagaagcatctaggactgatggatcactgtcccgattcaaattattcttcagtccatttccccttcctatttcagctgttccttttcacctaactgttcagtcattctggttttcaagcagtgctttatctcatgtccttgaatatagttgtgtaactttattttttaggtaataattagaacagttcccttcaaaggctgcatttgccttcttctgccacctaaatattacttcccttcaaatctgcctttgaatcatcatttttnnnnnnnnnttaacatgtttttgttgtagttatcttctggggtttcaattcctcagaaacaacttttttcacaacggaaagggaaagaacactaagtgttctttcagtaaagtacaaagtgtttatttaccaaaa

SEQ ID NO: 192420 - DNA, 946 bp, Homo Sapiens
  misc_feature (693)..(701): n is a, c, g, or t
ttgggttttcactctacttcttggcttatgaggataaaaatgacatccctaaagaaaaagatgaaaaaatagcctgggcgctctccagaaaagctacacttgagctgacacacaattggggcactgaagatgatgcgacccagagttaccacaatggcaattcagaccctcgaggattcggtcatattggaattgctgttcctgatgtatacagtgcttgtaaaaggtttgaagaactgggagtcaaatttgtgaagaaacctgatgatggtaaaatgaaaggcctggcatttattcaagatcctgatggctactggattgaaattttgaatcctaacaaaatggcaaccttaatgtagtgctgtgagaattctcctttgagatttcagaagaaaggaaacaatgtgattcaagatatttacataccagaagcatctaggactgatggatcactgtcccgattcaaattattcttcagtccatttccccttcctatttcagctgttccttttcacctaactgttcagtcattctggttttcaagcagtgctttatctcatgtccttgaatatagttgtgtaactttattttttaggtaataattagaacagttcccttcagaggctgcatttgccttcttctgccacctaaatattacttcccttcaaatctgcctttgaatcatcatttttnnnnnnnnnttaacatgtttttgttgtagttatcttctggggtttcaattcctcagaaacaacttttttcacaacggaaaggaaagaacactagtgttctttcagtaaagtacaaagtgtttattttacaaaaagagtaggtactcttgagagcaattcaaatcatgctgacaaggatactgatagaaaaagtgatttcttcttattataaagtacatttaaagttccaggactaacccttatttatttgggaa

SEQ ID NO: 192421 - DNA, 1088 bp, Homo Sapiens
  misc_feature (958)..(966): n is a, c, g, or t
gcttttttataatgccaactttgtacaaaaaagttggggtcccgtcgtctgtgatactgcagcgcagccatggcagaaccgcagcccccgtccggcggcctcacggacgaggccgccctcagttgctgctccgacgcggaccccagtaccaaggattttctattgcagcagaccatgctacgagtgaaggatcctaagaagtcactggatttttatactagagttcttggaatgacgctaatccaaaaatgtgattttcccattatgaagttttcactctacttcttggcttatgaggataaaaatgacatccctaaagaaaaagatgaaaaaatagcctgggcgctctccagaaaagctacacttgagctgacacacaattggggcactgaagatgatgagacccagagttaccacaatggcaattcagaccctcgaggattcggtcatattggaattgctgttcctgatgtatacagtgcttgtaaaaggtttgaagaactgggagtcaaatttgtgaagaaacctgatgatggtaaaatgaaaggcctggcatttattcaagatcctgatggctactggattgaaattttgaatcctaacaaaatggcaaccttaatgtagtgctgtgagaattctcctttgagatttcagaagaaaggaaacaatgtgattcaagatatttacataccagaagcatctaggactgatggatcactgtcccgattcaaattattcttcagtccatttccccttcctatttcagctgttccttttcacctaactgttcagtcattctggttttcaagcagtgctttatctcatgtccttgaatatagttgtgtaactttattttttaggtaataattagaacagttcccttcagaggctgcatttgccttcttctgccacctaaatattacttcccttcaaatctgcctttgaatcatcatttttnnnnnnnnnttaacatgtttttgttgtagttatcttctggggtttcaattcctcagaaacaacttttttcacaacggaatgaaagaacactagtgttctttcagtaaagtacaaagtgtttattttacaaa

SEQ ID NO: 192422 - DNA, 970 bp, Homo Sapiens; identical to SEQ ID NO: 184923

SEQ ID NO: 192423 - DNA, 1791 bp, Homo Sapiens; identical to SEQ ID NO: 180455
  misc_feature (644)..(682): n is a, c, g, or t

SEQ ID NO: 192424 - DNA, 1354 bp, Homo Sapiens; identical to SEQ ID NO: 180456
  misc_feature (400)..(445): n is a, c, g, or t

SEQ ID NO: 192425 - DNA, 1000 bp, Homo Sapiens; identical to SEQ ID NO: 180457
  misc_feature (849)..(849): n is a, c, g, or t

SEQ ID NO: 192426 - DNA, 898 bp, Homo Sapiens; identical to SEQ ID NO: 184924

SEQ ID NO: 192427 - DNA, 902 bp, Homo Sapiens; identical to SEQ ID NO: 180458

SEQ ID NO: 192428 - DNA, 903 bp, Homo Sapiens; identical to SEQ ID NO: 184925

SEQ ID NO: 192429 - DNA, 2526 bp, Homo Sapiens; identical to SEQ ID NO: 184926
  misc_feature (1447)..(1457): n is a, c, g, or t
  misc_feature (2344)..(2353): n is a, c, g, or t

SEQ ID NO: 192430 - DNA, 993 bp, Homo Sapiens
ttggggagaagggaggcggcgggcgaagcgcacgtcgagcgggggagcggcgctgcctgtggagatccgcggaggccgacaggattcgttggctgccgtccccgctgctgtgcattgggttaaaaacgacaaccaacatcagccatgaaagatccaagtcgcagcagtactagcccaagcatcatcaatgaagatgtgattattaacggtcattctcatgaagatgacaatccatttgcagagtacatgtggatggaaaatgaagaagaattcaacagacaaatagaagaggagttatgggaagaagaatttattgaacgctgtttccaagaaatgctggaagaggaagaagagcatgaatggtttattccagctcgagatctcccacaaactatggaccaaatccaagaccagtttaatgaccttgttatcagtgatggctcttctctggaagatcttgtggtcaagagcaatctgaatccaaatgcaaaggagtttgttcctggggtgaagtacggaaatatttgagtagacggggccctcttttggtggatgtagcacaatttccacactgtgaaggcagtattagaagacttaattgtaaaagctctcttgtcactgtgttacacttatgcattgccaaagtttttgttagtcttgcatgcttaataaaagtgctgagactgttactaagtaaaaagctgtcaaacatttactgaaaatagaattggccccatggcttgatgtgaagacagcaaggaaagaagcaccagtcaagttgtgaacaagcaccaaattaaaagacctaaaccttaccaaattgtctttttttgaggctaatctatcacttgttaatgtctaaactttaaaatcagtacatttaatttgagttccaactgttaagcatatttctcagacttaaatttgattatgtccccatcaaaaagaatctccattttctgaaggtctgttagttaatttgagataatttgt

SEQ ID NO: 192431 - DNA, 580 bp, Homo Sapiens
actttgtacaaaaaagttggctaaactttaccatcagtacatttaatttgagttccaactgttaagcatatttctcagacttaaatttgattatgtccccatcaaaaagaatctccattttctgaaggtctgttagttaatttgagataatttgttaaaggcaagtatgtcatattactgaggctacaagttagtcagcagatgagtgccagtccagccttttctggtatgttattgttagaaatattgagttctaatgttacatctgaggaagtatgtaatttgagaattgtaacttctaagggattcactgcatcatagctatgcctgtatggagtctaacatatgaccaataccaacccataatccagctgaacaaagatactgtaacattatgatttgagtggtgcttttccttgctttgttaaccatcacgagagtctgcagcacaacttttaacaaagctagaacagttttggcttcttaaacttcatatttgggtaggttaagctgccatacgtgttcagtgtgaatagtgtttaagttgaaaatattgtataaaaattatattttttcaaaa

SEQ ID NO: 192432 - DNA, 925 bp, Homo Sapiens
gtatgtataatccagggctaaatagttacattggactggagtagaaattaaaatacaatagatgctggagtaaatgttacatattatcatcatctgattcatcttcttccttcagagattcccttagcatatttctctgcttcttctcttatatcttttggaacaatttcatgtcttccattagttaattcaccaacccagctgagttctagttcaaaagctttatccttaacttcgtcatgtactatgtaaattatttttgcaacttctttaacgatatcacggcaggtcatttctttcatctgaagcttctctatttccgtctttgcagcttgcctggctttgccgatggcacagccccaataaccgtatgaaacacctgatgggtcaatcatgtagagttgcgcaccgtcattcacactgtaagaccctaacatgaaactgcagccaaaaggtctaacagcactgtagagtgtatatgcatgcacatacatggccactctgtctgcaagatgttttagtggaatgttgtagccaaagttagatctgaagttggaagcttcttctcttgctatgtctgctaaagaacgagcatctgccaacaaacctgctactgccattccaacatgccgatcaacattaaaaagtcttttgttggaaccttcttcataaagtttagaaaggactaatttttctaccccaaagacaacaccatctttgcatctgattccaatagctgtactactattttccacagccttcatagcatattcaacttgaaaaactcttccgtcaggagagaatgtagaggctgacaggtcatacccagtgccgattgagctcatcgtgctaaacccaaagggacgcgtagggattccaggcccggagcgcttcccctatccacaggatgccgcaaactagccaa

SEQ ID NO: 192433 - DNA, 960 bp, Homo Sapiens
ccaactttgtacaaaaaagttggcacacagtatttagaaaacctttaggcgtgaatgactcatgtgggatatatgtaaacataatgtttattttatctcacaaatgcatgtgaaatgtataattacatcttaggaatccaaaatggtctgcagagagtgagcggaggcaccagatcaatgttggttctttgcactggtgagattctgcctgatgaatattaaagatatcctgctttctgagaactctatcaccagatggcagttgggatatgggaggaactaaagcatcctgttttgtatctgtccagatcattatttctgtctcttgttttttcttcctggttcaggatacttttttaaggggttgagaattgaagattttccaaaagcgttcatgaatttagagcattccacccaatataataaaacctgttaagaatgtcagtctttgttcaaacatctgtttgttctatctccagtcattaaatcagtgctgctgcatgacactcttaactcctgactttttatatccagtcataaagttgactttcagcacaaaagatacttataaacaaataaaaaatttttatttttctctcttactgatgtaagctttggcactcttttgactggtgccattagacatcttgattattgtgacaactctagacctgcctgctttatctaatgtaatcatgctcaatgtctacaggttgtttaataatcagtcacacagagaactgaggaactgatgctgtttgtttgcttctatgatacagagatgtctaaaaacttcaaatggacatgttttgtagtttagcgacttccgtatacataaagggacatattaatactggttcatttgtaaattattattcatatagaccactgtagtagataaaactctatggtacacctgcttatgtgttgcctcccactgtgtgtgattttgtttctttt

SEQ ID NO: 192434 - DNA, 1411 bp, Homo Sapiens; identical to SEQ ID NO: 184928

SEQ ID NO: 192435 - DNA, 1331 bp, Homo Sapiens
  misc_feature (306)..(321): n is a, c, g, or t
ttggcacacttcagtggcttattcagcattcaaaatctagaagaagctgaagcatctcctgaagtcttccagtccttcttggctataatcctagaattattgtccgttcctctgaagtaattcccagaatacggtccttcctaaaccccagaaattgcctttttcagagtttatttctcatgtgcactgctgaagatgaatatccctaatccttcataaagaatcagctagagttgtcatgataaagtcagcacacacaaaaaggcttcttacacatacctgtcttaaaccatgtgtagagctttnnnnnnnnnnnnnnnnccccatatacttatgaccatcttaaatcaagaaaattgcatatttccattctggtctttctgggccagatttttatattggttttcagtaaatgtctatctataatatttcattatagagtccagtagcttaatactgacactgacttgatacagcatgaagtttctagtgccacacacagtatttagaaaacctttaggcgtgaatgactcatgtgggatatatgtaaacataatgtttattttatctcacaaatgcatgtgaaatgtataattacatcttaggaatccaaaatggtctgcagagagtgagcggaggcaccagatcaatgttggttctttgcactggtgagattctgcctgatgaatattaaagatatcctgctttctgagaactctatcaccagatggcagttgggatatgggaggaactaaagcatcctgttttgtatctgtccagatcattatttctgtctcttgttttttcttcctggttcaggatacttttttaaggggttgagaattgaagattttccaaaagcgttcatgaatttagagcattccacccaatataataaaacctgttaagaatgtcagtctttgttcaaacatctgtttgttctatctccagtcattaaatcagtgctgctgcatgacactcttaactcctgactttttatatccagtcataaagttgactttcagcacaaaagatacttataaacaaataaaaaatttttatttttctctcttactgatgtaagctttggcactcttttgactggtgccattagacatcttgattattgtgacaactctagacctgcctgctttatctaatgtaatcatgctcaatgtctacaggttgtttaataatcagtcacacagagaactgaggaactgatgctgtttgtttgcttctatgatacagagatgtctaaaaacttcaaatggacatgttttgtagtttagcgacttccgtatacataaagggacatattaatactgggt

SEQ ID NO: 192436 - DNA, 714 bp, Homo Sapiens
ctttgtacaaaaaagttggctgcactgtgttgcacagacactacttgcttttctccattcatatttttatgagtagaatctgggcttttaaatttctcttcttattctttgaagcatgttgcatactaccctggtgggatggatggttctgtaaatgaagggatatttaaacttgctactgttgttcaacaccattaatggtcagtgtgaaccattacaaagaatgtggcaacttgcttgtgcctaaaaggaggaattggaactagaatgtgtgactctgtggggactgcataggtttgttaattgacctatagctaaaccttaatgtgtttgtgtgtctatacattgctttccgcatttcaagacatccagacgctattaccaacattttcctgtgcattaacctctgcatgtgaaaacttttaacagttactgaactatgtaaatatgtgaatttttttatttaggtggatgcattttttgtctgtttactgctcttctcagctttattcaataaacttgcattttaagggttgtattggcaattttaacttaaaatgtgcatcatgatggaaggtgcagactttcttggaaggggatagtaagtttccgagaggagggtctatagaccatttgtcagaaaatcagatcagccctcaaagaaatgggggtctgtggggctagttaaaataagaaataaacttttaaaatatc

SEQ ID NO: 192437 - DNA, 863 bp, Homo Sapiens
ttggctttcttcctccctccttcctttccttcctttttctctaccaggccatttttcaaatttacatcaaagatacctgaagtgttgttatctgagaatatctgtcactcctcttatctgagaagtgaccttttatttttaagatgactacagacctatttttagatatgttttcagtacaattttgaacagcaactttttaattaaacatcttccagtgttaggaagttgagaaacgttcataggcaagtctgctgttctatgtcaccatcttttgtctcccctagtcccccaggagctctttcctttcccctctagttttgggtgtgcatgtttggagtttgtagtgggtggtttgtaaaactggaccattctgccttgctatgggttgttcaagaaagcctcattcttttctgtgaccctttcgcttttgcattcaccctccttcccacctacctgtcctggggctgttgagcagcataataatcccgggagaatgattcccctcatagaaagacaaaagcatccatcccctcatagttaagtagccactggtgtcctgggaatttctggttggatttggtgccctgaacttttttattaagaaatcagatcccagggtgagagtaacaggccatttggccaagaaagaaacctgtttgtttttcttttgaactatgaaaagaccctgtttgtgaatatattttagaaagagaggaaggatgtctgcagaactttgttctgttttctgccacaaaaatgtgaatagttcagagtgaaaaccttttgtgatggttgatgtctcaggaataagctggatctccaatgttttggggatgctttgagtctcaaaaaatattgat

SEQ ID NO: 192438 - DNA, 1024 bp, Homo Sapiens
ctttgtacaaaaaagttggggaatccaccagctacatccagctccctgaggcagagttgagaatggagagaatgttacctctcctggctctggggctcttggcggctgggttctgccctgctgtcctctgccaccctaacagcccacttgacgaggagaatctgacccaggagaaccaagaccgagggacacacgtggacctcggattagcctccgccaacgtggacttcgctttcagcctgtacaagcagttagtcctgaaggcccctgataagaatgtcatcttctccccactgagcatctccaccgccttggccttcctgtctctgggggcccataataccaccctgacagagattctcaaaggcctcaagttcaacctcacggagacttctgaggcagaaattcaccagagcttccagcacctcctgcgcaccctcaatcagtccagcgatgagctgcagctgagtatgggaaatgccatgtttgtcaaagagcaactcagtctgctggacaggttcacggaggatgccaagaggctgtatggctccgaggcctttgccactgactttcaggactcagctgcagctaagaagctcatcaacgactacgtgaagaatggaactagggggaaaatcacagatctgatcaaggaccttgactcgcagacaatgatggtcctggtgaattacatcttctttaaagccaaatgggagatgccctttgacccccaagatactcatcagtcaaggttctacttgagcaagaaaaagtgggtaatggtgcccatgatgagtttgcatcacctgactataccttacttccgggacgaggagctgtcctgcaccgtggtggagctgaagtacacaggcaatgccagcgcactcttcatcctccctgatcaagacaagatggaggaagtggaagccatgctgctcccagagaccctgaagcggtggagagactctctggagttcagagagataggtgagctctacctgccaaagttttccatctcgaggga

SEQ ID NO: 192439 - DNA, 1570 bp, Homo Sapiens; identical to SEQ ID NO: 184932

SEQ ID NO: 192440 - DNA, 986 bp, Homo Sapiens
actttgtacaaaaaagttgggggctttggaatccaccagctacatccagctccctgaggcagagttgagaatggagagaatgttacctctcctgactctggggctcttggcggctgggttctgccctgctgtcctctgccaccctaacagcccacttgacgaggagaatctgacccaggagaaccaagaccgagggacacacgtggacctcggattagcctccgccaacgtggacttcgctttcagcctgtacaagcagttagtcctgaaggcccctgataagaatgtcatcttctccccactgagcatctccaccgccttggccttcctgtctctgggggcccataataccaccctgacagagattctcaaaggcctcaagttcaacctcacggagacttctgaggcagaaattcaccagagcttccagcacctcctgcgcaccctcaatcagtccagcgatgagctgcagctgagtatgggaaatgccatgtttgtcaaagagcaactcagtctgctggacaggttcacggaggatgccaagaggctgtatggctccgaggcctttgccactgactttcaggactcagctgcagctaagaagctcatcaacgactacgtgaagaatggaactagggggaaaatcacagatctgatcaaggaccttgactcgcagacaatgatggtcctggtgaattacatcttctttaaagccaaatgggagatgccctttgacccccaagatactcatcagtcaaggttctacttgagcaagaaaaagtgggtaatggtgcccatgatgagtttgcatcacctgactataccttacttccgggacgaggagctgtcctgcaccgtggtggagctgaagtacacaggcaatgccagcgcactcttcatcctccctgatcaagacaagatggaggaagtggaagccatgctgctcccagagaccctgaagcggtggagagactctctggagttca

SEQ ID NO: 192441 - DNA, 1565 bp, Homo Sapiens; identical to SEQ ID NO: 184933
  misc_feature (429)..(441): n is a, c, g, or t
  misc_feature (483)..(492): n is a, c, g, or t
  misc_feature (870)..(900): n is a, c, g, or t

SEQ ID NO: 192442 - DNA, 1018 bp, Homo Sapiens
  misc_feature (863)..(875): n is a, c, g, or t
  misc_feature (917)..(926): n is a, c, g, or t
actttgtacaaaaaagttggcgttaatatcgccccactccgcgcctgggacgatttcttcccgggttccgatcgctttgcccggccggacttcagggacatttccaaatggaacaaccgcgtagtgagcaacctgctctattaccagaccaactacctggtggtggctgccatgatgatttccattgtggggtttctgagtcccttcaacatgatcctgggaggaatcgtggtggtgctggtgttcacagggtttgtgtgggcagcccacaataaagacgtccttcgccggatgaagaagcgctaccccacgacgttcgttatggtggtcatgttggcgagctatttccttatctccatgtttggaggagtcatggtctttgtgtttggcattacttttcctttgctgttgatgtttatccatgcatcgttgagacttcggaacctcaagaacaaactggagaataaaatggaaggaataggtttgaagaggacaccgatgggcattgtcctggatgccctagaacagcaggaagaaggcatcaacagactcactgactatatcagcaaagtgaaggaataaacataacttacctgagctagggttgcagcagaaattgagttgcagcttgcccttgtccagacctattttctgcttgcgtttttgaaacaggaggtgcacgtaccacccaattatctatggcagcatgcatgtataggccgaactattatcagctctgatgtttcagagagaagacctcagaaaccgaaagaaaaccaccaccctcctattgtgtctgaagtttcacgtgtgtttatgaaatctaatgggaaatggatcacacgatttctttaagggaattnnnnnnnnnnnnngaattacggcttttacagcaacaatacgattatcttataggnnnnnnnnnntcattgtaaagtatcaagacaatacgagtaaatgaaaaggctgttaaagtagatgacatcatgtgttagcctgttcctaatcccctaaattg

SEQ ID NO: 192443 - DNA, 1097 bp, Homo Sapiens
  misc_feature (889)..(901): n is a, c, g, or t
  misc_feature (943)..(952): n is a, c, g, or t
ctttgtacaaaaaagttggcgaagaacgcaaagctgagaacatggacgttaatatcgccccactccgcgcctgggacgatttcttcccgggttccgatcgctttgcccggccggacttcagggacatttccaaatggaacaaccgcgtagtgagcaacctgctctattaccagaccaactacctggtggtggctgccatgatgatttccattgtggggtttctgagtcccttcaacatgatcctgggaggaatcgtggtggtgctggtgttcacagggtttgtgtgggcagcccacaataaagacgtccttcgccggatgaagaagcgctaccccacgacgttcgttatggtggtcatgttggcgagctatttccttatctccatgtttggaggagtcatggtctttgtgtttggcattacttttcctttgctgttgatgtttatccatgcatcgttgagacttcggaacctcaagaacaaactggagaataaaatggaaggaataggtttgaagaggacaccgatgggcattgtcctggatgccctagaacagcaggaagaaggcatcaacagactcactgactatatcagcaaagtgaaggaataaacataacttacctgagctagggttgcagcagaaattgagttgcagcttgcccttgtccagacctatgttctgcttgcgtttttgaaacaggaggtgcacgtaccacccaattatctatggcagcatgcatgtataggccgaactattatcagctctgatgtttcagagagaagacctcagaaaccgaaagaaaaccaccaccctcctattgtgtctgaagtttcacgtgtgtttatgaaatctaatgggaaatggatcacacgatttctttaagggaattnnnnnnnnnnnnngaattacggcttttacagcaacaatacgattatcttataggnnnnnnnnnntcattgtaaagtatcaagacaatacgagtaaatgaaaaggctgttaaagtagatgacatcatgtgttagcctgttcctaatcccctagaattgtaatgtgtgggatataaattagtttttattattctcttaaaatcaagatgat

SEQ ID NO: 192444 - DNA, 849 bp, Homo Sapiens
ctttgtacaaaaaagttggcatgaaacaaccctagcaaaccgacacttctcgaaggtctgagttacttggaatcgttttaccacatgatggacagaaggaatatttcagatatctctgaaaacctcaagcgttaccttcttcagtattttaagccagtgattgacaggcaaagctggagtgacaagggctcagtctgggacaggatgctccgctcggctctcttgaagctggcctgtgacctgaaccatgctccttgcatccagaaagctgctgaactcttctcccagtggatggaatccagtggaaaattaaatataccaacagatgttttatatattgtgtattctgtgggtgctcagacaacagcaggatggaattaccttttagagcaatatgaactgtcaatgtcaagtgctgaacaaaacaaaattctgtatgctttgtcaacgagcaagcatcaggaaaagttactgaagttaattgaactaggaatggaaggaaaggttatcaagacacagaacttggcagctctccttcatgcgattgccagacgtccaaaggggcagcaactagcatgggattttgtaagagaaaattggacccatcttctgaaaaaatttgacttgggctcatatgacataaggatgatcatctctggcacaacagctcacttttcttccaaggataagttgcaagaggtgaaactattttttgaatctcttgaggctcaaggatcacatctggatatttttcaaactgttctggaaacgataaccaaaaatataaaatggctggagaagaatcttccgactctgaggacttggctaatggttaatacttaaatggtc

SEQ ID NO: 192445 - DNA, 1223 bp, Homo Sapiens; identical to SEQ ID NO: 184936
  misc_feature (295)..(318): n is a, c, g, or t
  misc_feature (649)..(681): n is a, c, g, or t
  misc_feature (704)..(718): n is a, c, g, or t

SEQ ID NO: 192446 - DNA, 1315 bp, Homo Sapiens; identical to SEQ ID NO: 184937
  misc_feature (507)..(531): n is a, c, g, or t
  misc_feature (856)..(894): n is a, c, g, or t
  misc_feature (917)..(931): n is a, c, g, or t

SEQ ID NO: 192447 - DNA, 841 bp, Homo Sapiens
  misc_feature (71)..(101): n is a, c, g, or t
  misc_feature (124)..(138): n is a, c, g, or t
ttggcattactcagtcaaaacttgtgttctcatgagcctaaggaccattctagatttattacgtgtttttnnnnnnnnnnnnnnnnnnnnnnnnnnnnnnnatccataaaatgcatatgtaaannnnnnnnnnnnnnnaagcattcacccaaacaaaaaaatcacaggtaaacccatgtttctgagatgccattattccaagcaaaataagagataatcccttcaagttaaattgaaaattttcctgaaaccatacatttcaagtgaaataagtaattctagataggacaatttaaattggataattttaaagtgtctataattgcagtggtttatttgcaaaattcctaaaaggaaaaattttatcactgccatcacagcaggtttcctcatccagatgaggaaactagacaaatgctagtgtgttttaactagctaaacaaaactaagttaaatgaacatttaaaagtttccctagcgggccattccttagcaaaatgttggaatccctgttgctacattgactaaaaggtcatgatgaatggaatatgtaagacttggctcatagaaacctaatcagatggttagaggtgttggcagtttaggacctgctgtcataaatgtgtgaacaaccttttgtaacctaacctattgacctgcatgttttttctttaccccaattcattacatggaggctcaatcttgagtttgctttactggttcagcaaaagccaggaagaacaactttgtagtaatcaaaatgttatccaactgtatattgtttactttattgtaaatactggtgaacagtggttaataaatagttttatattcctttatg

SEQ ID NO: 192448 - DNA, 1462 bp, Homo Sapiens; identical to SEQ ID NO: 184938
  misc_feature (532)..(546): n is a, c, g, or t
  misc_feature (569)..(599): n is a, c, g, or t
  misc_feature (932)..(955): n is a, c, g, or t

SEQ ID NO: 192449 - DNA, 1736 bp, Homo Sapiens; identical to SEQ ID NO: 184939
  misc_feature (91)..(141): n is a, c, g, or t
  misc_feature (649)..(672): n is a, c, g, or t
  misc_feature (1006)..(1036): n is a, c, g, or t
  misc_feature (1059)..(1073): n is a, c, g, or t

SEQ ID NO: 192450 - DNA, 1542 bp, Homo Sapiens; identical to SEQ ID NO: 184941

SEQ ID NO: 192451 - DNA, 921 bp, Homo Sapiens; identical to SEQ ID NO: 184943

SEQ ID NO: 192452 - DNA, 2995 bp, Homo Sapiens; identical to SEQ ID NO: 184945
  misc_feature (2947)..(2955): n is a, c, g, or t

SEQ ID NO: 192453 - DNA, 914 bp, Homo Sapiens
ttggaagaatttctagaaggaggagttggccatgttgaaatgttatttcgctgcaactatttagctttagttggtggtggaaaaaagccgaaataccctcccaacaaagtaatgatctgggatgacctgaagaagaagactgttattgaaatagaattttctacagaagtcaaggcagtcaaactgcggcgagatagaattgtggtggttttggactccatgattaaggtgttcacattcacacacaatccccatcagttgcacgtcttcgaaacctgctataaccccaaaggcctctgtgtcctttgtcccaatagtaacaactccctcctggcctttccgggcacgcacacgggccatgtgcagcttgtggacctggccagcacggagaagccacccgtggacattcctgcacacgagggtgtcctgagctgcattgcactcaacctgcagggaacaagaattgcaactgcatccgagaaagggacgcttataagaatatttgatacttcatcagggcatttaatccaggaactgcgaagaggatctcaagcagccaatatttactgcatcaacttcaatcaggatgcgtccctcatctgcgtatccagcgaccacggcacagtgcatatttttgcagctgaagatccaaaaaggaataaacagtccagtttggcctcagccagtttccttccaaaatacttcagttccaagtggagtttctccaagtttcaggttccctcacgctctccgtgcatttgtgcctttggaacagagccaaacgccgtcattgcaatttgtgcagacggcagctactacaaattcctgttcaaccccaagggggagtgcatccgagatgtctacgcgcagtttctagagatgaccgatgacaagctgtgactccagctgggggc

SEQ ID NO: 192454 - DNA, 1693 bp, Homo Sapiens; identical to SEQ ID NO: 184949

SEQ ID NO: 192455 - DNA, 518 bp, Homo Sapiens; identical to SEQ ID NO: 184951
  misc_feature (313)..(374): n is a, c, g, or t

SEQ ID NO: 192456 - DNA, 820 bp, Homo Sapiens
  misc_feature (174)..(184): n is a, c, g, or t
ttggcattagctagcgctcgctctactctctctaacgggaaagcagcggaatacaagagactgaactgtatctgcctctatttccaaaagactcacgttcaactttcgctcacacaaagccgggaaaattttattagtcctttttttaaaaaaagttaatataaaattatagcnnnnnnnnnnnggaacctgaactttagtaacacagctggaacaatccgcagcggcggcggcagcggcgggagaagaggtttaatttagttgattttctgtggttgttggttgttcgctagtctcacggtgatggaagctgcacattttttcgaagggaccgagaagctgctggaggtttggttctcccggcagcagcccgacgcaaaccaaggatctggggatcttcgcactatcccaagatctgagtgggacatacttttgaaggatgtgcaatgttcaatcataagtgtgacaaaaactgacaagcaggaagcttatgtactcagtgagagtagcatgtttgtctccaagagacgtttcattttgaagacatgtggtaccaccctcttgctgaaagcactggttcccctgttgaagcttgctagggattacagtgggtttgactcaattcaaagcttcttttattctcgtaagaatttcatgaagccttctcaccaagggtacccacaccggaatttccaggaagaaatagagtttcttaatgcaattttcccaaatggagcagcatattgtatgggacgtatgaaattctgactgttggtacttatatactctgggatttcccagagagtcgggtgaatcagtc

SEQ ID NO: 192457 - DNA, 2156 bp, Homo Sapiens; identical to SEQ ID NO: 184952
  misc_feature (128)..(187): n is a, c, g, or t

SEQ ID NO: 192458 - DNA, 1236 bp, Homo Sapiens
ttgggaagcggctcccggggactgggggcattttgtgttggctggagctggagtaacaagatggcgtcgtccgcggagtgacaggggtccctctgggccggagccggcggcagtggtggcagcggtatcgccgccctagctcaccgcgccccttttccagcccgcgacgtcgccgcgcaagcgaggcagcggcggccgccgagaaacaagtggcccagcctggtaaccgccgagaagcccttcacaaactgcggcctggcaaaaagaaacctgactgagcggcggtgatcaggttcccctctgctgattctgggccccgaaccccggtaaaggcctccgtgttccgtttcctgccgccctcctccgtagccttgcctagtgtaggagccccgaggcctccgtcctcttcccagaggtgtcggggcttggccccagcctccatcttcgtctctcaggatggcgagtagcagcggctccaaggctgaattcattgtcggagggaaatataaactggtacggaagatcgggtctggctccttcggggacatctatttggcgatcaacatcaccaacggcgaggaagtggcagtgaagctagaatctcagaaggccaggcatccccagttgctgtacgagagcaagctctataagattcttcaaggtggggttggcatcccccacatacggtggtatggtcaggaaaaagactacaatgtactagtcatggatcttctgggacctagcctcgaagacctcttcaatttctgttcaagaaggttcacaatgaaaactgtacttatgttagctgaccagatgatcagtagaattgaatatgtgcatacaaagaattttatacacagagacattaaaccagataacttcctaatgggtattgggcgtcactgtaataagttattccttattgattttggtttggccaaaaagtacagagacaacaggacaaggcaacacataccatacagagaagataaaaacctcactggcactgcccgatatgctagcatcaatgcacatcttggtattgagcagagtcgccgagatgacatggaatcattacgatatgttttgatgtattttaatagaaccagcctgccatggcaagggctaaggctgcaacaaagaacaaaaatatgaaagattagtgaaaagagatgtcacgcctgttgaagttttatgtaaggggtttcctgcagaatttgcgatgtacttaaacta

SEQ ID NO: 192459 - DNA, 1601 bp, Homo Sapiens; identical to SEQ ID NO: 180464
  misc_feature (88)..(115): n is a, c, g, or t
  misc_feature (618)..(646): n is a, c, g, or t
  misc_feature (984)..(1031): n is a, c, g, or t

SEQ ID NO: 192460 - DNA, 1622 bp, Homo Sapiens; identical to SEQ ID NO: 184954
  misc_feature (154)..(162): n is a, c, g, or t
  misc_feature (546)..(572): n is a, c, g, or t
  misc_feature (1075)..(1103): n is a, c, g, or t

SEQ ID NO: 192461 - DNA, 1015 bp, Homo Sapiens; identical to SEQ ID NO: 180465
  misc_feature (127)..(155): n is a, c, g, or t
  misc_feature (495)..(540): n is a, c, g, or t

SEQ ID NO: 192462 - DNA, 1506 bp, Homo Sapiens; identical to SEQ ID NO: 180466
  misc_feature (484)..(531): n is a, c, g, or t
  misc_feature (871)..(899): n is a, c, g, or t
  misc_feature (1402)..(1428): n is a, c, g, or t

SEQ ID NO: 192463 - DNA, 1053 bp, Homo Sapiens
  misc_feature (90)..(133): n is a, c, g, or t
  misc_feature (836)..(844): n is a, c, g, or t
ttggcttttcacaagagacgaaataacatgagccactataattattggctcagttccacccaatttccatattttgggtgtaatttaaannnnnnnnnnnnnnnnnnnnnnnnnnnnnnnnnnnnnnnnnnnnaccaggtttctaagcatgaattgaggaacagaagaagcagagcagatgatcggagcagcatttgtttctccccaaatctagaaattttagttcatatgtacactagccagtggttgtggacaaccatttacttggtgtaaagaacttaatttcagtataaactgactctgggcagcattggtgatgctgtatcctgagttgtagcctctgtaattgtgaatattaactgagatagtgaaacatggtgtccggttttctattgcattttttcaagtggaaaagttaactaaatggttgacacacaaaaattggtggagaaattgtgcatatgccaattttttgttaaaaccttttgttttgaactatactgctttgagatctcatttcagaagaacggcatgaacagtcttcagccacagttgtgatggttgttaaatgctcacaattgtgcattcttagggtttttccatccctggggtttgcaagttgttcacttaaaacattcttaaaatggttggcttcttgtctgcaagccagctgatatggtagcaaccaaagattccagtgtttgagcatatgaaagactctgcctgcttaattgtgctagaaataacagcatctaaagtgaagacttaagaaaaacttagtgactactagattatccttaggactctgcattaactctataatgttcttggtattnnnnnnnnngcatatttgtcacagaaatttagttaacatcttacaactgaacatgtatgtatgttgcttagataaatgtaatcactgtaaacatctatatgatctgggattttgtttttattttgaaatgggagcttttttgtttacaagttcattaaaaactaaaaactgtttctgtaaggaaatgagattttttttaaacaacaaaaaatgccttg

SEQ ID NO: 192464 - DNA, 1411 bp, Homo Sapiens
  misc_feature (150)..(183): n is a, c, g, or t
cttaaaaagccaactttgtacaaaaaagttggaaattaaaagaacatttgtctggaaatgctgccgggagcctattgtgtaaatgtaggtattttgtaaaataaccttgaaattgtaaattgacacgtgtttggtcagattgtgtcaagnnnnnnnnnnnnnnnnnnnnnnnnnnnnnnnnnnatttgaaaactactttagcaataattaattccatgattatcacattctgccattaagggatattagtaccgtaatactgaagaaattttattaagtctgaacttctggggtaggcagcttctttgtttcttttctatccacccttgtcggttgaggtatttgtttcttgactaataaaccctttgatacttttagccagaaatcagtctcataaagctatttttgagtatagtttgtgtaaaataaaaatgtttagctttggtaataacttccaagctgaactccctctagcaagatatttttcagtgcttttatttactatgcacttagactatgcactttttctgaaatatttttgtaacacttttttgtatttttgccatttgaaaaggttgtggtgtagttggtctgtaattaagttgcagatttaaaactgctgttagctttgtaaatcaaaatataggtgttttttgtcctggtatatcgtcattccatctgcagctggagctggaatcccattgatcttctagctaccattcattttcttcactgttcacaaaagaagagtgtgaaattcagtgaatgctgttactaatcctgttacgagatgaatctcatttcaccaaaattaaattatgtttttccgctaaaatgatgatacaagttgaagacacatcactctgaaattggaagacctcaccacttaaggctccacagtggcttactcagctgaactctaggttactactctttactttgttcacccattggggggtgcagtttttttaaaatgttgggagatggccattctaactactgttgaatgtctctgttttgggaaggtataacaagaaataaaaaagaatatatatgaagggagagactggttatctcctcccatatggttgtgcttatcctcttatggcttacaaatgaatatttggaggtttgctttcacaatgatttcccatcaacaaatatttttagtaggatttttcctgtttctgttagtccttgcagtactcataaatgttttaagctgagcatactgtaatagtcataagtttaatttcattataataaaaataatcaaacaaaagactttagaacccaagacaatgagctagttttccctaaagtttgctaaactattaaggaatatgttcttatagcttttgactagaatgagtcatgggaattctaagaagggatggcctagacattttta

SEQ ID NO: 192465 - DNA, 983 bp, Homo Sapiens
  misc_feature (603)..(611): n is a, c, g, or t
actttgtacaaaaaagttggcaaccatttacttggtgtaaagaacttaatttcagtataaactgactctgggcagcattggtgatgctgtatcctgagttgtagcctctgtaattgtgaatattaactgagatagtgaaacatggtgtccggttttctattgcattttttcaagtggaaaagttaactaaatggttgacacacaaaaattggtggagaaattgtgcatatgccaattttttgttaaaaccttttgttttgaactatactgctttgagatctcatttcagaagaacggcatgaacagtcttcagccacagttgtgatggttgttaaatgctcacaattgtgcattcttagggtttttccatccctggggtttgcaagttgttcacttaaaacattcttaaaatggttggcttcttgtctgcaagccagctgatatggtagcaaccaaagattccagtgtttgagcatatgaaagactctgcctgcttaattgtgctagaaataacagcatctaaagtgaagacttaagaaaaacttagtgactactagattatccttaggactctgcattaactctataatgttcttggtattnnnnnnnnngcatatttgtcacagaaatttagttaacatcttacaactgaacatgtatgtatgttgcttagataaatgtaatcactgtaaacatctatatgatctgggattttgtttttattttgaaatgggagcttttttgtttacaagttcattaaaaactaaaaactgtttctgtaagaaatgagattttttttaaacaacaaaaaatgccttgctgactcactattaaataaaaatctccccaattttttgatagactacttcaagccatttgttacatggtattcctttgcaagtcaatttaggttcgtgttatacttttcctcttttttagaaaatgaaaaagtattcttttgtctgacgggaaggcattctttc

SEQ ID NO: 192466 - DNA, 1540 bp, Homo Sapiens; identical to SEQ ID NO: 184955
  misc_feature (88)..(96): n is a, c, g, or t
  misc_feature (480)..(504): n is a, c, g, or t
  misc_feature (1007)..(1035): n is a, c, g, or t

SEQ ID NO: 192467 - DNA, 1473 bp, Homo Sapiens; identical to SEQ ID NO: 180467
  misc_feature (66)..(91): n is a, c, g, or t
  misc_feature (591)..(619): n is a, c, g, or t
  misc_feature (958)..(1005): n is a, c, g, or t

SEQ ID NO: 192468 - DNA, 1697 bp, Homo Sapiens; identical to SEQ ID NO: 184956
  misc_feature (1529)..(1537): n is a, c, g, or t

SEQ ID NO: 192469 - DNA, 1662 bp, Homo Sapiens; identical to SEQ ID NO: 184957
  misc_feature (1093)..(1101): n is a, c, g, or t
  misc_feature (1485)..(1510): n is a, c, g, or t

SEQ ID NO: 192470 - DNA, 733 bp, Homo Sapiens; identical to SEQ ID NO: 184959

SEQ ID NO: 192471 - DNA, 1060 bp, Homo Sapiens
  misc_feature (735)..(744): n is a, c, g, or t
  misc_feature (751)..(765): n is a, c, g, or t
ctttgtacaaaaaagttgggacatgttggttttatctttaaaaatggaaaaataacatccatagtgaaagatagctctgcagccagaaatggtcttctcacggaacataacatctgtgaaatcaatggacagaatgtcattggtgaaggactctcaaattgcagacatactgtcaacatctgggactgtagttactattacaatcatgcctgcttttatctttgaacatattattaagcggatggcaccaagcattatgaaaagcctaatggaccacaccattcctgaggtttaaaattcacggcaccatggaaatgtagctgaacgtctccagtttccttctttggcaacttctgtattatgcacgtgaagccttcccggagccagcgagcatatgctgcatgaggacctttctatcttacattatggctgggaatcttactctttcatctgataccttgttcagatttcaaaatagttgtagccttatcctggttttacagatgtgaaactttcaagagatttactgactttcctagaatagtttctctactggaaacctgatgcttttataagccattgtgattaggatgactgttacaggcttagctttgtgtgaaaaccagtcacctttctcctaggtaatgagtagtgctgttcatattactttagttctatagcatacttgcatctttaacatgctatcatagtacatttagaatgattgcctttgannnnnnnnnnaaattcnnnnnnnnnnnnnnnaaaatgccaattaagaacactggtttcattccatgtaagcattaaacagtgtatgtaggtttcaagagattgtgatgattcttaaattttaactaccttcacttaatatgcttgaactgtcgccttaactatgttaagcatctagactaaaagccaaaatataattattgctgcctttctaaaaacccaaaatgtagttctctattaacctgaaatgtacactagcccagaacagtttaatggtacttactgagctatagcatagctgcttagttgtttttgagatttttagtca

SEQ ID NO: 192472 - DNA, 1210 bp, Homo Sapiens
  misc_feature (728)..(737): n is a, c, g, or t
gggacatgtctccctcttaaaaatactttaaaaatggaaaaataacatccctagtgaaagatagctctgcagccagaaatggtcttctcaccccaacataacatctgtgaaatcaatggacagaatgtcattggattgaaggactctcaaattgcacacatactgtcaacatctgggactgtagttactattacaatcatgcctgcttttatctttgaacatattattaagcggatggcaccaagcattatgaaaagcctaatggaccacaccattcctgacgtttaaaattcacggcaccatggaaatgtagctgaacgtctccagtttccttctttggcaacttctgtattatgcacgtgaagccttcccggagccagcgagcatatgctgcatgaggacctttctatcttacattatggctgggaatcttactctttcatctgataccttgttcagatttcaaaatagttgtagccttatcctggttttacagatgtgaaactttcaagagatttactgactttcctagaatagtttctctactggaaacctgatgcttttataagccattgtgattaggatgactgttacaggcttagctttgtgtgaaaaccagtcacctttctcctaggtaatgagtagtgctgttcatattactttagttctatagcatacttgcatctttaacatgctatcatagtacatttagaatgattgcctttgannnnnnnnnnaaattctgtgtgtgtgtgtgtaaaatgccaattaagaacactggtttcattccatgtaagcattaaacagtgtatgtaggtttcaagagattgtgatgattcttaaattttaactaccttcacttaatatgcttgaactgtcgccttaactatgttaagcatctagactaaaagccaaaatataattattgctgcctttctaaaaacccaaaatgtagttctctattaacctgaaatgtacactagcccagaacagtttaatggtacttactgagctatagcatagctgcttagttgtttttgagattttttagtcaacacataatggaaacttctttcttctaaaagttgccagtgccacttttaagaagtgaatcactatatgtgatgtaaaagttattacactaaacaggataaacttttgactccccttttgttcatttgtggattaagtggtataatacttaattttg

SEQ ID NO: 192473 - DNA, 1773 bp, Homo Sapiens; identical to SEQ ID NO: 184960
  misc_feature (1413)..(1422): n is a, c, g, or t

SEQ ID NO: 192474 - DNA, 837 bp, Homo Sapiens
  misc_feature (179)..(188): n is a, c, g, or t
  misc_feature (195)..(209): n is a, c, g, or t
ttggctgatgcttttataagccattgtgattaggatgactgttacaggcttagctttgtgtgaaaaccagtcacctttctcctaggtaatgagtagtgctgttcatattactttagttctatagcatacttgcatctttaacatgctatcatagtacatttagaatgattgcctttgannnnnnnnnnaaattcnnnnnnnnnnnnnnnaaaatgccaattaagaacactggtttcattccatgtaagcattaaacagtgtatgtaggtttcaagagattgtgatgattcttaaattttaactaccttcacttaatatgcttgaactgtcgccttaactatgttaagcatctagactaaaagccaaaatataattattgctgcctttctaaaaacccaaaatgtagttctctattaacctgaaatgtacactagcccagaacagtttaatggtacttactgagctatagcatagctgcttagttgtttttgagattttttagtcaacacataatggaaacttctttcttctaaaagttgccagtgccacttttaagaagtgaatcactatatgtgatgtaaaagttattacactaaacaggataaacttttgactccccttttgttcatttgtggattaagtggtataatacttaattttggcatttgactcttaagattatgtaacctagctactttgggatggtcttagaatatttttctgataacttgttccttttcctgactcctccttgcaaacaaaatgatagttgacactttatcctgatttttttcttctttttggtttatgtctattctatttaaaatatgtataaat

SEQ ID NO: 192475 - DNA, 3001 bp, Homo Sapiens; identical to SEQ ID NO: 184961

SEQ ID NO: 192476 - DNA, 1488 bp, Homo Sapiens
  misc_feature (87)..(95): n is a, c, g, or t
  misc_feature (1347)..(1366): n is a, c, g, or t
ttggcttattttaatgtcaaatgtttatttctatgccatagttgcctcagcacaatttgtaaaagaaaggaatccaaaaaaatgaannnnnnnnnagtcaggatattttctctgcagttataagaaagaaaataaacaccatgataccagaatcaccatttctttcacatcatcactctagtaagttgcatctaaatattttccttggttgccactttttttaggatggagaaatatccacaggaaaaaatgtctgaattcattaaaataaccttgggatagtctttgccagactgtatcgagaacatctttgtttgggtatgctatatcgctaattgccatattcttattatttaatataacaggcatactttattatataaaacaaagtgcactaaagatgaacaatgttacaaacaaactgaaatttggtgtatcttaaatcttcgggtgatgattagatagtagctgaagcgtgggtatacaaatttcttgttaatacaaatgcaactcttttctgtgatgaaaatgcacttagtagcctagtactttttgctttagcagatagatagggcatccaatacaactgaaacaacctgataacaaattaattttatttttcaataaaaaggaatgctctggttttttaactggctccttgaggaagccagaagatggcatctgctctttaaacaggcttctcttatctgatttgagacacaaatccaccaagattctttcttacagtggaagtaggcaccacccctcagatcacgaggcccctaggaagaagcctgtggaaatcagcctgtgatgtgtggtggtgggccagcacctagaagacacatggtggttgtgcacataaatcccttcagcggactcagtggaaggatgagaattctgtaagttcatgcacattttattgagtagtaatataaaatgctttttctttttcattgttacaagtgcatgctttgattgccaacatgtcagaagtcaaattacaaaggcaaggctttaggctgtagtgaattacttgggcacttatacaattgttaaaaaatatgaatggacttttgttgttgttgttttcagaatgaaccagttgtaacccgtaactgatatacaaagggaaaaaagtgaaaaaagtacatattttgtggcacatgacagaacagaacaaaataactaaactgttatgacattaacagttgccatgcatttagagtttcacatgtaactacaaacttattataatttcacaaggtttgctaaacatgctaaccatctacatgtgcattgacaagcttatgttaaaaactttaaagaatactctcccctttagannnnnnnnnnnnnnnnnnnngattacaaaatttcaaaggcattaagcattttagagaatataaagtacgccagtatacatacatttccagtatatgtcagaccactaagcgcattacagtcccatacaggccgatacagcca

SEQ ID NO: 192477 - DNA, 1493 bp, Homo Sapiens; identical to SEQ ID NO: 184963
  misc_feature (204)..(213): n is a, c, g, or t
  misc_feature (502)..(537): n is a, c, g, or t
  misc_feature (866)..(880): n is a, c, g, or t
  misc_feature (904)..(913): n is a, c, g, or t
  misc_feature (1036)..(1055): n is a, c, g, or t

SEQ ID NO: 192478 - DNA, 1163 bp, Homo Sapiens
tttgtacaaaaaagttgggaagccggccccttaggactggttccagttcactcggcagcggcgcctggcggagggggagagcgcgggccgcgcggtcgggaagcgaagaggcgggcgggccatcgaggagcgcggagagaaaaggcgcgagcggccaggagggctcaggccgagacaccttgcagctgccgccgccgccaccgagccgccgctgtgctcactgatccgcctccagggccaccgccatgtcgagccgcggtgggaagaagaagtccaccaagacgtccaggtctgccaaagcaggagtcatctttcccgtggggcggatgctgcggtacatcaagaaaggccaccccaagtacaggattggagtgggggcacccgtgtacatggccgccgtcctggaatacctgacagcggagattctggagctggctggcaatgcagcgagagacaacaagaagggacgggtcacaccccggcacatcctgctggctgtggccaatgatgaagagctgaatcagctgctaaaaggagtcaccatagccagtgggggtgtgttacccaacatccaccccgagttgctagcgaagaagcggggatccaaaggaaagttggaagccatcatcacaccacccccagccaaaaaggccaagtctccatcccagaagaagcctgtatctaaaaaagcaggaggcaagaaaggggcccggaaatccagaagaagcagggtgaagtcagtaaggcagccagcgccgacagcacaaccgagggcacacctgccgacggcttcacagtcctctccaccaagagcctcttccttggccagaagctgaaccttattcacagtgaaatcagtaatttagccggctttgaggtggaggccataatcaatcctaccaatgctgacattgaccttaaagatgacctaagaaacacgctggagaaaaaaggtggcaaggagtttgtggaagctgtcctggaactccggaaaaagaacgggcccttggaagtagctggagctgctgtcagcgcaggccatggcctgcctgccaagtttgtgatccactgtaatagtccagtttggggtgcagacaagtgtgagaacttctgggaaaagacagtgaaaactgcttggccctggctgatgatagaagctgaaa

SEQ ID NO: 192479 - DNA, 627 bp, Homo Sapiens
  misc_feature (149)..(163): n is a, c, g, or t
actttgtacaaaaaagttggaaacggtgtacctcgtgctttttgacagcgagagtataggcatctatgtgcaggaaatggccaagctggacgccaactaggctgagcaatgacagaaccagctgcaccatgtaccccaccttcagtttnnnnnnnnnnnnnnntccccttcactcctactgggaggtgggacccctttcattttcagttttgctcatctagggaaaataaggctttggtttccagtttaattgtttttgaccttctaaaatgtttttatgttagcactgatagttggcattactgttgttaagcactgtgttccagaccgtgtctgacttagtgtaacctaggagattttatagttttattttaatgaaaccctgattgacgcacagcagtggggagaacagcgtcttttacctgtcaccgaagccaggaagccccgtttgtaagcgtgtgttgtggtgctttattgtacatcctccagtggcgttctttttactctaatgttcttttggtttcccccctcagaagaatcatgaatttgcaacaaacctaatttttggttactttttgtcttattgatggatttgaaaatgaaacatttaataaggcaaaacagaat

SEQ ID NO: 192480 - DNA, 633 bp, Homo Sapiens
  misc_feature (232)..(246): n is a, c, g, or t
ctttgtacaaaaaagttggcggttttccaaacgcagacagcagctcagctgattctgaaggccatctccagttacttcgtgtctacaatgtcctcttccatcaaaacggggtacttcgtgctttttgacagcgagagtataggcatctatgtgcaggaaatggccaagctggacgccaactaggctgagcaatgacagaaccagctgcaccatgtaccccaccttcagtttnnnnnnnnnnnnnnntccccttcactcctactgggaggtgggacccctttcattttcagttttgctcatctagggaaaataaggctttggtttccagtttaattgtttttgaccttctaaaatgtttttatgttagcactgatagttggcattactgttgttaagcactgtgttccagaccgtgtctgacttagtgtaacctaggagattttatagttttattttaatgaaaccctgattgacgcacagcagtggggagaacagcgtcttttacctgtcaccgaagccaggaagccccgtttgtaagcgtgtgttgtggtgctttattgtacatcctccagtggcgttctttttactctaatgttcttttggtttcccccctcagaagaatcatgaatttgc

SEQ ID NO: 192481 - DNA, 1395 bp, Homo Sapiens; identical to SEQ ID NO: 184965

SEQ ID NO: 192482 - DNA, 1693 bp, Homo Sapiens; identical to SEQ ID NO: 180469
  misc_feature (64)..(76): n is a, c, g, or t
  misc_feature (1273)..(1282): n is a, c, g, or t

SEQ ID NO: 192483 - DNA, 1067 bp, Homo Sapiens
  misc_feature (829)..(872): n is a, c, g, or t
tttttctaatacagagaaatttacatatctatttggaacgtctatgatagttttaagcagaaattaaatccatttgccctttacccgtgacaagacacatcatcttccaaagcgtgcagaagggggcccagatgtttcctcatcacaggaagagtgcaccacatcgctgcagaaactcagtcctcagaaaaagttaccaggcaacaaggtagaagaataggatatcatgaataataaaggacatataatggataggctagattacagactcttggtgtgtttgcaggaagccagctttcaattgtgtccaagcctgttttcaagaaaacagtttttcactgaaagtgattaccttatcccattgtgcttcccttgagtctctgcaaattcttccttgacatgttcattgtgattgtggatgagcacaggctagcttgggactcagattattttcctgcaaggcacctgacactgttgcatgttgttgacaaggtgtctgcaggagaaactagatagcttgtttcaaataggctgggtatgaggccagagtctggtctctccttttgattcggtgtcctgtggagaactacctttcattgctgtctaaatgcctcaaaaaattaagcagttctatagatcaatttctccatcaaaaagtatacaaacagagaatgcacttcaccaggaacaagtctgagtaatttttttctctttcctcacttgaaaataaactctccatgttacaagcaaaacaattctccctacattcactctagttaactggatgagaagtttttgtttctatcttatgttcattcaaaaaaacaannnnnnnnnnnnnnnnnnnnnnnnnnnnnnnnnnnnnnnnnnnntagtaagacacacattgttataatcttgaccccttaaataggggacttaaaaatgtcaatcataaaactcaaaactgtaatccacaaaactggagtttcaacttctccccaggttgccgctgtgtttgcaattaatttggtctaatgtggttgttattccatttaataacggctatttaggcaaataaaacccaa

SEQ ID NO: 192484 - DNA, 1977 bp, Homo Sapiens; identical to SEQ ID NO: 180471
  misc_feature (513)..(543): n is a, c, g, or t
  misc_feature (922)..(937): n is a, c, g, or t
  misc_feature (1815)..(1858): n is a, c, g, or t

SEQ ID NO: 192485 - DNA, 1702 bp, Homo Sapiens; identical to SEQ ID NO: 180473

SEQ ID NO: 192486 - DNA, 915 bp, Homo Sapiens
tgcacaaattgatgagcagtgctttttcattaaaaacaactttgtacaaaaaagttgggtgatggagatgcctcaacctagtgctgtggtattacagtgtggtgcagactcattatctggtgatagactgggttgtttcaatctaacagtcaaaggtcatgctaaatgtgtagaagttgtaaaaacttttaacttaccattactgatgcttggaggaggtggctacacaatccgtaatgttgctcgatgttggacatatgagactgcagttgcccttgattgtgagattcccaatgagttgccatataatgattactttgagtattttggaccagacttcaaactgcatattagtccttcaaacatgacaaaccagaacactccagaatatatggaaaagataaaacagcgtttgtttgaaaatttgcgcatgttacctcatgcacctggtgtccagatgcaagctattccagaagatgctgttcatgaagacagtggagatgaagatggagaagatccagacaagagaatttctattcgagcatcagacaagcggatagcttgtgatgaagaattctcagattctgaggatgaaggagaaggaggtcgaagaaatgtggctgatcataagaaaggagcaaagaaagctagaattgaagaagataagaaagaaacagaggacaaaaaaacagacgttaaggaagaagataaatccaaggacaacagtggtgaaaaaacagataccaaaggaaccaaatcagaacagctcagcaacccctgaatttgacagtctcaccaatttcagaaaatcattaaaaagaaaatattgaaagggaaaatgtttttctttttgaagacttctggcttcctttttatactacttttgccatggactgtatttatttttcaaatggg

SEQ ID NO: 192487 - DNA, 1847 bp, Homo Sapiens; identical to SEQ ID NO: 184970

SEQ ID NO: 192488 - DNA, 914 bp, Homo Sapiens; identical to SEQ ID NO: 180475
  misc_feature (106)..(115): n is a, c, g, or t
  misc_feature (153)..(165): n is a, c, g, or t
  misc_feature (169)..(260): n is a, c, g, or t
  misc_feature (811)..(823): n is a, c, g, or t

SEQ ID NO: 192489 - DNA, 905 bp, Homo Sapiens
  misc_feature (482)..(492): n is a, c, g, or t
ttggctggcatcagcactttcactaagcttcacagataattctgatgcatactccaggcctgaaccactgatcaatttgaaacatgcataacaaagcaaaaaaagttttgtttcaccttttgaaatacagttaactcttttaccatgccagagatcattcagagagacaggtcgttgctccggagtgatacagatctggcagtacccagcccttgtgtgtgtgcgttagctcagcacctgcccacactgcgagcccccgtaggatgtgccttgtccttccctgtttcagcacttaacacactacctggtacagagtatgtagtgggcatctgttgaatgaatgcttttcccagtagcagtgtattcatacaatattaatataattgtcccctggcttacagataaaaatgaaagcatcaagtgcccagtgagtgagacccaggtgttcttcctccacccctagtggtcccctgggcaggtcnnnnnnnnnnngtaacactcaccagtctgttctgtagtcaatcattgattgacttgtctgtgaacttgcaggaactgtttcatagtttcattagcacagagtaaacatgtttgccatgcaaggttattttgcatctgcatttaagtgataatgttgaatcaatgaaaagtgttgattaagcagtagttgtagatatgctaagtttttcaaattactaatatcaagtggagattgtttttacttttaagggtattgctttcgtgatagcataaataatggttttccttttttgtaaatgtaaattaattgctggcaacttttgtattcccatagactggggaagcttaattgcctttacaagtacttatgtacaactttgtatcaattttctgtaatagtttatgctttagtactatatatgtac

SEQ ID NO: 192490 - DNA, 1545 bp, Homo Sapiens; identical to SEQ ID NO: 180476
  misc_feature (551)..(563): n is a, c, g, or t
  misc_feature (1305)..(1316): n is a, c, g, or t

SEQ ID NO: 192491 - DNA, 909 bp, Homo Sapiens; identical to SEQ ID NO: 180477

SEQ ID NO: 192492 - DNA, 1033 bp, Homo Sapiens
  misc_feature (579)..(599): n is a, c, g, or t
  misc_feature (963)..(971): n is a, c, g, or t
ttggctgagccctgcgacagcctggacagcaactcaggatggcatcaggcagggcacgctgcacccgaaaactccggaactgggtggtggagcaagtggagagtgggcagtttcccggagtgtgctgggatgatacagctaagaccatgttccggattccctggaaacatgcaggcaagcaggacttccgggaggaccaggatgctgccttcttcaaggcctgggcaatatttaagggaaagtataaggagggggacacaggaggtccagctgtctggaagactcgcctgcgctgtgcactcaacaagagttctgaatttaaggaggttcctgagaggggccgcatggatgttgctgagccctacaaggtgtatcagttgctgccaccaggaatcgtctctggccagccagggactcagaaagtaccatcaaagcgacagcacagttctgtgtcctctgagaggaaggaggaagaggatgccatgcagaactgcacactcagtccctctgtgctccaggactccctcaataatgaggaggagggggccagtgggggagcagtccattcagacattgggnnnnnnnnnnnnnnnnnnnnncctgagccacaggaagttacagacacaactgaggccccctttcaaggggatcagaggtccctggagtttctgcttcctccagagccagactactcactgctgctcaccttcatctacaacgggcgcgtggtgggcgaggcccaggtgcaaagcctggattgccgccttgtggctgagccctcaggctctgagagcagcatggagcaggtgctgttccccaagcctggcccactggagcccacgcagcgcctgctgagccagcttgagaggggcatcctagtggccagcaacccccgaggcctcttcgtgcagcgcctttgccccatccccatctcctgggggacccatcttccacctcacctcnnnnnnnnncctgtctcctttgaagtagactcattcttcacccgattgacctgtcctctttgtgataattc

SEQ ID NO: 192493 - DNA, 1464 bp, Homo Sapiens; identical to SEQ ID NO: 184972
  misc_feature (579)..(599): n is a, c, g, or t

SEQ ID NO: 192494 - DNA, 909 bp, Homo Sapiens
ctttgtacaaaaaagttggctcccgtcctgcgatgggttgcgacgggggaacaatccccaagaggcatgaactggtgaaggggccgaagaaggttgagaaggtcgacaaagatgctgaattagtggcccaatggaactattgtactctaagtcaggaaatattaagacgaccaatagttgcctgtgaacttggcagactttataacaaagatgccgtcattgaatttctcttggacaaatctgcagaaaaggctcttgggaaggcagcatctcacattaaaagcattaagaatgtgacagagctgaagctttctgataatcctgcctgggaaggggataaaggaaacactaaaggtgacaagcacgatgacctccagcgggcgcgtttcatctgccccgttgtgggcctggagatgaacggccgacacaggttctgcttccttcggtgctgcggctgtgtgttttctgagcgagccttgaaagagataaaagcggaagtttgccacacgtgtggggctgccttccaggaggatgatgtcatcgtgctcaatggcaccaaggaggatgtggacgtgctgaagacaaggatggaggagagaaggctgagagcgaagctggaaaagaaaacaaagaaacccaaggcagcagagtctgtttcaaaaccagatgtcagtgaagaagccccagggccatcaaaagttaagacagggaagcctgaagaagccagccttgattctagagagaagaaaaccaacttggctcccaaaagcacagcaatgaatgagagctcttctggaaaagctgggaagcctccgtgtggagccacaaagaggtccatcgctgacagtgaagaatcggaggcctacaagtccctctttaccactcacagctccgccaagcgctccaagg

SEQ ID NO: 192495 - DNA, 1324 bp, Homo Sapiens; identical to SEQ ID NO: 180478

SEQ ID NO: 192496 - DNA, 962 bp, Homo Sapiens; identical to SEQ ID NO: 184975
  misc_feature (248)..(278): n is a, c, g, or t
  misc_feature (856)..(865): n is a, c, g, or t

SEQ ID NO: 192497 - DNA, 2783 bp, Homo Sapiens; identical to SEQ ID NO: 184976
  misc_feature (210)..(219): n is a, c, g, or t
  misc_feature (797)..(827): n is a, c, g, or t

SEQ ID NO: 192498 - DNA, 852 bp, Homo Sapiens; identical to SEQ ID NO: 184977
  misc_feature (87)..(96): n is a, c, g, or t
  misc_feature (674)..(704): n is a, c, g, or t

SEQ ID NO: 192499 - DNA, 1687 bp, Homo Sapiens; identical to SEQ ID NO: 184979

SEQ ID NO: 192500 - DNA, 1200 bp, Homo Sapiens; identical to SEQ ID NO: 180480

SEQ ID NO: 192501 - DNA, 1444 bp, Homo Sapiens; identical to SEQ ID NO: 184983
  misc_feature (504)..(513): n is a, c, g, or t
  misc_feature (1104)..(1153): n is a, c, g, or t

SEQ ID NO: 192502 - DNA, 911 bp, Homo Sapiens; identical to SEQ ID NO: 184984
  misc_feature (723)..(734): n is a, c, g, or t

SEQ ID NO: 192503 - DNA, 1603 bp, Homo Sapiens; identical to SEQ ID NO: 184985
  misc_feature (1270)..(1279): n is a, c, g, or t

SEQ ID NO: 192504 - DNA, 1135 bp, Homo Sapiens; identical to SEQ ID NO: 184986
  misc_feature (194)..(243): n is a, c, g, or t
  misc_feature (973)..(984): n is a, c, g, or t

SEQ ID NO: 192505 - DNA, 1007 bp, Homo Sapiens
  misc_feature (684)..(693): n is a, c, g, or t
ttgtacaaaaaagttggctcaagatgatggtgaagatgaaaacaacacttggaatggaaattccactcaacagatgtagtgtgacaagtataatatgtgcaataatcattgtttctcttatgatttaattcaactaaaattctactggagaagtgggactgctttatattttccaactggtctataaaatgtctctttattcctgcttagtgggtgtgggttgaaggtgtttaactcagaaaagtaaagacaggaaataactctctgctaggtccttgcttatatggcaaccactgctagaaccctaaaagaaccaaaaatctgccacagcctgcctccatcagcttcttatttagtatttcatatgcccattagccctatgcttcagatgacacgttttgtttagagctactttgctccaagactcttaagcccaaagtaactggtatgtcactgagtaacttgactcggtgtcagagcattttaactagccactcagatgagaatttatgtttaacttctctttttactcatcagctgcaagcaaaatcttgtagtttttaatcttaaacactgaataaaaaaactttcccctaaattggaatgatcttagttttgctttgagttttgttatctagcatctttttgttgcacagggctctattgaggtcctatgtctctgannnnnnnnnnccccagtattgccctggagctgtctctggaaagtagctggcgaggttaccttaactatcactgaagaaagaaattttctgacacactgatggcatgtgacttgtctcctaagtcagtgaggcatcactttgtttgcataaagtatacggtttgttaaggcctttgttcttgtgagatgcaaaacagctgctagtctgcaacctagttttccctctcacctttaactgacgtttttgtcctcataattacacaggaccttagagtacctatatggacaaaaagtatagaataaaaatatgcctttagtcatttgg

SEQ ID NO: 192506 - DNA, 3405 bp, Homo Sapiens; identical to SEQ ID NO: 184987
  misc_feature (836)..(918): n is a, c, g, or t
  misc_feature (2348)..(2358): n is a, c, g, or t
  misc_feature (2949)..(2998): n is a, c, g, or t

SEQ ID NO: 192507 - DNA, 808 bp, Homo Sapiens
  misc_feature (563)..(600): n is a, c, g, or t
ccaactttgtacaaaaaagttgggcggataacctcatccagaacctggatgccaatcatgatgggcgcatcagcttcgatgagtactggaccttgataggcggcatcaccggccccatcgccaaactcatccatgagcaggagcagcagagcagcagctagagacccctttggccacaccttccaggcactggcctgatgccccgccctggtgctctccccaggctccctcctcagcctcctgcccacccagggccctttactctcttctccctccagaccttcctctgacccttgctgaactggggtccctttgtgagtgtctcagtctagaggtacctccctccctggggggtctcagctcctggagtcgcaggcccttggggcccctctgtgagatctcaatgctgtctggggaccctaagagttttctcacctgttcagtctcatctaaccttccaatgtctgatgttcctgccaaattcctgcctgattctgggtccgtcctgacctccaaaggtcagcttggtgcttgaggtctccctgctcttggtggcagtggtnnnnnnnnnnnnnnnnnnnnnnnnnnnnnnnnnnnnnnagacctctccactttcccttagcccctctgctgggtagagaggcactttcagggacttccctccagctgcctcttcatctgggaatgagctaagcaaggctgagcctcctcctgttgcttgaaataatgatgatataaaaggctggatttggagtttgtatcccctggtccctctggggatgctcattaaaaccttcccactccttgg

SEQ ID NO: 192508 - DNA, 1106 bp, Homo Sapiens; identical to SEQ ID NO: 184989

SEQ ID NO: 192509 - DNA, 2378 bp, Homo Sapiens; identical to SEQ ID NO: 184991

SEQ ID NO: 192510 - DNA, 1671 bp, Homo Sapiens
ttggcatacttaaccgcgtctgttctcggcagcggcacagcgaggtcggcagcggcacagcgaggtcggcagcggcacagcgaggtcggcagcggcacagcgaggtcggcagcggcacagcgaggtcggcagcggcagcgaggtcggcagcggcacagcgaggtcggcagcggcgcgcgctgtgctcttccgcggactctgaatcatggcgaccacggccacgatggcgacctcgggctcggcgcgaaagcggctgctcaaagaggaagacatgactaaagtggaattcgagaccagcgaggaggtggatgtgacccccacgttcgacaccatgggcctgcgggaggacctgctgcggggcatctacgcttacggttttgaaaaaccatcagcaatccagcaacgagcaatcaagcagatcatcaaagggagagatgtcatcgcacagtctcagtccggcacaggaaaaacagccaccttcagtatctcagtcctccagtgtttggatattcaggttcgtgaaactcaagctttgatcttggctcccacaagagagttggctgtgcagatccagaaggggctgcttgctctcggtgactacatgaatgtccagtgccatgcctgcattggaggcaccaatgttggcgaggacatcaggaagctggattacggacagcatgttgtcgcgggcactccagggcgtgtttttgatatgattcgtcgcagaagcctaaggacacgtgctatcaaaaatgttggttttggatgaagctgatgaaatgttgaataaaggtttcaaagagcagatttacgatgtatacaggtacctgcctccagccacacaggtggttctcatcagtgccacgctgccacacgagattctggagatgaccaacaagttcatgaccgacccaatccgcatcttggtgaaacgtgatgaattgactctggaaggcatcaagcaatttttcgtggcagtggagagggaagagtggaaatttgacactctgtgtgacctctacgacacactgaccatcactcaggcggtcatcttctgcaacaccaaaagaaaggtggactggctgacggagaaaatgagggaagccaacttcactgtatcctcaatgcatggagacatgccccagaaagagcgggagtccatcatgaaggagttccggtcgggcgccagccgagtgcttatttctacagatgtctgggccagggggttggatgtccctcaggtgtccctcatcattaactatgatctccctaataacagagaattgtacatacacagaattgggagatcaggtcgatacggccggaagggtgtggccattaactttgtaaagaatgacgacatccgcatcctcagagatatcgagcagtactattccactcagattgatgagatgccgatgaacgttgctgatcttatctgaagcagcagatcagtgggatgagggagactgttcacctgctgtgtactcctgtttggaagtatttagatccagattctacttaatggggtttatatggactttcttctcataaatggcctgcccgtctcccttcctttgaagaggatatggggattctgctctcttttcttatttacatgtaaataatacattgttctaagtcttttttcattaaaaatttaaaactttt

SEQ ID NO: 192511 - DNA, 910 bp, Homo Sapiens; identical to SEQ ID NO: 180482

SEQ ID NO: 192512 - DNA, 4538 bp, Homo Sapiens; identical to SEQ ID NO: 184994
  misc_feature (4098)..(4116): n is a, c, g, or t

SEQ ID NO: 192513 - DNA, 1648 bp, Homo Sapiens; identical to SEQ ID NO: 184996
  misc_feature (1519)..(1551): n is a, c, g, or t

SEQ ID NO: 192514 - DNA, 1906 bp, Homo Sapiens; identical to SEQ ID NO: 184997
  misc_feature (218)..(230): n is a, c, g, or t
  misc_feature (709)..(729): n is a, c, g, or t
  misc_feature (1201)..(1277): n is a, c, g, or t
  misc_feature (1374)..(1434): n is a, c, g, or t

SEQ ID NO: 192515 - DNA, 1167 bp, Homo Sapiens; identical to SEQ ID NO: 184999
  misc_feature (486)..(500): n is a, c, g, or t
  misc_feature (532)..(548): n is a, c, g, or t
  misc_feature (608)..(632): n is a, c, g, or t
  misc_feature (700)..(709): n is a, c, g, or t

SEQ ID NO: 192516 - DNA, 1901 bp, Homo Sapiens; identical to SEQ ID NO: 185000
  misc_feature (1482)..(1496): n is a, c, g, or t
  misc_feature (1528)..(1542): n is a, c, g, or t
  misc_feature (1578)..(1631): n is a, c, g, or t
  misc_feature (1694)..(1703): n is a, c, g, or t

SEQ ID NO: 192517 - DNA, 1414 bp, Homo Sapiens; identical to SEQ ID NO: 185002
  misc_feature (230)..(259): n is a, c, g, or t

SEQ ID NO: 192518 - DNA, 2320 bp, Homo Sapiens; identical to SEQ ID NO: 185003
  misc_feature (2058)..(2087): n is a, c, g, or t

SEQ ID NO: 192519 - DNA, 1708 bp, Homo Sapiens; identical to SEQ ID NO: 185005

SEQ ID NO: 192520 - DNA, 931 bp, Homo Sapiens; identical to SEQ ID NO: 185006

SEQ ID NO: 192521 - DNA, 596 bp, Homo Sapiens
  misc_feature (401)..(436): n is a, c, g, or t
cttaaaaaagccaactttgtacaaaaaagttggcgcccgcgcccagtcttctcagatgaggctgcgcccctgcgggcagctctaaggaccgtcctgcgagatcgccttccaaccccacttttttctggaaaggaggggtcctgcaggggcaagcaggagctagcagccgcctacttggtgctaacccctcgatgtacatagcttttctcagctgcctgcgcgccgccgacagtcagcgctgtgcgcgcggagagaggtgcgccgtgggctcaagagcctgagtgggtggtttgcgaggatgagggacgctatgcctcatgcccgttttgggtgtcctcaccatcaaggctgctcgggggcccctggttcgtccctgagcctttttcacagtgcataagcannnnnnnnnnnnnnnnnnnnnnnnnnnnnnnnnnnnaaatcaatcatgttacactaatagaaacttggcactcctgtgccctctgcctggacaagcacatagcaagctgaactgtcctaaggcaggggcgagcacggaacaatggggccttcagctggagctgtggacttttgtacatacactaaattctgaaatt

SEQ ID NO: 192522 - DNA, 1022 bp, Homo Sapiens; identical to SEQ ID NO: 185007

SEQ ID NO: 192523 - DNA, 640 bp, Homo Sapiens
cctataaaagccaactttgtacaaaaaagttggcggcgaacgcggagagcacgccatgaaggcctcgggcacgctacgagagtacaaggtagtgggtcgctgcctgcccacccccaaatgccacacgccgcccctctaccgcatgcgaatctttgcgcctaatcatgtcgtcgccaagtcccgcttctggtactttgtatctcagttaaagaagatgaagaagtcttcaggggagattgtctactgtgggcaggtgtttgagaagtcccccctgcgggtgaagaacttcgggatctggctgcgctatgactcccggagcggcacccacaacatgtaccgggaataccgggacctgaccaccgcaggcgctgtcacccagtgctaccgagacatgggtgcccggcaccgcgcccgagcccactccattcagatcatgaaggtggaggagatcgcggccagcaagtgccgccggccggctgtcaagcagttccacgactccaagatcaagttcccgctgccccaccgggtcctgcgccgtcagcacaagccacgcttcaccaccaagaggcccaacaccttcttctaggtgcagggccctcgtccgggtgtgcccccaataaactcaggaacgcccggtgaa

SEQ ID NO: 192524 - DNA, 1424 bp, Homo Sapiens
actttgtacaaaaaagttggcagcggatagaggacacgaccaagatggcggcggtgtctggcttggtgcggagaccccttcgggaggtctccgggctgctgaagaggcgctttcactggaccgcgccggctgcgctgcaggtgacagttcgtgatgctataaatcagggtatggatgaggagctggaaagagatgagaaggtatttctgcttggagaagaagttgcccagtatgatggggcatacaaggttagtcgagggctgtggaagaaatatggagacaagaggattattgacactcccatatcagagatgggctttgctggaattgctgtaggtgcagctatggctgggttgcggcccatttgtgaatttatgaccttcaatttctccatgcaagccattgaccaggttataaactcagctgccaagacctactacatgtctggtggccttcagcctgtgcctatagtcttcaggggacccaatggtgcctcagcaggtgtagctgcccagcactcacagtgctttgctgcctggtatgggcactgcccaggcttaaaggtggtcagtccctggaattcagaggatgctaaaggacttattaaatcagccattcgggataacaatccagtggtggtgctagagaatgaattgatgtatggggttccttttgaatttcctccggaagctcagtcaaaagattttctgattcctattggaaaagccaaaatagaaaggcaaggaacacatataactgtggtttcccattcaagacctgtgggccactgcttagaagctgcagcagtgctatctaaagaaggagttgaatgtgaggtgataaatatgcgtaccattagaccaatggacatggaaaccatagaagccagtgtcatgaagacaaatcatcttgtaactgtggaaggaggctggccacagtttggagtaggagctgaaatctgtgccaggatcatggaaggtatttcaaagaaactggttctagaatacagtcaagctatagtaaacatcatgtacctgaatacgtacaggataaagagattgaaagctaggagtggccaaacgacttcaactttaaacttgtaagtttggcatttctcttcaggcacatatttttaaaagcaaatccagaaagcggttccccataattagcattccttacattttctcttcctggtcagccacacctctgtgccaaggtggtagtgcccagctggcatttgcactctctcagttgagccttccttctcctaggtcctgcgttcaatttcctggatgctcctgctgttcgtgtcactggtgctgatgtccctatgccttatgcaaagattctagaggacaactctatacctcaggtcaaagacatcatatttgcaataaagaaaacattaaatatttagtttggac

SEQ ID NO: 192525 - DNA, 3313 bp, Homo Sapiens; identical to SEQ ID NO: 185011
  misc_feature (3109)..(3118): n is a, c, g, or t

SEQ ID NO: 192526 - DNA, 1152 bp, Homo Sapiens; identical to SEQ ID NO: 185014
  misc_feature (101)..(112): n is a, c, g, or t
  misc_feature (925)..(960): n is a, c, g, or t

SEQ ID NO: 192527 - DNA, 484 bp, Homo Sapiens
cattgggcgtgtcctgcacttccacagcaatgccccgctgcctcatggcttgaagcacctgggaatgcagcctctcggtccggtctccagtccccaccaccacgatctctatccggggctccagcaaccagaagagggaaaagctgtcttcggtgatgtcctggtgggatcccacgttccactgcaccaccgagtgcgggagcagagcgcaggggccgagcacgcggtttccgtttatcatgaagccgcggctgttgtagctgtcgatgtacattgcctgagcggcctcgcgttgcagcagagagatgcgcgtccgctgatacagctcgtcatccgccggcgagagccgatgccctcgccgcggggcccagggaagctcaacgggcggacagcgcagcgagggtcgcgctcggtacaagctacgtagcgcgagagcggtggccatggctgaccaagggggcggcgaagccaacttttttgtaca

SEQ ID NO: 192528 - DNA, 1880 bp, Homo Sapiens; identical to SEQ ID NO: 185016
  misc_feature (1113)..(1122): n is a, c, g, or t
  misc_feature (1282)..(1322): n is a, c, g, or t

SEQ ID NO: 192529 - DNA, 980 bp, Homo Sapiens
ttggctctatcaggaagattgtgcatgccgtgggtctgacggcttgagtagcgctagggagaatccctgcaggtaatatttgacttttgcttcatattaatctgagtggaaaataaaagggccctcttctcctctcgcttccctgccgggcaggcgccatggcggaagcctcggcgacgggcgcctgcggagaggcgatggcagcggcggaaggctcctcgggcccggcgggcttgactctgggccggagcttctcgaactaccggcccttcgagccccaggcgttgggcctcagcccgagctggcggctgacgggcttctccggcatgaagggctgaggctgcaaggtcccgcaggaggcgctgctcaaactcctggcgggactgacgcggccggacgtgcggcccccgctgggccggggcctggtgggtggccaggaagaggcgtcccaggaagccggcctgccggcaggagcgggccccagccccacctttccagccctgggcatcgggatggactcctgcgtcatccccctgaggcacgggggcctgtcactggtgcagaccacggacttcttttaccccttggtagaagatccctacatgatggggcgcatagcttgtgccaacgtgctgagtgacctctacgccatggggattactgagtgtgacaacatgttgatgttactcagcgtcagccagagtatgagtgaggaggaacgcgaaaaggtaacgccactcatggtcaaaggctttcgggatgcggctgaggaaggagggacggcagtgaccggtgggcaaacggtggtcaacccttggattataatcggtggagttgccactgtagtatgccaaccaaatgagttcataatgccggacagcgccgtcgttggggacgtgctggtgttaaccaaaccgttaggaacccaggttgctgtcaatgcccaccaatggctggataatcctgaaagatggaataaa

SEQ ID NO: 192530 - DNA, 686 bp, Homo Sapiens
actttgtacaaaaaagttgggaaatttccaaacgaaggctgcctgcatagtggttccggctgccctttctaggtgattggaatcagcccatctaaagcagtctttatatgcattccgaggccagagtaacattttgaactttggggggatatttgttcatcacttgggtagaagaggagcaaaaatacctctgttttctcttgccaaagtaagatgaagctattccaggttgagggatttttctttgcacggggttgattaatttctgcacagggagtgagattattaaagtaacacacacacaaagtaaattgcaaaatgaaaaaaattagaagcaaatgagttttggaccaatattgttgataaatctaaattgttaagagagatcttataatgcaacatcaaattctttattcaattttactgaagtactggctctttcctgctctggacaagaattgagcaacttgtctgatgactgggaaaggaggacctgcaaccatctgacttggtctctgttaatgacgtctctccctctaaaccccattaaggactgggagaggcagagcaagcctcagagcccaggcctcagtggtcattaagatgttaagtcttttgcggcagattcctggtgatttgatcaataaagagtaatttcttgctaaataaataaaagaaaccttgtt

SEQ ID NO: 192531 - DNA, 1495 bp, Homo Sapiens; identical to SEQ ID NO: 185025
  misc_feature (129)..(139): n is a, c, g, or t
  misc_feature (1287)..(1300): n is a, c, g, or t

SEQ ID NO: 192532 - DNA, 2064 bp, Homo Sapiens; identical to SEQ ID NO: 185026
  misc_feature (1693)..(1702): n is a, c, g, or t

SEQ ID NO: 192533 - DNA, 1834 bp, Homo Sapiens; identical to SEQ ID NO: 185027
  misc_feature (606)..(614): n is a, c, g, or t

SEQ ID NO: 192534 - DNA, 1251 bp, Homo Sapiens; identical to SEQ ID NO: 185030
  misc_feature (1104)..(1143): n is a, c, g, or t

SEQ ID NO: 192535 - DNA, 1483 bp, Homo Sapiens; identical to SEQ ID NO: 185031
  misc_feature (673)..(712): n is a, c, g, or t
  misc_feature (1125)..(1163): n is a, c, g, or t

SEQ ID NO: 192536 - DNA, 3566 bp, Homo Sapiens; identical to SEQ ID NO: 185032

SEQ ID NO: 192537 - DNA, 1851 bp, Homo Sapiens; identical to SEQ ID NO: 185035
  misc_feature (381)..(438): n is a, c, g, or t
  misc_feature (867)..(892): n is a, c, g, or t

SEQ ID NO: 192538 - DNA, 1019 bp, Homo Sapiens; identical to SEQ ID NO: 185036

SEQ ID NO: 192539 - DNA, 1055 bp, Homo Sapiens
ttggctttgtcatggcacgcactatgctgactctaatcagccatctggcttccactttccccactcccacctctgtgaaccaaaagaattcttgaagtggtttccatattctgatctcaggcctgtgcgagtgaagagttttatgagcaaggactggaaggaaccagagacaaacaaggtggttgggtttgctgggagtgggatggtagctaagcatgtcatttactgttcttgttgcttgggtaataggccacaatgaggaagctagcacggtagtgggcaatgccaggtgggaaggtttgagttgtgaaagaagagccagggagcagagatggggaggaggcactgatggggtgggatgtgctttggtcacacatagcacagtcgggtgtgtcctcccttttgtccacagtggttcctgggctttgctgtcttcctcctgccctgggcgtccatgtggctgcgcagcctcctaaaacctatccacgtcttttttggagccgccatcctctctctgtccatcgcatccgtcatttcgggcattaatgagaagcttttcttcagtttgaaaaacaccaccaggccataccacagcctgcccagtgaggcggtctttgccaacagcaccgggatgctggtggtggcctttgggctgctggtgctctacatccttctggcttcatcttggaagcgcccagagccggggatcctgaccgacagacagcccctgctgcatgatggggagtgaagcagcaggaaggggctcccaagagctcctggtggtgcagcctgtgctcccctcagaagctctgctcttcccagggctcccggctggtttcagcaggcgactttcttccaatgctgggcccagacttcttgcctgggtgctggcctgccctctccggccgcttgctgcctgtctgctttccttggtggctttgcctgggtgctgggcctgccctctccggccgcttgctgcctgtctgctttccttggtggctttgcctgggtgctggacctgcctactctagctgcttgctgcctgtctgctttcc

SEQ ID NO: 192540 - DNA, 1286 bp, Homo Sapiens; identical to SEQ ID NO: 185039

SEQ ID NO: 192541 - DNA, 1300 bp, Homo Sapiens
actttgtacaaaaaagttggtgaaaaggagcaagcccccattttcacccgatcctgggctctcccttccaagctagagggctgggccctatgactgtggtctgggctttaggcccctttccttccccttgagtaacatgcccagtttcctttctgtcctggagacaggtggcctctctggctatggatgtgtgggtacttggtggggacggaggagctagggactaactgttgctcttggtgggcttggcagggactaggctgaagatgtgtcttctccccgccacctactgtatgacaccacattcttcctaacagctggggttgtgaggaatatgaaaagagcctattcgatagctagaagggaatatgaaaggtagaagtgacttcaaggtcacgaggttcccctcccacctctgtcacaggcttcttgactacgtagttggagctatttcttcccccagcaaagccagagagctttgtccccggcctcctggacacataggccattatcctgtattcctttggcttggcatcttttagctcaggaaggtagaagagatctgtgcccatgggtctccttgcttcaatcccttcttgtttcagtgacatatgtattgtttatctgggttagggatgggggacagataatagaacgagcaaagtaacctatacaggccagcatggaacagcatctcccctgggcttgctcctggcttgtgacgctataagacagagcaggccacatgtggccatctgctccccattcttgaaagctgctggggcctccttgcaggcttctggatctctggtcagagtgaactcttgcttcctgtattcaggcagctcagagcagaaagtaaggggcagagtcatacgtgtggccaggaagtagccagggtgaagagagactcggtgcgggcagggagaatgcctgggggtccctcacctggctagggagataccgaagcctactgtggtactgaagacttctgggttctttccttctgctaacccagggagggtcctaagaggaaggtgacttctctctgtttgtcttaagttgcactgggggatttctgacttgaggcccatctctccagccagccactgccttctttgtaatattaagtgccttgagctggaatggggaagggggacaagggtcagtctgtcgggtgggggcagaaatcaaatcagcccaaggatatagttaggattaattacttaatagagaaatcctaactatatcacacaaagggatacaactataaatgtaataaagtttatgtctagaagtt

SEQ ID NO: 192542 - DNA, 1392 bp, Homo Sapiens
ttggccggaagcgagttgcgacacggcaggttcccgcccggaagaagcgaccaaagcgcctgaggaccggcaacatggtgcggtcggggaataaggcagctgttgtgctgtgtatggacgtgggctttaccatgagtaactccattcctggtatagaatccccatttgaacaagcaaagaaggtgataaccatgtttgtacagcgacaggtgtttgctgagaacaaggatgagattgctttagtcctgtttggtacagatggcactgacaatcccctttctggtggggatcagtatcagaacatcacagtgcacagacatctgatgctaccagattttgatttgctggaggacattgaaagcaaaatccaaccaggttctcaacaggctgacttcctggatgcactaatcgtgagcatggatgtgattcaacatgaaacaataggaaagaagtttgagaagaggcatattgaaatattcactgacctcagcagccgattcagcaaaagtcagctggatattataattcatagcttgaagaaatgtgacatctccctgcaattcttcttgcctttctcacttggcaaggaagatggaagtggggacagaggagatggcccctttcgcttaggtggccatgggccttcctttccactaaaaggaattaccgaacagcaaaaagaaggtcttgagatagtgaaaatggtgatgatatctttagaaggtgaagatgggttggatgaaatttattcattcagtgagagtctgagaaaactgtgcgtcttcaagaaaattgagaggcattccattcactggccctgccgactgaccattggctccaatttgtctataaggattgcagcctataaatcgattctacaggagagagttaaaaagacttggacagttgtggatgcaaaaaccctaaaaaaagaagatatacaaaaagaaacagtttattgcttaaatgatgatgatgaaactgaagttttaaaagaggatattattcaagggttccgctatggaagtgatatagttcctttctctaaagtggatgaggaacaaatgaaatataaatcggaggggaagtgcttctctgttttgggattttgtaaatcttctcaggttcagagaagattcttcatgggaaatcaagttctaaaggtctttgcagcaagagatgatgaggcagctgcagttgcactttcctccctgattcatgctttggatgacttagacatggtggccatagttcgatatgcttatgacaaaagagctaatcctcaagtcggcgtggcttttcctcatatcaagcataactatgagtgtttagtgtatgtgcagctgcctttcatggaagacttgcggcatacatgttttcatccttgaaaaa

SEQ ID NO: 192543 - DNA, 2750 bp, Homo Sapiens; identical to SEQ ID NO: 185041

SEQ ID NO: 192544 - DNA, 1119 bp, Homo Sapiens
ttggcggccgcagagccgcgtttagtctatcgctgcggttgcgagcgctgtagggagcctgtgctgtgccgcgcagttaggcagcagcagccgcggagcagtagccgccgtgggagggagccatgaagcattacgaggtggagattctggacgcaaagacaagggagaagctgtgtttcttggacaaggtggagccccacgccaccattgcggagatcaagaacctcttcactaagacccatccgcagtggtaccccgcccgccagtccctccgcctggaccccaagggcaagtccctgaaggatgaggatgttctgcagaagctgcccgtgggcaccacggccacactgtacttccgggacctgggggcccagatcagctgggtgacggtcttcctaacagagtacgcggggccccttttcatctacctgctcttctacttccgagtgcccttcatctatggccacaaatatgactttacgtccagtcggcatacagtggtgcacctcgcctgcatctgtcactcattccactacatcaagcgcctgctggagacgctcttcgtgcaccgcttctcccatggcactatgcctttgcgcaacatcttcaagaactgcacctactactggggcttcgccgcgtggatggcctattacatcaatcaccctctctacactccccctacctacggagctcagcaggtgaaactggcgctcgccatctttgtgatctgccagctcggcaacttctccatccacatggccctgcgggacctgcggcccgctgggtccaagacgcggaagatcccataccccaccaagaaccccttcacgtggctcttcctgctggtgtcctgccccaactacacctacgaggtggggtcctggatcggtttcgccatcatgacgcagtgtctcccagtggccctgttctccctggtgggcttcacccagatgaccatctgggccaagggcaagcaccgcagctacctgaaggagttccgggactacccgcccctgcgcatgcccatcatccccttcctgctctgagcgctcacccctgctgaagctcaacccctcaacccggtggcattctggggggaggagtgggggcccacag

SEQ ID NO: 192545 - DNA, 1662 bp, Homo Sapiens; identical to SEQ ID NO: 180486
  misc_feature (139)..(153): n is a, c, g, or t
  misc_feature (311)..(325): n is a, c, g, or t

SEQ ID NO: 192546 - DNA, 2212 bp, Homo Sapiens; identical to SEQ ID NO: 185042
  misc_feature (1228)..(1245): n is a, c, g, or t
  misc_feature (1415)..(1424): n is a, c, g, or t

SEQ ID NO: 192547 - DNA, 1819 bp, Homo Sapiens; identical to SEQ ID NO: 185043

SEQ ID NO: 192548 - DNA, 1030 bp, Homo Sapiens
tttgtacaaaaaagttggcaatgttcacaacacgaaaagaccattgctgcatactccttgaccagcaacttttttgaagatatttttaagtgcagagtaggcctctattcctgtatgtaattgttcattttcagcacctggaacctcatctatcgggtctggaaggaatacagcagttcgaaagccgcgtccatttctctccttcagtagtgcagaaatgagtccgattcaccagtacacacagaactgtaccagttcaacctagcaaaagaagaaaagtttccactgtacttaaaatttacagctgactcaaattgcctcacagaattatttgatgtttaaggctagttgtcttacttcagatcagcaggacagttgggctctcagactcatgaccactgagtttgcttgtgttgaaactgtggtttcatccaacatatgctattggacatgattattattccattcaaatggattacagacttcttgaggacaggacaaacttatctctcatggtgtttttttagaatacttttataaccaaggaagaaaccatgccagctgttaccattcaacttcttaagcagagattaagctttttcatatctgttcttatcctggacatcagtagtttttaattgcccagcatccgttccatcttgtaacaactccctgatgtttcttaaaaccacctcttcctattttcagtctgtggtttggacagtctgacccaaccttgagctttgtgggtgaacatgtaattcagacctcatcaatcagcaaatccatctgaactgtggaggagaagctctctttactgagggtgctttagctttgtaggatgaaaacctcaaactaacagggcctaccatgtagagaatgaagccagtgcaggggaaagcagagccaaaatatggagagacttgaatcctgatgacagcgtttgtgcccctggatccaaccgtgcctgaagctagaatatcccctggacttttcagttatgtgaaccaataaatacccttttttgctt

SEQ ID NO: 192549 - DNA, 1084 bp, Homo Sapiens; identical to SEQ ID NO: 185047
  misc_feature (142)..(154): n is a, c, g, or t

SEQ ID NO: 192550 - DNA, 1390 bp, Homo Sapiens
ttgggtcatccagcagctctaccactgggactgtggcctggcctgctccaggatggtgctgcggtacctgggccagctggacgacagtgagtttgagagagccctgcagaagctgcagctgaccaggagcatctggaccatcgacctggcctacctgatgcaccactttggcgtgaggcaccgcttctgtacccagaccctgggtgtcgacaagggctacaagaaccagtccttctacaggaagcactttgacacagaagagacccgggtgaatcagctgtttgcacaagcaaaggcctgcaaggtgctggtggagaaatgcaggaatgtgcagcaccagcatcagtaactttgaggaggccagaaccagctatggcacagatgaggacatcctctttgtctacttggacagctgacagcaggagcctggtgcgcctaggccctcggaccccatccccaccccagccgggcccgctcaggacgccctggcccaggcttggggctgctggggttggaatgtggaactgcagcctcagcccatctggcagagtcccaggaactcggagactggcacagctgctttgtctgccagtgccgtgtgttgtcatgtcactcaccccaagcacctgctggctgctggaagcataccccaagaccccaagccttgactccagctgcgcccacaggaagtccagtcccgacagtgcccttgttgcctttgagccagatccatggcaatggtctccccacagaccgcaggactgagcctggagagagaagttgcttgacggatgccacttgtcaggacagtatgtgagtgtctggagacagcatagctgaccccaatcccccagggctgaggacccctccaggcccctctctcctggaagtgctgcatatgcccctgtgcccagtggttgatgataccaccaccacctgcctacccatgggcccaagtttctgtggctcattacagggcatctgacccctgccacccagcatagacacacctcacagctgccctgccatgcagagccctggccgctggagactcttaaaccccccacagccctccaggtcctccagctctgtcagatggagggctctcgggcctagatcccactggtaggcctcgtggctggcagcagtgctctgggaataaacagctgccctagccccagagggatccctgcacccaggaggcctcctgacaccagccaaaatcctgacagcagggtctgccctcttgagtgtggggagcccctagtcctttatattggctgctaaacctgtgctccaaagcaacgggctggggcagcctgcagctgcccacccaacctggtcttcacaccagattgcacacgatactgggtcttgtctatcttgatgg

SEQ ID NO: 192551 - DNA, 1713 bp, Homo Sapiens; identical to SEQ ID NO: 185052
  misc_feature (1250)..(1258): n is a, c, g, or t
  misc_feature (1535)..(1567): n is a, c, g, or t

SEQ ID NO: 192552 - DNA, 1388 bp, Homo Sapiens; identical to SEQ ID NO: 180488
  misc_feature (350)..(412): n is a, c, g, or t
  misc_feature (430)..(482): n is a, c, g, or t
  misc_feature (1320)..(1345): n is a, c, g, or t

SEQ ID NO: 192553 - DNA, 1283 bp, Homo Sapiens; identical to SEQ ID NO: 185053

SEQ ID NO: 192554 - DNA, 887 bp, Homo Sapiens; identical to SEQ ID NO: 180489

SEQ ID NO: 192555 - DNA, 1000 bp, Homo Sapiens; identical to SEQ ID NO: 185055

SEQ ID NO: 192556 - DNA, 1130 bp, Homo Sapiens; identical to SEQ ID NO: 185057

SEQ ID NO: 192557 - DNA, 999 bp, Homo Sapiens
ttgggatccagcccgggagaggaccgagctggaggagctgggtgtgggcccctcccagttcccccagggacggccacttcctggtccccgacgcaaccatggctgaagaacaaccgcaggtcgaattgttcgtgaaggctggcagtgatggggccaagattgggaactgcccattctcccagagactgttcatggtactgtggctcaagggagtcaccttcaatgttaccaccgttgacaccaaaaggcggaccgagacagtgcagaagctgtgcccaggggggcagctcccattcctgctgtatggcactgaagtgcacacagacaccaacaagattgaggaatttctggaggcagtgctgtgccctcccaggtaccccaagctggcagctctgaaccctgagtccaacacagctgggctggacatatttgccaaattttctgcctacatcaagaattcaaacccagcactcaatgacaatctggagaagggactcctgaaagccctgaaggttttagacaattacttaacatcccccctcccagaagaagtggatgaaaccagtgctgaagatgaaggtgtctctcagaggaagtttttggatggcaacgagctcaccctggctgactgcaacctgttgccaaagttacacatagtacaggtggtgtgtaagaagtaccggggattcaccatccccgaggccttccggggagtgcatcggtacttgagcaatgcctacgcccgggaagaattcgcttccacctgtccagatgatgaggagatcgagctcgcctatgagcaagtggcaaaggccctcaaataagcccctcctgggactccctcaaccccctccattttctccacaaaggccctggtggtttccacattgctacccaatggacacactccaaaatggccagtgggcagggaatcctgagcacttgttccgggatggtgtgttggaagagggatgaagggaaagaaatggggggcctggg

SEQ ID NO: 192558 - DNA, 1011 bp, Homo Sapiens
tgtacaaatgatccagcccgggagaggaccgagctggaggagctgggtgtggggtgcgttgggctggtggggaggcctagtttgggtgcaagtaggtctgattgagcttgtgttgtgctgaagggacagccctgggtctaggggagagagtccctgagtgtgagacccgccttccccggtcccagcccctcccagttcccccagggacggccacttcctggtccccgacgcaaccatggctgaagaacaaccgcaggtcgaattgttcgtgaaggctggcagtgatggggccaagattgggaactgcccattctcccagagactgttcatggtactgtggctcaagggagtcaccttcaatgttaccaccgttgacaccaaaaggcggaccgagacagtgcagaagctgtgcccaggggggcagctcccattcctgctgtatggcactgaagtgcacacagacaccaacaagattgaggaatttctggaggcagtgctgtgccctcccaggtaccccaagctggcagctctgaaccctgagtccaacacagctgggctggacatatttgccaaattttctgcctacatcaagaattcaaacccagcactcaatgacaatctggagaagggactcctgaaagccctgaaggttttagacaattacttaacatcccccctcccagaagaagtggatgaaaccagtgctgaagatgaaggtgtctctcagaggaagtttttggatggcaacgagctcaccctggctgactgcaacctgttgccaaagttacacatagtacaggtggtgtgtaagaagtaccggggattcaccatccccgaggccttccggggagtgcatcggtacttgagcaatgcctacgcccggaagaattcgcttccacctgtccagatgatgaggagatcgacctcgcctatgagcaagtggcaaggccctcaaataagccctcctgggactccctcagccccctccaatttctcccacaaagcccctgg

SEQ ID NO: 192559 - DNA, 1247 bp, Homo Sapiens; identical to SEQ ID NO: 185059

SEQ ID NO: 192560 - DNA, 1635 bp, Homo Sapiens; identical to SEQ ID NO: 185062

SEQ ID NO: 192561 - DNA, 2007 bp, Homo Sapiens; identical to SEQ ID NO: 185065

SEQ ID NO: 192562 - DNA, 3246 bp, Homo Sapiens; identical to SEQ ID NO: 180492
  misc_feature (123)..(150): n is a, c, g, or t
  misc_feature (806)..(847): n is a, c, g, or t
  misc_feature (2705)..(2756): n is a, c, g, or t

SEQ ID NO: 192563 - DNA, 903 bp, Homo Sapiens; identical to SEQ ID NO: 185067

SEQ ID NO: 192564 - DNA, 899 bp, Homo Sapiens
tttgtacaaaaaagttggctaagatcaaaccccatggagcagccagcgttagatgcccccacccacctgtactctggagagactgtgctgggaacatgtaccactgagcctgagatggggatgagggcagagagaggggagccccctcttccactcagttgttcctactcagactgttgcactctaaacctagggaggttgaagaatgagacccttaggttttaacacgaatcctgacaccaccatctatagggtcccaacttggttattgtaggcaaccttccctctctccttggtgaagaacatcccaagccagaaagaagttaactacagtgttttcctttgcaccgatccccaccccaattcaatcccggaagggacttacttaggaaacccttctttactagatatcctggccccctgggcttgtgaacacctcctagccacatcactacagtacagtgagtgaccccagcctcctgcctaccccaagatgcccctccccaccctgaccgtgctaactgtgtgtacatatatattctacatatatgtatattaaaactgcactgccatgtctgcccttttttgtggtgtctagcattaacttattgtctaggccagagcgggggtgggaggggaatgccacagtgaagggagtggcagaatcaaattgctacatagtccaaacaaaaaagaaggctttttcaaaaacattaaattcacatgcagtctcagagactatttagacaaagttcaagttaggagcttttaggatgtgggagtaaaactttaatgggaggggagggctggctgctggaagaaggaaaaagccagactggttagacagtactccttaactcctagcccagcctagcgtgccctgcccctctggccactgg

SEQ ID NO: 192565 - DNA, 823 bp, Homo Sapiens
actttgtacaaaaaagttggcccccaacaacccgagtctgaacgaatgccacgtgccctcacccagcccggcccccaccctgtccagacccctacagctgtgtctaagctcaggaggaaagggaccctcccatcattcatggggggctgctacctgacccttggggcctgagaaggccttgggggggtggggtttgtccacagagctgctggagcagcaccaagagccagtcttgaccgggatgaggcccacagacaggttgtcatcagcttgtcccattcaagccaccgagctcaccacagacacagtggagccgcgctcttctccagtgacacgtggacaaatgcgggctcatcagcccccccagagagggtcaggccgaaccccatttctcctcctcttaggtcattttcagcaaacttgaatatctagacctctcttccaatgaaaccctccagtctattatagtcacatagataatggtgccacgtgttttctgatttggtgagctcagacttggtgcttccctatccacagcccccaccccttgtttttcaagatactattattatattttcacagacttttgaagcacaaatttattggcatttaatattggacatctgggcccttggaagtacaaatctaaggaaaaaccaacccactgtgtaagtgactcatcttcctgttgttccaattctgtgggtttttgattcaacggtgctataaccagggtcctgggtgacagggcgctcactgagcaccatgtgtcatcacagacacttacacatacttgaaacttggaataaaacaaagatttatg

SEQ ID NO: 192566 - DNA, 875 bp, Homo Sapiens; identical to SEQ ID NO: 180495

SEQ ID NO: 192567 - DNA, 1721 bp, Homo Sapiens; identical to SEQ ID NO: 185071
  misc_feature (241)..(253): n is a, c, g, or t
  misc_feature (1646)..(1654): n is a, c, g, or t

SEQ ID NO: 192568 - DNA, 1005 bp, Homo Sapiens; identical to SEQ ID NO: 185077
  misc_feature (863)..(882): n is a, c, g, or t

SEQ ID NO: 192569 - DNA, 1258 bp, Homo Sapiens; identical to SEQ ID NO: 185078

SEQ ID NO: 192570 - DNA, 842 bp, Homo Sapiens; identical to SEQ ID NO: 185079

SEQ ID NO: 192571 - DNA, 1908 bp, Homo Sapiens; identical to SEQ ID NO: 185080
  misc_feature (91)..(110): n is a, c, g, or t
  misc_feature (235)..(247): n is a, c, g, or t

SEQ ID NO: 192572 - DNA, 1479 bp, Homo Sapiens; identical to SEQ ID NO: 185084
  misc_feature (324)..(386): n is a, c, g, or t
  misc_feature (1361)..(1407): n is a, c, g, or t

SEQ ID NO: 192573 - DNA, 1560 bp, Homo Sapiens; identical to SEQ ID NO: 185085
  misc_feature (325)..(387): n is a, c, g, or t
  misc_feature (1362)..(1408): n is a, c, g, or t

SEQ ID NO: 192574 - DNA, 905 bp, Homo Sapiens
ctttgtacaaaaaagttgggctggctgggcggttaggagggcccggggccgagacgatggctgaccacaaccctgacagcgactccacgccgcgcacgctgctgcgacgcgtgctggatacagcggacccgcgcaccccgcggcgaccccggagtgctcgggctggagcccggagagccctgcttgaaacggcttcccccaggaagttgagtggccaaacaaggacgatagccagagggcgttcccatggagccagggtaagtacccagcccactgaccccaaagggccctggctgcctcggggaggggggttgaggtctagctctgctctggagcccaccttgaggaaatctcaaggcagacggacagactggttgcttggtgctttgccgatagtctgttggcagatcggcccatattcaggccagtgggcacttggaggaacagacacctcggacgctgctgaagaacatcctactaactgccccagaatcttccatcctgatgcctgagtcggtagtgaagccagtgccagcaccgcaggcggtccaaccctccagacaagagagcagttgcggcagcctggagctgcaacttcctgagctcgagccccccacaaccctggctccaggtctgctggcccctggcaggaggaaacagaggctgagactgtcagtgtttcagcagggagtggaccaggggctgtctctctcccaagagcctcaagggaatgctgatgcctcttccctcaccagatccctcaacctgacctttgccacacctcttcagccacagtcagtgcagaggcctggctttggcccgcagacctccaccccgccgagctgtagacgtgggtgcctttttgcgggatctgcgagatactttccctggctcctccaaacatt

SEQ ID NO: 192575 - DNA, 1686 bp, Homo Sapiens; identical to SEQ ID NO: 185089

SEQ ID NO: 192576 - DNA, 1282 bp, Homo Sapiens; identical to SEQ ID NO: 180498

SEQ ID NO: 192577 - DNA, 912 bp, Homo Sapiens
ttggggagacacacaccccaggtgtagtacagagcggactgcaaaatgactgctgtccatgcaggcaacataaacttcaagtgggatcctaaaagtctagagatcaggactctggcagttgagagactgttggagcctcttgttacacaggttacaacccttgtaaacaccaatagtaaagggccctctaataagaagagaggtcgttctaagaaggcccatgttttggctgcatctgttgaacaagcaactgagaatttcttggagaagggggataaaattgcgaaggagagccagtttctcaaggaggagcttgtggctgctgtagaagatgttcgaaaacaaggtgatttgatgaaggctgctgcaggagagttcgcagatgatccctgctcttctgtgaagcgaggcaacatggttcgggcagctcgagctttgctctctgctgttacccggttgctgattttggctgacatggcagatgtctacaaattacttgttcagctgaaagttgtggaagatggtatcttgaagttgaggaatgctggcaatgaacaagacttaggaatccagtataaagccctaaaacctgaagtggataagctgaacattatggcagccaaaagacaacaggaattgaaagatgttggccatcgtgatcagatggctgcagctagaggaatcctgcagaagaacgttccgatcctctatactgcatcccaggcatgcctacagcaccctgatgtcgcagcctataaggccaacagggacctgatatacaagcagctgcagcaggcggtcacaggcatttccaatgcagcccaggccactgcctcagacgatgcctcacagcaccagggtggaggaggaggagaactgggcatatgcactcaataactttgacaaacaatc

SEQ ID NO: 192578 - DNA, 1505 bp, Homo Sapiens; identical to SEQ ID NO: 185091

SEQ ID NO: 192579 - DNA, 1539 bp, Homo Sapiens; identical to SEQ ID NO: 185093
  misc_feature (99)..(112): n is a, c, g, or t

SEQ ID NO: 192580 - DNA, 1752 bp, Homo Sapiens; identical to SEQ ID NO: 185094

SEQ ID NO: 192581 - DNA, 1697 bp, Homo Sapiens; identical to SEQ ID NO: 185096

SEQ ID NO: 192582 - DNA, 946 bp, Homo Sapiens; identical to SEQ ID NO: 185097

SEQ ID NO: 192583 - DNA, 992 bp, Homo Sapiens; identical to SEQ ID NO: 185098

SEQ ID NO: 192584 - DNA, 976 bp, Homo Sapiens; identical to SEQ ID NO: 185099

SEQ ID NO: 192585 - DNA, 1001 bp, Homo Sapiens; identical to SEQ ID NO: 185100

SEQ ID NO: 192586 - DNA, 891 bp, Homo Sapiens; identical to SEQ ID NO: 185102
  misc_feature (766)..(779): n is a, c, g, or t

SEQ ID NO: 192587 - DNA, 874 bp, Homo Sapiens
  misc_feature (385)..(402): n is a, c, g, or t
ctcgagtttggtattactttattctattttctgtataactttaaagtacataaaggtttatttccacagccctcaggaaatgggtagaaatcacagcgacaatctctcttcccaccaaaaaaaagttgcatattttggtaagtgtttgtcctagagggaaaaacaactgaaatttacattagcagtgctgtgcaagatttttacataattcaagacctaaaaccagcctgcagtggaggtttcagtcctctgttcaggtgcttagacagaagccataagctgatgagcatgacagggaaaaggaggcagtgaagacaggtgacaggcacctggcagggaagaaggattcaggaatgccagactccttgaaatcatgtgggtttgnnnnnnnnnnnnnnnnnnccttttaaagtcatctctataggaaggtgctgggcagggatcccagagaaagaaagggtccaagactccattaactgccctggatgaagggcactgctacagcagctagtaccagagactctcctatctcacggttgaggcagacccaggatagaatagagaataaaaggaatgcttataggaaacaattttgtatggaatgctagatggccaagcctcagcctttggtccagtgcaacccttgcctcgcttgtcaacagtgaaaaattagtttggttagaagaaccatctggaaacacaccagcttctgctaccttcatgctcattgttaaaaaaagattaaccagtgtgaacattctgatctgttaattccagggactgttttctttccaatggactgtttgttggtagaataacccccaaaagctcaaagctaaaagggcatcatcagtccccaacttttttgtacaaa

SEQ ID NO: 192588 - DNA, 1406 bp, Homo Sapiens
ttggccccgctccccctcctcccccagtctctaccagttcaggctcagatgagtctgcttcccgctcagcactgttcgcgcagattaatcagggggagagcattacacatgccctgaaacatgtatctgatgacatgaagactcacaagaaccctgccctgaaggctcagagtggtccagtacgcagtggccccaaaccattctctgcacctaaaccccaaaccagcccatcccccaaacgagccacaaagaaggagccagctgtacttgaactggagggcaagaagtggagagtggaaaatcaggaaaatgtttccaacctggtgattgaggacacagagctgaaacaggtggcttacatatacaagtgtgtcaacacgacattgcaaatcaagggcaaaattaactccattacagtagataactgtaagaaacttggcctggtattcgatgacgtggtgggcattgtggagataatcaacagtaaggatgtcaaagttcaggtaatgggtaaagtgccaaccatatccatcaacaaaacagatggctgccatgcttacctgagcaagaattccctggattgtgaaatagtcagtgccaaatcttccgagatgaatgtcctcattcctacagaaggcggtgactttaatgaattcccagttcctgagcagttcaagaccctatggaacgggcagaagttggtcaccacagtgacagaaattgctggataagcgaagtgccactgggttctttgccctcccttcacaccatgggataaatctgtatcaagacggttcttttctagatttcctctacctttttgctcttaaaactgcttctctgctctgagaagcacagctacctgccttcactgaaatatacctcaggctgaaatttggggtgggatagcaggtcagttgatcttctgcaggaaggtgcagcttttccatatcagctcaaccacgccgccagtccattcttaaggaactgccgactaggactgatgatgcattttagctttgagcttttgggggttattctaccaacaaacagtccattggaaagaaaacagtccctggaattaacagatcagaatgttcacactggttaatctttttttaacaatgagcatgaaggtagcagaagctggtgtgtttccagatggttcttctaaccaaactaatttttcactgttgacaagcgaggcaagggttgcactggaccaaaggctgaggcttggccatctagcattccatacaaaattgtttcctataagcattccttttattctctattctatcctgggtctgcctcaaccgtgagataggagagtctctggtactagctgctgtagcagtgcccttcatccagggcagttaatggagtcttggaccctttctttctct

SEQ ID NO: 192589 - DNA, 594 bp, Homo Sapiens
  misc_feature (193)..(214): n is a, c, g, or t
actttgtacaaaaaagttggaagcattccttcctattctctattctatcctgggtctgcctcaaccgtgagataggagagtctctggtactagctgctgtagcagtgcccttcatccagggcagttaatggagtcttggaccctttctttctctgggatccctgcccagcaccttcctatagagatgactttnnnnnnnnnnnnnnnnnnnnnncaaacccacatgatttcaaggagtctggcattcctgaatccttcttccctgccaggtgcctgtcacctgtcttcactgcctccttttccctgtcatgctcatcagcttatggcttctgtctaagcacctgaacagaggactgaaacctccactgcaggctggttttaggtcttgaattatgtaagaatcttgcacagcactgctaatgtaaatttcagttgtttttccctctaggacaaacacttaccaaaatatgcaacttttttttggtgggaagagagattgtcctgtgatttctacccatttcctgaggcctgtggaaataaacctttatgtacttaaagttatacagaaaatagaataaagttaataccaaactt

SEQ ID NO: 192590 - DNA, 1009 bp, Homo Sapiens
  misc_feature (660)..(676): n is a, c, g, or t
  misc_feature (937)..(945): n is a, c, g, or t
actttgtacaaaaaagttggctctacctttttgctcttaaaactgcttctctgctctgagaagcacagctacctgccttcactgaaatatacctcaggctgaaatttggggtgggatagcaggtcagttgatcttctgcaggaaggtgcagcttttccatatcagctcaaccacgccgccagtccattcttaaggaactgccgactaggactgatgatgcattttagctttgagcttttgggggttattctaccaacaaacagtccattggaaagaaaacagtccctggaattaacagatcagaatgttcacactggttaatctttttttaacaatgagcatgaaggtagcagaagctggtgtgtttccagatggttcttctaaccaaactaatttttcactgttgacaagcgaggcaagggttgcactggaccaaaggctgaggcttggccatctagcattccatacaaaattgtttcctataagcattccttttattctctattctatcctgggtctgcctcaaccgtgagataggagagtctctggtactagctgctgtagcagtgcccttcatccagggcagttaatggagtcttggaccctttctttctctgggatccctgcccagcaccttcctatagagatgactttaaaagnnnnnnnnnnnnnnnnncaaacccacatgatttcaaggagtctggcattcctgaatccttcttccctgccaggggcctgtcacctgtcttcactgcctccttttccctgtcatgctcatcagcttatggcttctgtctaagcacctgaacagaggactgaaacctccactgcaggctgattttaggtcttgaattatgtaagaatcttgcacagcactgctaatgtaaatttcagttgtttttccctctaggacaaacacttaccaaaatatgcaacnnnnnnnnnggtgggaagagagattgtcctgtgatttctacccatttcctgaggcctgtggaaataaaccttt

SEQ ID NO: 192591 - DNA, 871 bp, Homo Sapiens
  misc_feature (89)..(124): n is a, c, g, or t
gggcatgtgtaatgctctcccctgattaatctgcgcgaacagtgctgagcgggaagcagactcatctgagcctgaactggtagagactnnnnnnnnnnnnnnnnnnnnnnnnnnnnnnnnnnnncctgatccggcagagggtccagatggcagtccgctcagttcttttgccacaggccccgttttgctccaggccagtccggtggtatggaactccttaatgtaagcctgcagctctgtccatatacttaaataagctttgacccagtctacatgcttcttatccacatctttgtactctttgaggactcggtttgtataaaacatggcggcatcattcatttctttcacataagggccaggcttgggagccatagccacccagcccagggcctggatactttcgctgacagctgacaggtgattaaacaacttgctgcctcggttcttctcccgaaaggttatcacttctttgatctgctctgagatgggtgccaacaaatcggaaagcttattttctgctggctgttgacactgagaagctgtaaccaacagagctcgctccaacttcaaacctgtgtggaccatctccgcatgtttctgcacgtctcccccaatctctttactgatcttcaagtactctgccacaggaccagcaagcagcgagtcaaatgcctgcacatatggagctgctcctgcttttgaaggactgtctgcatacccacggtgcatgtcagaggtatgagatactgcctccaggcggcccactgccctctccaatctttctaccagattttgcatgtcagccataatggaccacctgctgaaacagatcaaatgtcatttgttatttaaatattaaatagcccaa

SEQ ID NO: 192592 - DNA, 1121 bp, Homo Sapiens; identical to SEQ ID NO: 185104

SEQ ID NO: 192593 - DNA, 957 bp, Homo Sapiens
ttgggccttcgccccgctcctagcctcagggccggactccagcgcagagcccagcccagcgcagcctgccagcagccacccagccgcccagccgcccagccccgcacgaaacccggccagagcttcctagcagcccgagccatgaacaccgaaatgtatcagacccccatggaggtggcggtctaccagctgcacaatttctccatctccttcttctcttctctgcttggaggggatgtggtttccgttaagctggacaacagtgcctccggagccagcgtggtggccatagacaacaagatcgaacaggccatggatctggtgaagaatcatctgatgtatgctgtgagagaggaggtggagatcctgaaggagcagatccgagagctggtggagaagaactcccagctagagcgtgagaacaccctgttgaagaccctggcaagcccagagcagctggagaagttccagtcctgtctgagccctgaagagccagctcccgaatccccacaagtgcccgaggcccctggtggttctgcggtgtaagtggctctgtcctcagggtgggcagagccactaaacttgttttacctagttctttccagtttgtttttggctccccaagcatcatctcacgaggagaactttacacctagcacagctggtgccaagagatgtcctaaggacatggccacctgggtccactccagcgacagacccctgacaagagcaagtctctggaggctgagttgcatggggcctagtaacaccaagccagtgagcctctaatgctactgcgccctgggggctcccagggcctgggcaacttagctgcaactggcaaaggagaaggtagtttgaggtgtgacaccagtttgctccagaaagtttaagggtctgtttctcatctccatggacatcttcaacagcttcacctgacacgactgttcctatgaa

SEQ ID NO: 192594 - DNA, 673 bp, Homo Sapiens
tagaggggtggggctgggaacatgctcagggcagagggaaccgcttatgggatgcctcacaggcagcagtgaacttgggagacatcagtggggcctcacctgcccggtgagcatctggggtctctctcagggtgataagaggggcagacccccacaggctgctctgactgctccctcctcccgggtatgcagccagcagaaaactgagcttccggtcacagagaacgtgcagacgattcccccgccatatgtggtccgcaccatccttgtctacagccgtccaccttgccagccccagttctccttgacggagcccatgaagaaaatgttccagtgcccatatttcttctttgacgttgtttacatccacaatggcactgaggagaaggaggaggagatgagttggaaggatatgtttgccttcatgggcagcctggataccaagggtaccagctacaagtatgaggtggcactggctgggccagccctggagttgcacaactgcatggcgaaactgttggcccacccctgcagcggccttgccagagccatgcttcctacagcctgctggaggaggaggatgaaaccattgaggttgaggccactgtctgaaccatccctgtacatctgcaccttcttgtgcaaggaagtccttggcctaaagccttggttc

SEQ ID NO: 192595 - DNA, 1402 bp, Homo Sapiens
gcttttttataatgccaactttgtacaaagaaccaaccccctagcaaggcgcctaagttgcactctgaaccttcaaagaaaggggaaactcctacggtcgatggcacttggaagaccccttccttcccaaaaaagaagacagctgcttccagcaatgggtcaggacagcccctggacaagaaagctgcagtgtcttggttgacccctgccccttcaaaaaaggctgattctgttgctgctaaagtagatttgctgggggagttccagagtgcccttccaaagatcaatagccacccaacccgctctcagaagaagagctcccagaagaaatcctctaaaaagaaccatcctcagaagaatgccccacagaactccacccaagctcattcagagaataaatgctccggagcatcccagaagttgccacggaagatggtggcaattgactgtgagatggtgggcacaggaccaaaggggcatgttagttccttggctcgatgtagcattgtcaactacaacggagatgtgctttatgacgagtacattcttcccccctgccacattgtggactaccgaaccaggtggagtggtatccggaagcagcacatggtgaatgccacacccttcaagattgctcgaggccagatcttgaagatactcacagggaagatagtggtggggcatgccatccacaacgacttcaaagcccttcagtactttcaccccaagtccctcacccgtgacacctcccatatcccccccctcaaccggaaggctgactgcccggagaatgccaccatgtctctgaagcatctcaccaagaagctgctaaaccgggatatccaggttgggaagagcggacattcctctgtggaagatgcccaggccaccatggagctatataagttggttgaagtcgagtgggaagagcacctagcccggaatccccctacagactagtggcagtggggacgctggtgatatgaggaggcagaggcagcacccaggagaaacagggcagtggaccaatggacagctccaccagctccacatctttggaagctagatttggggagagagaagctctaccccagacttaatacccattgaaatttcacctcaggtgttgtgtcctgtgtctggttaagtgtcccatggaaggggaaagccttcacgtcagaacccaaccctataccttttacttcttaaatggtgctaaccacaggtgtcccagggtgctctgtgccagttaagatttttaactttcaaggggcagggcatactgggaaatgtagtttcccaaactgccttatcacttgggtggacatatgtctccttttatgccttttggtcttgagtaattaacagcatcctcttccacgctcagaagtgttctggttgg

SEQ ID NO: 192596 - DNA, 1295 bp, Homo Sapiens; identical to SEQ ID NO: 180500
  misc_feature (654)..(662): n is a, c, g, or t
  misc_feature (671)..(760): n is a, c, g, or t
  misc_feature (908)..(943): n is a, c, g, or t

SEQ ID NO: 192597 - DNA, 1419 bp, Homo Sapiens
ttggtctgtttgtcttccatagctctggtctgatggcacccagggaagtcctcacaggcaacgatgaggtcatcgggcaggtcctgagcacactcaagtccgaagatgtcccatacacagcggccctcacagcggtccgcccttccagggtggcccgtgatgtagccgtggtggccggagggctaggtcgccagctgctacaaaaacagccagtatcacctgtgatccatcctcctgtgagttacaatgacaccgctccccggatcctgttctgggcccaaaacttctctgtggcgtacaaggaccagtgggaggacctgactcccctcacctttggggtgcaggaactcaacctgactggctccttctggaatgactcctttgccaggctctcactgacctatgaacgactctttggtaccacagtgacattcaagttcattctggccaaccgcctctacccagtgtctgcccggcactggtttaccatggagcgcctcgaagtccacagcaatggctccgtcgcctacttcaatgcttcccaggtcacagggcccagcatctactccttccactgcgagtatgtcagcagcctgagcaagaagggtagtctcctcgtggcccgcacgcagccctctccctggcagatgatgcttcaggacttccagatccaggctttcaacgtaatgggggagcagttctcctacgccagcgactgtgccagcttcttctcccccggcatctggatggggctgctcacctccctgttcatgctcttcatcttcacctatggcctgcacatgatcctcagcctcaagaccatggatcgctttgatgaccacaagggccccactatttctttgacccagattgtgtgaccctgtgccagtgggggggttgagggtgggacggtgtccgtgttgttgctttcccaccctgcagcgcactggactgaagagcttccctcttcctactgcagcatgaactgcaagctcccctcagcccatcttgctccctcttcagcccgctgaggagctttcttgggctgcccccatctctcccaacaaggtgtacatattctgcgtagatgctagaccaaccagcttcccagggttcgtcgctgtgaggcgtaagggacatgaattctagggtctcctttctccttatttattcttgtggctacatcatccctggctgtggatagtgcttttgtgtagcaaatgctccctccttaaggttatagggctccctgagtttgggagtgtggaagtactacttaactgtctgtcctgcttggctgtcgttatcgttttctggtgatgttgtgctaacaataaaaagtacacgggtttatttctgtggcctgaaaaaggaagggacctccacgacaggtgggctgggtgcgatcgccggctgttt

SEQ ID NO: 192598 - DNA, 1710 bp, Homo Sapiens; identical to SEQ ID NO: 185113
  misc_feature (1367)..(1391): n is a, c, g, or t

SEQ ID NO: 192599 - DNA, 1016 bp, Homo Sapiens; identical to SEQ ID NO: 185114

SEQ ID NO: 192600 - DNA, 987 bp, Homo Sapiens
acaaaaaagttggcaccgccagcgtaggtgctaccaccgctgccgtcgccgccgccattttgatggggaagagtccggttctgggacagctggagacagtggtggtgactgaaataactttaccaaaggaaagctattttgcgaactatcttctccagcggagatggccaatgtgctttgtaacagagccagactggtttcctatctcccaggattttgctctttagttaaaagggttgtcaatcccaaagccttttcgactgcaggatcatcaggttcggatgagtctcatgtggctgctgcacctccagatatatgctctcgaacagtgtggcctgatgaaactatgggaccctttggacctcaagatcagaggttccagcttcctgggaacataggttttgattgtcacctcaatgggactgcttcacagaagaaaagcctggttcataaaactttgcctgatgttctagcagaacctttatcaagtgaaagacatgagtttgtgatggcacaatatgtgaatgaatttcagggtaatgatgcacctgttgaacaagaaattaacagtgcagaaacttactttgaaagtgccagagtagagtgtgcaatacaaacatgtccagaattgctgcgaaaagattttgaatcactgtttccagaagtagctaatggcaaactaatgattctgactgtaacacaaaaaactaagaatgatatgactgtttggagtgaagaagtagaaattgaaagagaagtgctcttagaaaagttcatcaatggtgctaaggaaatttgctatgctcttcgagctgagggttattgggctgactttattgacccatcatctggtttggcattttttggaccatatacaaacaacactctttttgaaactgatgaacgctaccgacatttaggattctctgttgatgaccttggatgctgtaaagtgattcgtcatagtctctggggtacccatgtagt

SEQ ID NO: 192601 - DNA, 1718 bp, Homo Sapiens; identical to SEQ ID NO: 180502
  misc_feature (249)..(266): n is a, c, g, or t
  misc_feature (1059)..(1072): n is a, c, g, or t

SEQ ID NO: 192602 - DNA, 1020 bp, Homo Sapiens
actttgtacaaaaaagttggattttcatttctgtgagcctgaagcattttgattcagtgggaatttctggtgatttatatctggaatagaagtgagcttaagtttagctattctaacgttgaaaaaggaagcaatgtttctattggattctaaagtatattttcaaaaatattctgaagtatttgtatatcttaaacttggagttaagacagcttagctttgaagataagagaaactagatgtgtgcattttctatccagatgtgtttgttgctggaactaaatgaaacagtacatggtaacccttgaaaggttttaaacttgtttctgtaactgctaatctacatactctcaagtcactaaccttcctctttgatctctttgtaggctgaccaactgactgaagagcagattgcagaattcaaagaagctttttcactatttgacaaagatggtgatggaactataacaacaaaggaattgggaactgtaatgagatctcttgggcagaatcccacagaagcagagttacaggacatgattaatgaagtagatgctgatggtaatggcacaattgacttccctgaatttctgacaatgatggcaagaaaaatgaaagacacagacagtgaagaagaaattagagaagcattccgtgtgtttgataaggatggcaatggctatattagtgctgcagaacttcgccatgtgatgacaaaccttggagagaagttaacagatgaagaagttgatgaaatgatcagggaagcagatattgatggtgatggtcaagtaaactatgaagagtttgtacaaatgatgacagcaaagtgaagaccttgtacagaatgtgttaaatttcttgtacaaaattgtttatttgccttttctttgtttgtaacttatctgtaaaagtttctccctactgtcaaaaaatatgcatgtatagtaattagacttcattcctccatgttttcttccttatcttactgtcattgtcctaaaaccttatttagaaatt

SEQ ID NO: 192603 - DNA, 1114 bp, Homo Sapiens
ctttgtacaaaaaagttggggcgaattagcccttgagtggagagagcgagctgagtggttgtgtggtcgcgtctcggaaaccggtagcgcttgcagcatggctgaccaactgactgaagagcagattgcagaattcaaagaagctttttcactatttgacaaagatggtgatggaactataacaacaaaggaattgggaactgtaatgagatctcttgggcagaatcccacagaagcagagttacaggacatgattaatgaagtagatgctgatggtaatggcacaattgacttccctgaatttctgacaatgatggcaagaaaaatgaaagacacagacagtgaagaagaaattagagaagcattccgtgtgtttgataaggatggcaatggctatattagtgctgcagaacttcgccatgtgatgacaaaccttggagagaagttaacagatgaagaagttgatgaaatgatcagggaagcagatattgatggtgatggtcaagtaaactatgaagagtttgtacaaatgatgacagcaaagtgaagaccttgtacagaatgtgttaaatttcttgtacaaaattgtttatttgccttttctttgtttgtaacttatctgtaaaaggtttctccctactgtcaaaaaaatatgcatgtatagtaattaggacttcattcctccatgttttcttcccttatcttactgtcattgtcctaaaaccttattttagaaaattgatcaagtaacatgttgcatgtggcttactctggatatatctaagcccttctgcacatctaaacttagatggagttggtcaaatgagggaacatctgggttatgccttttttaaagtagttttctttaggaactgtcagcatgttgttgttgaagtgtggagttgtaactctgcgtggactatggacagtcaacaatatgtacttaaaagttgcactattgcaaaacgggtgtattatccaggtactcgtacactatttttttgtactgctggtcctgtaccagaaacattttcttttattgtacttgctttttaaactttgtttagccacttaaaatctgcttatggcacaatttgcctcaaaatccattcca

SEQ ID NO: 192604 - DNA, 871 bp, Homo Sapiens
actttgtacaaaaaagttgggacaatgatggctagaaaaatgaaagacacagacagtgaagaagaaattagagaagcattccgtgtgtttgataaggatggcaatggctatattagtgctgcagaacttcgccatgtgatgacaaaccttggagagaagttaacagatgaagaagttgatgaaatgatcagggaagcagatattgatggtgatggtcaagtaaactatgaagagtttgtacaaatgatgacagcaaagtgaagaccttgtacagaatgtgttaaatttcttgtacaaaattgtttatttgccttttctttgtttgtaacttatctgtaaaaggtttctccctactgtcaaaaaaatatgcatgtatagtaattaggacttcattcctccatgttttcttcccttatcttactgtcattgtcctaaaaccttattttagaaaattgatcaagtaacatgttgcatgtggcttactctggatatatctaagcccttctgcacatctaaacttagatggagttggtcaaatgagggaacatctgggttatgccttttttaaagtagttttctttaggaactgtcagcatgttgttgttgaagtgtggagttgtaactctgcgtggactatggacagtcaacaatatgtacttaaaagttgcactattgcaaaacgggtgtattatccaggtactcgtacactatttttttgtactgctggtcctgtaccagaaacattttcttttattgttacttgctttttaaactttgtttagccacttaaaatctgcttatggcacaatttgcctcaaaatccattccaagttgtatatttgttttccaataaaaaaattacaatttaccc

SEQ ID NO: 192605 - DNA, 1539 bp, Homo Sapiens; identical to SEQ ID NO: 180503
  misc_feature (338)..(347): n is a, c, g, or t
  misc_feature (550)..(559): n is a, c, g, or t
  misc_feature (676)..(817): n is a, c, g, or t
  misc_feature (830)..(844): n is a, c, g, or t

SEQ ID NO: 192606 - DNA, 605 bp, Homo Sapiens
tttgtacaaaaaagttggttcttgtacaaaaaagttggattgtttatccttttctttgtttgtaacttatctgtaaaaggtttctccctactgtcaaaaaaatatgcatgtatagtaattaggacttcattcctccatgttttcttcccttatcttactgtcattgtcctaaaaccttattttagaaaattgatcaagtaacatgttgcatgtggcttactctggatatatctaagcccttctgcacatctaaacttagatggagttggtcaaatgagggaacatctgggttatgccttttttaaagtagttttctttaggaactgtcagcatgttgttgttgaagtgtggagttgtaactctgcgtggactatggacagtcaacaatatgtacttaaaagttgcactattgcaaaacgggtgtattatccaggtactcgtacactatttttttgtactgctggtcctgtaccagaaacattttcttttattgttacttgctttttaaactttgtttagccacttaaaatctgcttatggcacaatttgcctcaaaatccattccaagttgtatatttgttttccaataaaaaaattacaattta

SEQ ID NO: 192607 - DNA, 959 bp, Homo Sapiens
aactttgtacaaaaaagttgggtcgcgtctcggaaaccggtagcgcttgcagcatggctgaccaactgactgaagagcagattgcagaattcaaagaagctttttcactatttgacaaagatggtgatggaactataacaacaaaggaattgggaactgtaatgagatctcttgggcagaatcccacagaagcagagttacaggacatgattaatgaagtagatgctgatggtaatggcacaattgacttccctgaatttctgacaatgatggcaagaaaaatgaaagacacagacagtgaagaagaaattagagaagcattccgtgtgtttgataaggatggcaatggctatattagtgctgcagaacttcgccatgtgatgacaaaccttggagagaagttaacagatgaagaagttgatgaaatgatcagggaagcagatattgatggtgatggtcaagtaaactatgaagagtttgtacaaatgatgacagcaaagtgaagaccttgtacagaatgtgttaaatttcttgtacaaaattgtttatttgccttttctttgtttgtaacttatctgtaaaaggtttctccctactgtcaaaaaaatatgcatgtatagtaattaggacttcattcctccatgttttcttcccttatcttactgtcattgtcctaaaaccttattttagaaaattgatcaagtaacatgttgcatgtggcttactctggatatatctaagcccttctgcacatctaaacttagatggagttggtcaaatgagggaacatctgggttatgcctttttttaaagtagttttctttacgaactgtcagcatgttgttgttgaagtgtggagttgtaactctgcgtggactatggacagtcaacatatgtacttaaaagttgcactattgcaaacgggtgtattatccaggtactcgtacactatttttttg

SEQ ID NO: 192608 - DNA, 2233 bp, Homo Sapiens; identical to SEQ ID NO: 185118

SEQ ID NO: 192609 - DNA, 1725 bp, Homo Sapiens; identical to SEQ ID NO: 180504

SEQ ID NO: 192610 - DNA, 1387 bp, Homo Sapiens
ttggcatggcgccgtccacgccgctcttgacagtccgaggatcagaaggactgtacatggtgaatggaccaccacattttacagaaagcacagtgtttccaagggaatctgggaagaattgcaaagtctgtatctttagtaaggatgggaccttgtttgcctggggcaatggagaaaaagtaaatattatcagtgtcactaacaagggactactgcactccttcgacctcctgaaggcagtttgccttgaattctcacccaaaaatactgtcctggcaacgtggcagccttacactacttctaaagatggcacagctgggatacccaacctacaactttatgatgtgaaaactgggacatgtttgaaatctttcatccagaaaaaaatgcaaaattggtgtccatcctggtcagaagatgaaactctttgtgcccgcaatgttaacaatgaagttcacttctttgaaaacaacaattttaacacaattgcaaataaattgcatttgcaaaaaattaatgattttgtattatcacctggaccccaaccatacaaggtggctgtctatgttccaggaagtaaaggtgcaccttcatttgttagattatatcagtaccccaactttgctggacctcatgcagctttagctaataaaagtttctttaaggcagataaagttacaatgctgtggaataaaaaagctactgctgtgttggtaatagctagcacagatgttgacaagacaggagcttcctactatggagaacaaactctacactacattgcaacaaatggagaaagtgctgtagtgcaattaccaaaaaatggccccatttatgatgtagtttggaattctagttctactgagttttgtgctgtatatggttttatgcctgccaaagcgacaattttcaacttgaaatgtgatcctgtatttgactttggaactggtcctcgtaatgcagcctactatagccctcatggacatatattagtattagctggatttggaaatctgaggggacaaatggaagtgtgggatgtgaaaaactacaaacttatttctaaaccggtggcttctgattctacatattttgcttggtgcccggatggtgagcatattttaacagctacatgtgctcccaggttacgggttaataatggatacaaaatttggcattatactggctctatcttgcacaagtatgatgtgccatcaaatgcagaattatggcaggtttcttggcagccatttttggatggaatatttccagcaaaacaataacttaccaagcagttccaagtgaagtacccaatgaggaacctaaagttgcaacagcttatagacccccagctttaagaaataaaccaatcacaatttccaaattg

SEQ ID NO: 192611 - DNA, 1391 bp, Homo Sapiens; identical to SEQ ID NO: 185119
  misc_feature (283)..(316): n is a, c, g, or t

SEQ ID NO: 192612 - DNA, 1665 bp, Homo Sapiens; identical to SEQ ID NO: 180505
  misc_feature (96)..(130): n is a, c, g, or t
  misc_feature (242)..(252): n is a, c, g, or t

SEQ ID NO: 192613 - DNA, 1076 bp, Homo Sapiens; identical to SEQ ID NO: 185122

SEQ ID NO: 192614 - DNA, 1989 bp, Homo Sapiens; identical to SEQ ID NO: 180508

SEQ ID NO: 192615 - DNA, 797 bp, Homo Sapiens
  misc_feature (507)..(545): n is a, c, g, or t
  misc_feature (682)..(692): n is a, c, g, or t
ctttgtacaaaaaagttgggttttctaaatacctaataggggggcttggattcaacaaagccacagacttaacgttgaaattttcttcaggaattttctagtaacccaggtctaaagtagctacagaaaggggaatattatgtgtgattatttttcttcttatgctatatccccaagtttttcagactcatttaagtaaaggctagagtgagtaaggaatagagccaaatgaggtaggtgtctgagccatgaagtataaatactgaaagatgtcacttttattcaggaaatagggggagattcaagtcgtatagattcctactcgaaaatcttgacacctgactttccaggatgcacattttcatacgtagaccagtttcctcttggtttcttcagttaagtcaaaacaacacgttcctctttccccatatattcatatatttttgctcgttagtgtatttcttgagctgttttcatgttgtttatttcctgtctgtgaaatggtgnnnnnnnnnnnnnnnnnnnnnnnnnnnnnnnnnnnnnnnaacttgggaccaccaagttgtaaagatgtatgtttttacctgacagttataccacaggtagactgtcaagttgagaagagtgaatcaataacttgtatttgttttaaaaattaaattaatccttgataagagttgcnnnnnnnnnnnaggagttagtccttgaccactagtttgatgccatctccattttgggtgacctgtttcaccagcaggcctgttactctccatgactaattgtgtaagtgcttaaaa

SEQ ID NO: 192616 - DNA, 964 bp, Homo Sapiens; identical to SEQ ID NO: 185126
  misc_feature (542)..(582): n is a, c, g, or t
  misc_feature (719)..(727): n is a, c, g, or t

SEQ ID NO: 192617 - DNA, 927 bp, Homo Sapiens
  misc_feature (754)..(791): n is a, c, g, or t
ccaactttgtacaaaaaagttggtctgtataatatcatgcaagtgtggcaaatggcagagaacatttataatgatgaagaccctgaaggaagcgtggatccagaaggacaagggtcctagatatgtctttacttgttgtgattttagactccccttttttcttctcaaccctgagagtgatttaacactggttttgagacagactttattcagctatccctctatataataggtaccaccgataatgctattagcccaaaccgtgggtgttttctaaatattaataggggggcttgattcaacaaagccacagacttaacgttgaaattttcttcaggaattttctagtaacccaggtctaaagtagctacagaaaggggaatattatgtgtgattatttttcttcttatgctatatccccaagtttttcagactcatttaagtaaaggctagagtgagtaaggaatagagccaaatgaggtaggtgtctgagccatgaagtataaatactgaaagatgtcacttttattcaggaaatagggggagattcaagtcgtatagattcctactcgaaaatcttgacacctgactttccaggatgcacattttcatacgtagaccagtttcctcttggtttcttcagttaagtcaaaacaacacgttcctctttccccatatattcatatatttttgctcgttagtgtatttcttgagctgttttcatgttgtttatttcctgtctgtgaaatggtgnnnnnnnnnnnnnnnnnnnnnnnnnnnnnnnnnnnnnnaacttgggaccaccaagttgtaaagatgtatgtttttacctgacagttataccacaggtagactgtcaagttgaaaaaaatgaatcaataacttgtatttgttttaaaaattaaattaatccttgataaaagttgc

SEQ ID NO: 192618 - DNA, 924 bp, Homo Sapiens; identical to SEQ ID NO: 180510
  misc_feature (125)..(163): n is a, c, g, or t

SEQ ID NO: 192619 - DNA, 1171 bp, Homo Sapiens
ttggccccttcattgccttccctattctgtccaggctgaaaggttccctgagtcgaggtgactggtacaagacaaaggagatcctgctgaaggggcccgactggatcctgggcgagatcaagacatcgggtttgaggggccgtggaggcgctggcttccccactggcctcaagtggagcttcatgaataagccctcagatggcaggcccaagtatctggtggtgaacgcagacgagggggagccgggcacctgcaaggaccgggagatcttacgccatgatcctcacaagctgctggaaggctgcctggtggggggccgggccatgggcgcccgcgctgcctatatctacatccgaggggaattctacaatgaggcctccaatctgcaggtggccatccgagaggcctatgaggcaggtctgattggcaagaatgcttgtggctctggctatgattttgacgtgtttgtggtgcgcggggctggggcctacatctgtggagaggagacagcgctcatcgagtccattgagggcaagcagggcaagccccgcctgaagccccccttccccgcagacgtgggagtgtttggctgccccacaactgtggccaacgtggagacagtggcagtgtcccccacaatctgccgccgtggaggtacctggtttgctggctttggcagagaacgcaactcaggcaccaaactattcaacatctctggccatgtcaaccacccttgcactgtggaggaggagatgtctgtgcccttgaaagaactgattgagaagcatgctgggggtgtcacgggcggctgggacaacctccttgctgtgatccctggcggctcgtctaccccactgatccccaagtctgtgtgtgagacggtgctgatggacttcgatgcgctggtgcaggcacagacaggcctgggcacagctgcggtgatcgtcatggaccgctcgacggacatcgtgaaagccatcgcccgcctcattgagttctataagcacgagagctgtggccagtgtaccccatgccgtgagggtgtggactggatgatctatgtgtttggcacgtttcgtgaggggggatgcccggctgggcgacatccactccctgtgggagatcagcaagcagatacaaacgccatactatttgtgctctgggtgagggg

SEQ ID NO: 192620 - DNA, 985 bp, Homo Sapiens
ttggagggtctctatcgcgccagttcctcagcctcagtgctatgaaggtgacagcgtgaggtgacccatctggcccgccgcgatgctggcaacacggcggctgctcggctggtcgcttcccgcgcgggtatctgtgcgtttcagcggcgacacgacagcacccaagaaaacctcatttggctcgctgaaggatgaagaccggattttcaccaacctgtacggccgccatgactggaggctgaaaggttccctgagtcgaggtgactggtacaagacaaaggagatcctgctgaaggggcccgactggatcctgggcgagatcaagacatcgggtttgaggggccgtggaggcgctggcttccccactggcctcaagtggagcttcatgaataagccctcagatggcaggcccaagtatctggtggtgaacgcagacgagggggagccgggcacctgcaaggaccgggagatcttacgccatgatcctcacaagctgctggaaggctgcctggtggggggccgggccatgggcgcccgcgctgcctatatctacatccgaggggaattctacaatgaggcctccaatctgcaggtggccatccgagaggcctatgaggcaggtctgattggcaagaatgcttgtggctctggctatgattttgacgtgtttgtggtgcgcggggctggggcctacatctgtggagaggagacagcgctcatcgagtccattgagggcaagcagggcaagccccgcctgaagccccccttccccgcagacgtgggagtgtttggctgccccacaactgtggccaacgtggagacagtggcagtgtcccccacaatctgccgccgtggaggtacctggtttgctggctttggcagaaaacgcaactcaggcaccaaactattcaacatctctgggccatgtcaaccacccttgcactgtggaggaggagatgtctgtgcccttgaaagaactgattga

SEQ ID NO: 192621 - DNA, 1343 bp, Homo Sapiens
ttgggatcttctagttgtggcggtgaggagatagacagtaaagactaaagaaaccaataaatcgccatggatcggatgaagaagatcaaacggcagctgtcaatgacactccgaggtggccgaggcatagacaagaccaatggtgcccctgagcagataggcctggatgagagtggtggtggtggcggcagtgaccctggagaggcccccacacgtgctgctcctggggaacttcgttctgcacggggcccactcagctctgcaccagagattgtgcacgaggacttgaagatggggtctgatggggagagtgaccaggcttcagccacgtcctcggatgaggtgcagtctccagtgagagtgcgtatgcgcaaccatcccccacgcaagatctccactgaggacatcaacaagcgcctatcactaccagctgacatccggctgcctgagggctacctggagaagctgaccctcaatagccccatctttgacaagcccctcagccgccgcctccgtcgtgtcagcctatctgagattggcttttggaaactggagacctacattaagctggacaaactgggcgagggtacctatgccaccgtctacaaaggcaaaagcaagctcacagacaaccttgtggcactcaaggagatcagactggaacatgaagagggggcaccctgcaccgccatccgggaagtgtccctgctcaaggacctcaaacacgccaacatcgttacgctacatgacattatccacacggagaagtccctcacccttgtctttgagtacctggacaaggacctgaagcagtacctggatgactgtgggaacatcatcaacatgcacaacgtgaaagtgggtgtggggcaggaagcaggggcacaagggggcccccactcacccactccaacccacaaatctcccagaaacggacttttccctttggctttttttgctaggagcccttggagggcactgggaccctgtcctcttttgtgtgacaaggctctgggcctagtgtctgtgtttgggaggggagcagtgcctgctgggggtcgggctagtggatagtctttgacctctgcctgccattcctgggtccccagctgttcctgttccagctgctccgtggcctggcctactgccaccggcagaaggtgctacaccgagacctcaagccccagaacctgctcatcaacgagaggggagagctcaagctggctgactttggcctggcccgagcaaagtcaatcccaacaaagacatactccaatgagggtggtgacactgtggtaccggccccctgacatcctgcttgggtccacggactactcccactc

SEQ ID NO: 192622 - DNA, 1736 bp, Homo Sapiens; identical to SEQ ID NO: 185130
  misc_feature (1316)..(1383): n is a, c, g, or t

SEQ ID NO: 192623 - DNA, 2187 bp, Homo Sapiens; identical to SEQ ID NO: 185132

SEQ ID NO: 192624 - DNA, 1334 bp, Homo Sapiens; identical to SEQ ID NO: 185133

SEQ ID NO: 192625 - DNA, 908 bp, Homo Sapiens; identical to SEQ ID NO: 180511

SEQ ID NO: 192626 - DNA, 1516 bp, Homo Sapiens; identical to SEQ ID NO: 185134

SEQ ID NO: 192627 - DNA, 1259 bp, Homo Sapiens; identical to SEQ ID NO: 185135

SEQ ID NO: 192628 - DNA, 1315 bp, Homo Sapiens
  misc_feature (534)..(543): n is a, c, g, or t
ctttgtacaaaaaagttggaaatcttccctccagtactcctctccagcacctgatggttgtggtgaccagactttaggggacttacttctcacgcctaccagaatctacagccattcactgttacctgtcctacgttcaggacatgtcaaagcctttgcccatattactggtggaggattactagagaacatccccagagtcctccctgagaaacttggggtagatttagatgcccagacctggaggatccccagggtcttctcatggttgcagcaggaaggacacctctctgaggaagagatggccagaacatttaactgtggggttggcgctgtccttgtggtatcaaaggagcagacagagcagattctgagggatatccagcagcacaaggaagaagcctgggtgattggcagtgtggttgcacgagctgaaggttccccacgtgtgaaagtcaagaatctgattgaaagcatgcaaataaatgggtcagtgttgaagaatggctccctgacaaatcatttctcttttgnnnnnnnnnnggccagagtgggtcttaatatctggaacaggatcgaacctgcaagcacttatagacagtactcgggaaccaaatagctctgcacaaattgatattgttatctccaacaaagccgcagtagctgggttagataaagcggaaagagctggtattcccactagagtaattaatcataaactgtataaaaatcgtgtagaatttgacagtgcaattgacctagtccttgaagagttctccatagacatagtctgtcttgcaggattcatgagaattctttctggcccctttgtccaaaagtggaatggaaaaatgctcaatatccacccatccttgctcccttcttttaagggttcaaatgcccatgagcaagccctggaaaccggagtcacagttactgggtgcactgtacactttgtagctgaagatgtggatgctggacagattattttgcaagaagctgttcccgtgaagaggggtgatactgtcgcaactctttctgaaagagtaaaattagcagaacataaaatatttcctgcagcccttcacctggtggccagtggaactgtacagcttggagaaaatggcaagatctgttgggttaaagaggaatgaagccttttaattcttaaatggggccagtttacaagaattatttgctgtttgcatggtggttttttatcatggacttggccctaaagaaaaactgctaaaagacaaaaaagacctcacccctacttcatctatttttttaataaatagagactcactactca

SEQ ID NO: 192629 - DNA, 1084 bp, Homo Sapiens
caaattgatgagcaatgcttctccttataatagccaactttgtacaaaaaagttggggttgtctccagtttgttgctcaaaccgagttctggagaacgccatcagctcgctgcttaaaattaaaccacaggttccattatgggtcgacttgatgggaaagtcatcatcctgacggccgctgctcaggggattggccaagcagctgccttagcttttgcaagagaaggtgccaaagtcatagccacagacattaatgagtccaaacttcaggaactggaaaagtacccgggtattcaaactcgtgtccttgatgtcacaaagaagaaacaaattgatcagtttgccaatgaagttgagagacttgatgttctctttaatgttgctggttttgtccatcatggaactgtcctggattgtgaggagaaagactgggacttctcgatgaatctcaatgtgcgcagcatgtacctgatgatcaaggcattccttcctaaaatgcttgctcagaaatctggcaatattatcaacatgtcttctgtggcttccagcgtcaaaggagttgtgaacagatgtgtgtacagcacaaccaaggcagccgtgattggcctcacaaaatctgtggctgcagatttcatccagcagggcatcaggtgcaactgtgtgtgcccaggaacagttgatacgccatctctacaagaaagaatacaagccagaggaaatcctgaagaggcacggaatgatttcctgaagagacaaaagacgggaagattcgcaactgcagaagaaatagccatgctctgcgtgtatttggcttctgatgaatctgcttatgtaactggtaaccctgtcatcattgatggaggctggagcttgtgattttaggatctccatggtgggaaggaaggcaggcccttcctatccacagtgaacctggttacgaagaaaactcaccaatcatctccttcctgttaatcacatgttaatgaaaataagctcttttaatgatgtcactgtttgcaagagtctgattctttaagtatattaatctctttgtaatctcttctgaaatcattgtaaagaaaat

SEQ ID NO: 192630 - DNA, 1670 bp, Homo Sapiens; identical to SEQ ID NO: 185139

SEQ ID NO: 192631 - DNA, 705 bp, Homo Sapiens
ttggctaaacttgtcatttgtttttctcacagaatagccatttcctgctgtcttcccaatgatcactgccctttcaataacactcttgcctctagaatcatatgttcaaagtatgaatacacacctagcacatagtaggtgctcaaatattaatttcctccttgccttccttatctaccctgtgtcctccatttccccgtatgattccaacccaatatagcaaatgacatttacatgttatgaaaacatctattgggtaaaatcagatcttggataaagaaattctgacttttatataagcttttggtagacagaaaaaacagaaaggtattcgttggtagaacatttttaagttcaggaaagaaagctggaataatactacgtaactttgtccaggttactttgactgaaacacgtttttggtggatttcttttcctcaaagaactctctaaatgcaactccttgctggattcctcacccatcatcctgttggaaacccttactagacctatgtatttagggagttttgtcagaaaacatttttaacttgcagtatttaaaagaatatttactgttcctaaaatgtcattcaaatgcatgtactgtctattgtttggggatgggaactagttttgcaaaaaacacctaatgttgtataataatgccccaatgatcttgctggttaaaaaatacagtatttttgg

SEQ ID NO: 192632 - DNA, 1994 bp, Homo Sapiens; identical to SEQ ID NO: 185140
  misc_feature (1343)..(1360): n is a, c, g, or t

SEQ ID NO: 192633 - DNA, 1245 bp, Homo Sapiens; identical to SEQ ID NO: 185143
  misc_feature (368)..(380): n is a, c, g, or t
  misc_feature (1042)..(1052): n is a, c, g, or t

SEQ ID NO: 192634 - DNA, 989 bp, Homo Sapiens; identical to SEQ ID NO: 185145

SEQ ID NO: 192635 - DNA, 976 bp, Homo Sapiens
ttagaagccaagcgctcaagcatggtgcgagctgagggaagcgactggggtcccaggtgaaataccgcttgccatcagcatgttcaatgtctagccagatgacatcacagggcaggttgtgatcatcaaagccctgatccacttccagcacatcagcctcgtcccggtagttccaacggctctggtggtagccgagggagaagagtgggggcaacgcctgggttcctgtgagactagcatattgccggaaaacatcagagatggagggccccagcagcaggaagacgtcaatgatgccagtctctgacatccagcgaacatctgtctgtggggtctccccagagccctgcaggtagtccatcatcttcccaaacagggtcttcccggcagtgttggaagatatatcaacccaggtctctgcagcattgagccagaagatgcccaagtcgcgatgagggttgtgtgccaggagcacaggcacagacccatacaaggccattgggttgtacagctcatactggaacacatccaaattgtagaggcgatatggctccccaccctcagtgaccttcagcctcaggttgtctgcatgctcagggatcccatagacatgctccatgcctggcagagagaagtccaaacccacagacatggggccatacggcttgctgtcagagtgagttttgaatgtctcctcccaggctcctggctcatctttctctgccttcccctgagtctcctctggcttgtcgccatccctgggtgtttcctcaggctgggccccatcgccctcagctgggtcttttgatccttgcctagagaaaaggttcttgatcttatcccatatgctaccaagcgtgagattaaccttatccgagaaagagaccctaggggccctctgatgctcaaactccaagagtcctcgggcattgacccatcttaaagcggaaaagacttcccaacttttttgtacaaa

SEQ ID NO: 192636 - DNA, 1193 bp, Homo Sapiens
agagatggagggccccagcagcaggaagacgtcaatgatgccagtctctgacatccagcgaacatctgtctgtggggtctccccagagccctgcaggtagtccatcatcttcccaaacagggtcttcccggcagtgttggaagatatatcaacccaggtctctgcagcattgagccagaagatgcccaagtcgcgatgagggttgtgtgccaggagcacaggcacagacccatacaaggccattgggttgtacagctcatactggaacacatccaaattgtagaggcgatatggctccccaccctcagtgaccttcagcctcaggttgtctgcatgctcagggatcccatagacatgctccatgcctggcagagagaagtccaaacccacagacatggggccatacggcttgctgtcagagtgagttttgaatgtctcctcccaggctcctggctcatctttctctgccttcccctgagtctcctctggcttgtcgccatccctgggtgtttcctcaggctgggccccatcgccctcagctgggtcttttgatccttgcctagagaaaaggttcttgatcttatcccatatgctaccaagcgtgagattaaccttatccgagaaagagaccctaggggccctctgatgctcaaactccaagagtcctcgggcattgacactaagcaaaagacttcggtcctctagtaggtcaaggcggaatggccgtgctgtcaagatgatcttgtagggtccctcagccatggttaactccacactgttctcatcacgaccagagacagaaagccgggctattggtggatcagccaccaaaacatctggtacacggtatcggggtcgccgaggctccagctcatcaatcctgaaccgagtcatgttcttttgaagcccctgaagctctagcaccagcaacaccttggtgacctcatggatcagatggaccgtgagggaatcaggaccaagctgtagagagtccagcaaggctcggtatggagagaggcctggccgtatgcttctctgtcgcttgcagaaagaactctcttcacaggtcttaaagttgcttctatccacagcaagggtaatccccaggcagacccctaaaaaagccagtaccaaagacgcccaagaccgcctcctacgcgccgccactgccgctcccgccgccatcttgccaa

SEQ ID NO: 192637 - DNA, 1274 bp, Homo Sapiens
actttgtacaaaaaagttggccttgctgtggatagaagcaactttaagacctgtgaagagagttctttctgcaagcgacagagaagcatacggccaggcctctctccataccgagccttgctggactctctacagcttggtcctgattccctcacggtccatctgatccatgaggtcaccaaggtgttgctggtgctagagcttcaggggcttcaaaagaacatgactcggttcaggattgatgagctggagcctcggcgaccccgataccgtgtaccagatgttttggtggctgatccaccaatagcccggctttctgtctctggtcgtgatgagaacagtgtggagttaaccatggctgagggaccctacaagatcatcttgacagcacggccattccgccttgacctactagaggaccgaagtcttttgcttagtgtcaatgcccgaggactcttggagtttgagcatcagagggcccctagggtctcgcaaggatcaaaagacccagctgagggcgatggggcccagcctgaggaaacacccagggatggcgacaagccagaggagactcaggggaaggcagagaaagatgagccaggagcctgggaggagacattcaaaactcactctgacagcaagccgtatggccccatgtctgtgggtttggacttctctctgccaggcatggagcatgtctatgggatccctgagcatgcagacaacctgaggctgaaggtcactgagggtggggagccatatcgcctctacaatttggatgtgttccagtatgagctgtacaacccaatggccttgtatgggtctgtgcctgtgctcctggcacacaaccctcatcgcgacttgggcatcttctggctcaatgctgcagagacctgggttgatatatcttccaacactgccgggaagaccctgtttgggaagatgatggactacctgcagggctctggggagaccccacagacagatgttcgctggatgtcagagactggcatcattgacgtcttcctgctgctggggccctccatctctgatgttttccggcaatatgctagtctcacaggaacccaggcgttgcccccactcttctccctcggctaccaccagagccgttggaactaccgggacgaggctgatgtgctggaagtggatcagggctttgatgatcacaacctgccctgtgatgtcatctggctagacattgaacatgctgatggcaagcggtatttcacctgggaccccagtcgcttctctca

SEQ ID NO: 192638 - DNA, 933 bp, Homo Sapiens
gatgagggttgtgtgccaggagcacaggcacagacccatacaaggccattgggttgtacagctcatactggaacacatccaaattgtagaggcgatatggctccccaccctcagtgaccttcagcctcaggttgtctgcatgctcagggatcccatagacatgctccatgcctggcagagagaagtccaaacccacagacatggggccatacggcttgctgtcagagtgagttttgaatgtctcctcccaggctcctggctcatctttctctgccttcccctgagtctcctctggcttgtcgccatccctgggtgtttcctcaggctgggccccatcgccctcagctgggtcttttgatccttgcgagaccctaggggccctctgatgctcaaactccaagagtcctcgggcattgacactaagcaaaagacttcggtcctctagtaggtcaaggcggaatggccgtgctgtcaagatgatcttgtagggtccctcagccatggttaactccacactgttctcatcacgaccagagacagaaagccgggctattggtggatcagccaccaaaacatctggtacacggtatcggggtcgccgaggctccagctcatcaatcctgaaccgagtcatgttcttttgaagcccctgaagctctagcaccagcaacaccttggtgacctcatggatcagatggaccgtgagggaatcaggaccaagctgtagagagtccagcaaggctcggtatggagagaggcctggccgtatgcttctctgtcgcttgcagaaagaactctcttcacaggtcttaaagttgcttctatccacagcaagggtaatccccaggcagacccctaaaaaagccagtaccaaagacgcccaagaccgcctcctacgcgccgccactgccgctaccgccgccatcttgccaa

SEQ ID NO: 192639 - DNA, 1248 bp, Homo Sapiens
tgcttttttataatgccaactttgtacaaaaaagttgggtccaggtctatctgcctggccaaggggaggtgtggtatgacattcaaagctaccagaagcatcatggtccccagaccctgtacctgcctgtaactctaagcagtatccctgtgttccagcgtggagggacaatcgtgcctcgatggatgcgagtgcggcggtcttcagaatgtatgaaggatgaccccatcactctctttgttgcacttagccctcagggtacagctcaaggagagctctttctggatgatgggcacacgttcaactatcagactcgccaagagttcctgctgcgtcgattctcattctctggcaacacccttgtctccagctcagcagaccctgaaggacactttgagacaccaatctggattgagcgggtggtgataataggggctggaaagccagcagctgtggtactccagacaaaaggatctccagaaagccgcctgtccttccagcatgaccctgagacctctgtgttggtcctgcgcaagcctggcatcaatgtggcatctgattggagtattcacctgcgataacccaagggatgttctgggttagggggagggaaggggagcattagtgctgagagatattctttcttctgccttggagttcggccctccccagacttcacttatgctagtctaagacccagattctgccaacatttgggcaggatgagagggctgaccctgggctccaaattcctcttgtgatctcctcacctctcccactccattgataccaactctttcccttcattcccccaacatcctgttgctctaactggagcacattcacttacgaacaccaggaaaccacagggcccttgtcgccccttctctttcccttatttaggagccctgaactcccccagagtctatccattcatgcctcttgtatgttgatgccacttcttggaagaagatgagggcaatgagttagggctccttttccccttccctcccaccagattgctctcccacctttcatttcttcctccaggctttactcccctttttatgccccaccgatacactgggaccaccccttaccccggacaggatgaatggatcaaaggagtgaggttgctaaagaacatccttttccctctcattctacccttttcctctccccgattccttgtagagctgctgcaattcttagaggggcagttctacctcctctgtccctcggcagaaa

SEQ ID NO: 192640 - DNA, 983 bp, Homo Sapiens
ctttgtacaaaaaagttggcaagggatgtccctgggttagggggagggaaggggagcattagtgctgagagatattctttcttctgccttggagttcggccctccccagacttcacttatgctagtctaagacccagattctgccaacatttgggcaggatgagagggctgaccctgggctccaaattcctcttgtgatctcctcacctctcccactccattgataccaactctttcccttcattcccccaacatcctgttgctctaactggagcacattcacttacgaacaccaggaaaccacagggcccttgtcgccccttctctttcccttatttaggagccctgaactcccccagagtctatccattcatgcctcttgtatgttgatgccacttcttggaagaagatgagggcaatgagttagggctccttttccccttccctcccaccagattgctctcccacctttcatttcttcctccaggctttactcccctttttatgccccaccgatacactgggaccaccccttaccccggacaggatgaatggatcaaaggagtgaggttgctaaagaacatccttttccctctcattctacccttttcctctccccgattccttgtagagctgctgcaattcttagaggggcagttctacctcctctgtccctcggcagaaagacgtttccacacctcttaggggatgcgcattaaacttcttttgcccccttcttgtcccctttgaggggcacttaagatggagaaatcagttgtggtttcagtgaatcatggtcacctgtatttattgctaggagaagcctgagggtggggggagatgatcatgtgtgctcggggttggctggaagccctgggtggggggttgggggaggactaatggggagtcggggaatatttgtgggtattttttttacttcctcttggttcccagctgtgacacgttttgatcaaaggagaaac

SEQ ID NO: 192641 - DNA, 1171 bp, Homo Sapiens
cccatctggtaccagcgcacaagcagctctggctctgggtttttgaagaagccacccacatccgccccacagaaggaaagtcccaccagccccaagctgagacacataggaatagagatcttcaaatggtcccactcggcagtgttgtcccctgtccacacggctccaaagcgctgggagccagcgaagaaggccctggccaggacaaaggggcgttccatgcccccagagcgctgtctcagcccatcagcagtcgccatgtgcacataaaggccatagatgttatgcacatcccggtgctcccagcccccataatgctgggcatccttgagcatggtgacctcaggaccattgaacacagatggttcgttcatgtcattccagacaaagaggttgggagctgagccctcataattgtcatagctgaacatgttagcccaccaggccctcatcgtgggattagtgaagtcagggtaaccagctgagcctggccagcaccagccctcatagtcagagccatcccgggttttaacatacagccccaggttccgcagctcctcgtgaactcggtagccggagtccaccttgatgtgggggtctacgatggccaccagcttccgcctcttagaagccaagcgctcaagcatggtgcggggctgagggaagcgactggggtcccaggtgaaataccgcttgccatcagcatgttcaatgtctagccagatgacatcacagggcaggttgtgatcatcaaagccctgatccacttccagcacatcagcctcgtcccggtagttccaacggctctggtggtagccgagggagaagagtgggggcaacgcctgggttcctgtgagactagcatattgccggaaaacatcagagatggagggccccagcagcaggaagacgtcaatgatgccagtctctgacatccagcgaacatctgtctgtggggtctccccagagccctgcaggtagtccatcatcttcccaaacagggtcttcccggcagtgttggaagatatatcaacccaggtctctgcagcattgagccagaagatgcccaagtcgcgatgagggttgtgtgccaggagcacaggcacagacccatacaaggccattgggttgtacagctcatactggaacccaactttttgtacaaagttgg

SEQ ID NO: 192642 - DNA, 886 bp, Homo Sapiens
tttgtacaaaaaagttgggagagctctttctggatgatgggcacacgttcaactatcagactcgccaagagttcctgctgcgtcgattctcattctctggcaacacccttgtctccagctcagcagaccctgaaggacactttgagacaccaatctggattgagcgggtggtgataataggggctggaaagccagcagctgtggtactccagacaaaaggatctccagaaagccgcctgtccttccagcatgaccctgagacctctgtgttggtcctgcgcaagcctggcatcaatgtggcatctgattggagtattcacctgcgataacccaagggatgttctgggttagggggagggaaggggagcattagtgctgagagatattctttcttctgccttggagttcggccctccccagacttcacttatgctagtctaagacccagattctgccaacatttgggcaggatgagagggctgaccctgggctccaaattcctcttgtgatctcctcacctctcccactccattgataccaactctttcccttcattcccccaacatcctgttgctctaactggagcacattcacttacgaacaccaggaaaccacagggcccttgtcgccccttctctttcccttatttaggagccctgaactcccccagagtctatccattcatgcctcttgtatgttgatgccacttcttggaagaagatgagggcaatgagttagggctccttttccccttccctcccaccagattgctctcccacctttcatttcttcctccaggctttactcccctttttatgccccaccgatacactgggaccaccccttaccccggacaggatgaatggatcaaaaggagtgaggttgc

SEQ ID NO: 192643 - DNA, 1078 bp, Homo Sapiens
ttgtacaaaaaagttgggccatctgtcctcttaaacaaaaagtgattctgacaagagctcttcccaagtgccgccaatactacaagagacagataaatccaagtcaaataccaagcaaaatagtgtgcctccttcacagaccaagtctgaaactagctgggaatctcccaaacaaataaaaaagaagaaaaaagccagacgagaaacgtgaaattttttttcctgaattggacatgtgtttgcaaacacttgtcttgaagattatgctgtttatgcaataatttgtgaacatgtacagagttttatataaatttaaaccaatttttaaaacaaaactgcggacaccaccataaaaatggaatcaaaagaaagttaatttatgaaattaagaggtcagcagaatatactcagtgatggaagacacttgggaaagtctttttaatagaacaagaacgatcttaatttaagaatattatcctggtttaacaacagtgccctgtttacaacagattgtgccctatctcatctgcagccgaggaataaaggattctgattagaaagagggttgcctacagattagtaagcaattccttggatcttatgcacagaacttgtaccatttgaatctgttttatgcttaaatcaaagtgctttgatcaaatgcataacctgccatatctttacatatttgttggtagcaatttgtattaaagaaatcacaagtgcaaataaaaagtcatttatcatttgtttaactaaactgtcatggtttagtttacaatttttaaaaagttcttaaaatactgaaaatgcagttgacacttgtgtatggcttatgaagttatttttgatagtcttacattacttgaattgttcaaagtacagtatattttaaattaagaaaagtgaactatatgtatttgttttatacatttaaggcttaaaactcataaataatgctattgtttatgatttgaaaactttcaggcaaaatccaatttacattttttcccttccctagcaattacttttttccagcttcactcttcttagtactatactttgtgactttaaaatg

SEQ ID NO: 192644 - DNA, 1243 bp, Homo Sapiens
  misc_feature (812)..(831): n is a, c, g, or t
gtacaaaaaagttggaaacagttcacgccatgatggaaaggaagttgatgaaggagcctgggaaactaaaattagtcacagagagaaacgacagcagcgtaaacgtgataaggtgctgactgattctggttcattggattcaactatccctgggatagaaaataccatcacagttaccaccgagcaacttacaaccgcatcatttcctgttggttccaagaagaataaaggtgattctcatctaaatgttcaagttagcaactttaaatctggaaaaggagattctacacttcaggtttcttcaggattgaatgaaaacctcactgtcaatggaggaggctggaatgaaaagtctgtaaaactctcctcacagatcagtgcaggtgaggagaagtggaactccgtttcacctgcttctgcaggaaagaggaaaactgagccatctgcctggagtcaagacactggagatgctaatacaaatggaaaagactggggaaggagttggagtgaccgttcaatattttctggcattgggtctactgctgagccagtttctcagtctaccacttctgattatcagtgggatgttagccgtaatcaaccctatatcgatgatgaatggtctgggttaaatggtctgtcttctgctgatcccaactctgattggaatgcaccagcagaagagtggggcaattgggtagacgaagaaagagcttcacttctaaagtcccaggaaccaattcctgatgatcaaaaggtctcagatgatgataaagaaaagggagagggagctcttccaactgggaaatccnnnnnnnnnnnnnnnnnnnngaagaagcaaggtgaagataactctactgcacaggacacagaagaattagaaaaagagattagagaagaccttccagtgaatacctctaaaacccgtccaaaacaggaaaaagctttttccttgaagaccataagcactagtgatccagccgaagtactcgtcaaaaatagccagcctatcaagactcttccacctgctacttctaccgagccatctgtaatcttatcaaaaagtgattctgacaagagctcttcccaagtgccgccaatactacaagagacagataaatccaagtcaaataccaagcaaaatagtgtgcctccttcacagaccaagtctgaaactagctgggtatctcccaaacaaataaaaaagagaaaaaagccagacgagaaacgtgaaatttttttt

SEQ ID NO: 192645 - DNA, 1452 bp, Homo Sapiens; identical to SEQ ID NO: 185150

SEQ ID NO: 192646 - DNA, 1567 bp, Homo Sapiens; identical to SEQ ID NO: 185151
  misc_feature (66)..(108): n is a, c, g, or t
  misc_feature (826)..(845): n is a, c, g, or t

SEQ ID NO: 192647 - DNA, 997 bp, Homo Sapiens; identical to SEQ ID NO: 185153

SEQ ID NO: 192648 - DNA, 1680 bp, Homo Sapiens; identical to SEQ ID NO: 185154

SEQ ID NO: 192649 - DNA, 2300 bp, Homo Sapiens; identical to SEQ ID NO: 185155

SEQ ID NO: 192650 - DNA, 1416 bp, Homo Sapiens; identical to SEQ ID NO: 185156

SEQ ID NO: 192651 - DNA, 945 bp, Homo Sapiens; identical to SEQ ID NO: 185157

SEQ ID NO: 192652 - DNA, 547 bp, Homo Sapiens; identical to SEQ ID NO: 185160
  misc_feature (223)..(251): n is a, c, g, or t

SEQ ID NO: 192653 - DNA, 813 bp, Homo Sapiens
  misc_feature (45)..(54): n is a, c, g, or t
ccaactttgtacaaaaaagttggctgaatgtaaacgttgttgtgnnnnnnnnnnaaatagtagtttgtagtattttaaagaaagaacagatcgagttctaattatgatctagcttgattttgtgttgatccaaatttgcatagctgtttaatgttaagtcatgacaatttatttttcttggcatgctatgtaaacttgaatttcctatgtatttttattgtggtgttttaaatatggggaggggtattgagcattttttagggagaaaaataaatatatgctgtagtggccacaaataggcctatgatttagctggcaggccaggttttctcaagagcaaaatcaccctctggccccttggcaggtaaggcctcccggtcagcattatcctgccagacctcggggaggatacctgggagacagaagcctctgcacctactgtgcagaactctccacttccccaaccctccccaggtgggcagggcggagggagcctcagcctccttagactgacccctcaggcccctaggctggggggttgtaaataacagcagtcaggttgtttaccagccctttgcacctccccaggcagagggagcctctgttctggtgggggccacctccctcagaggctctgctagccacactccgtggcccaccctttgttaccagttcttcctccttcctcttttcccctgcctttctcattccttccttcgtctccctttttgttcctttgcctcttgcctgtcccctaaaacttgactgagtggtaacttctgtgttattttactcttaaaaccaaactctacc

SEQ ID NO: 192654 - DNA, 1092 bp, Homo Sapiens
  misc_feature (931)..(940): n is a, c, g, or t
ttgggtgaaggcaaagaagaatgctgctccattcagaagtgaagtctgctttgggaaagagggcctttggaaacttcttggaggttttcaggaaacttgcagcaaagccattcgggttggagtaattggagcatgcaagttgtccccttggacaaacagatcacaatcatagatagtccgagcttcatcgtatctccacttaattcctcctctgcgcttgctctgcgaagtccagcaagtattgaagtagtaaaaccgatggaggctgccagtgccatcctttcccaggctgatgctcgacaggtagtactgaaatatactgtcccaggctacaggaattctctggaattttttactgtgcttgctcagagaagaggtatgcaccaaaaaggtggaatcccaaatgttgaaggtgctgccaaactgctgtggtctgagtggacaggtgcctcattagcttactattgccatccccctacatcttggactcctcctccatattttaatgagagtattgtggtagacatgaaaagcggcttcaatctggaagaactggaaaagaacaatgcacagagcataagagccatcaagggccctcatttggccaatagcatccttttccagtcttccggtctgacaaatggaataatagaagaaaaggacatacatgaagaattgccaaaacggaaagaaaggaagcaggaggagagggaggatgacaaagacagtgaccaggaaactgttgatgaagaagttgatgaaaacagctcaggcatgtttgctgcagaagagacaggggaggcactgtctgaggagactacagcaggtgaacagtctacaaggtcttttatcttggataaaatcattgaagaggatgatgcttatgacttcagtacagattatgtgtaacagaacaatggctttttatgannnnnnnnnncacattttaagcagactgctaaactgttctctgtataagttatggtatgcatgagctgtgtaaattttgtgaatatgtattatattaaaaccaggcaacttggaaatctcctaaattctgtaaaaagacaattcatctcattgtgagtggaa

SEQ ID NO: 192655 - DNA, 1106 bp, Homo Sapiens
tgagccaccgtgcctggccgcaaatgtcttatttctaattgctatcagatctggtaccaaaggagaatttggagagctggctaaattatttgaagaaagaattgccaacagtggtgttcagagcctcaacaaaaccaaaggataaagggaagataaccaagcgtgtgaaggcaaagaagaatgctgctccattcagaagtgaagtctgctttgggaaagagggcctttggaaacttcttggaggttttcaggaaacttgcagcaaagccattcgggttggagtaattggtttcccaaatgtggggaaaagcagcattatcaatagcttaaaacaagaacagatgtgtaatgttggtgtatccatggggcttacaaggagcatgcaagttgtccccttggacaaacagatcacaatcatagatagtccgagcttcatcgtatctccacttaattcctcctctgcgcttgctctgcgaagtccagcaagtattgaagtagtaaaaccgatggaggctgccagtgccatcctttcccaggctgatgctcgacaggtagtactgaaatatactgtcccaggctacaggaattctctggaattttttactgtgcttgctcagagaagaggtatgcaccaaaaaggtggaatcccaaatgttgaaggtgctgccaaactgctgtggtctgagtggacaggtgcctcattagcttactattgccatccccctacatcttggactcctcctccatattttaatgagagtattgtggtagacatgaaaagcggcttcaatctggaagaactggaaaagaacaatgcacagagcataagagccatcaagggccctcatttggccaatagcatccttttccagtcttccggtctgacaaatggaataatagaagaaaaggacatacatgaggaattgccaaacggaaagaaaggaagcacgaggagagggaggatgacaaagacagtgaccaggaaactgttgatgaagaagttgatgaaaacagctcagcatgtttgctgcagaagagacagggaggcactgtctgagagactacagcaggtgaacagtctacagtcttttatcttggataaaatc

SEQ ID NO: 192656 - DNA, 567 bp, Homo Sapiens
actttgtacaaaaaagttggctctgctcagcctggtgaaccacacaggccagcgctctgacatgcagaaggtgaccctgggcctgcttgtgttcctggcaggctttcctgtcctggacgccaatgacctagaagataaaaacagtcctttctactatgactggcacagcctccaggttggcgggctcatctgcgctggggttctgtgcgccatgggcatcatcatcgtcatgagtgagtggaggagctcgggggagcaggcgggccggggctggggctcccctcccctgaccactcagctctccccaacaggtgcaaaatgcaaatgcaagtttggccagaagtccggtcaccatccaggggagactccacctctcatcaccccaggctcagcccaaagctgatgaggacagaccagctgaaattgggtggaggaccgttctctgtccccaggtcctgtctctgcacagaaacttgaactccaggatggaattcttcctcctctgctgggactcctttgcatggcagggcctcatctcacctctcgcaagagggtctctttgttcaa

SEQ ID NO: 192657 - DNA, 494 bp, Homo Sapiens
ttgtacaaaaaagttggctctgctcagcccgcctgatgaaagaaccacacaggccagcgctctgacatgcagaaggtgaccctgggcctgcttgtgttcctggcaggctttcctgtcctggacgccaatgacctagaagataaaaacagtcctttctactatgactggcacagcctccaggttggcgggctcatctgcgctggggttctgtgcgccatgggcatcatcatcgtcatgagtgcaaaatgcaaatgcaagtttggccagaagtccggtcaccatccaggggagactccacctctcatcaccccaggctcagcccaaagctgatgaggacagaccatctgaaattgggtggaggaccgttctctgtccccaggtcctgtctctgcacagaaacttgaactccatgatggaattcttcctcctctgctgggactcctttgcatggcagggcctcatctcacctctcgcaagagggtctctttgttcaa

SEQ ID NO: 192658 - DNA, 981 bp, Homo Sapiens; identical to SEQ ID NO: 185162
  misc_feature (380)..(389): n is a, c, g, or t
  misc_feature (547)..(610): n is a, c, g, or t

SEQ ID NO: 192659 - DNA, 797 bp, Homo Sapiens
  misc_feature (657)..(685): n is a, c, g, or t
ttggcttgaaagcagagaccattgtatgtgaattgccccattgtgccttggatgtgtttaataaatctttattgtcttggttcattttgatttattctgcctgcccactaatatttacattttcttttactcctctccaatctgccaggtaatcaaagagaagctaaggctgaagtctgcaacaggctctgaggtccggggaaagctagaaactaaatcggacctgaacatgcaacagcaggaagaggaggagaaagcccggctcctcattggtttaagtgtgggcgacaagaaccctggcaagaagtccatctttggcaggcgcaaatgatttggcgattcgagtggctgcagtacaggatctgactctggctcaggctccagggacttgtggggtgggaggggcttcccgttatccacgaggatttgtgggtgtcagagcccataggcatcactcttcagcacctggtctgttcgctgcagggcatggtggacagtaatgctgagttctgtctcacactgatcaggctcagggccagagaggcaacaagagagcaagacccagggaatgggcccagggcaggaccctattcccttggggtcaagtgaaagggtagggggatagtcctgatcaagtgtgataaatttttatagacnnnnnnnnnnnnnnnnnnnnnnnnnnnnnttctaagtgtaactgtccttccctctgtgccaggaaacgggaaggggctgatccttctgatcctcactccactgtcatgtttgaaagaggtattggtgttctggaatgaggg

SEQ ID NO: 192660 - DNA, 1848 bp, Homo Sapiens; identical to SEQ ID NO: 185167
  misc_feature (50)..(58): n is a, c, g, or t

SEQ ID NO: 192661 - DNA, 899 bp, Homo Sapiens
  misc_feature (204)..(267): n is a, c, g, or t
  misc_feature (301)..(309): n is a, c, g, or t
ttggccctctttgtgtgctttggaaagccgcggagctggtggtggctacagttggtgttgggggcttaggcgagggacgttaccgggaagttgcaggcgggaggactcttccccatccagtcacctgacaggtcacaaacatgtcagacaaaagtgaattaaaggctgagttggaacgtaagaagcagcgactggcccaaatcnnnnnnnnnnnnnnnnnnnnnnnnnnnnnnnnnnnnnnnnnnnnnnnnnnnnnnnnnnnnnnnnctgttgctcctgtgcaagaagaatcagatcttgnnnnnnnnnggagagaagctgaagcattgcttcaaagcatggggctaactccagaatcccccattgtccctcctcctatgtctccatcctccaaatctgtgagcactccaagtgaagctggaagccaagactctggagatggcgccgtgggatctagacgaggacctattaaacttggaatggctaaaatcacgcaagtcgactttcctcctcgagaaattgtcacgtatacaaaggaaactcagactccagttatggctcaacccaaagaagatgaagaggaagatgatgatgtagtggctcctaaaccacctattgaacctgaagaagagaaaactttaaagaaagatgaggaaaatgatagtaaagctccccctcatgagctgactgaagaagaaaagcaacaaatcttgcactctgaggaatttttaagtttctttgaccattctacaagaattgtagaaagagctctttctgagcagattaacatctttctttgactatagtgggagagatttggaagacaaagatgagagattcaagcaagtgctaaactgtcattaaatcgacaatttttgacgaacgttggtcaaagcatc

SEQ ID NO: 192662 - DNA, 1431 bp, Homo Sapiens; identical to SEQ ID NO: 185169
  misc_feature (1202)..(1220): n is a, c, g, or t

SEQ ID NO: 192663 - DNA, 2106 bp, Homo Sapiens; identical to SEQ ID NO: 185170
  misc_feature (366)..(383): n is a, c, g, or t
  misc_feature (1695)..(1713): n is a, c, g, or t

SEQ ID NO: 192664 - DNA, 942 bp, Homo Sapiens; identical to SEQ ID NO: 185171
  misc_feature (543)..(561): n is a, c, g, or t

SEQ ID NO: 192665 - DNA, 1238 bp, Homo Sapiens; identical to SEQ ID NO: 185172
  misc_feature (437)..(455): n is a, c, g, or t
  misc_feature (839)..(881): n is a, c, g, or t
  misc_feature (985)..(1022): n is a, c, g, or t

SEQ ID NO: 192666 - DNA, 1055 bp, Homo Sapiens; identical to SEQ ID NO: 185173
  misc_feature (225)..(262): n is a, c, g, or t
  misc_feature (366)..(398): n is a, c, g, or t
  misc_feature (792)..(810): n is a, c, g, or t

SEQ ID NO: 192667 - DNA, 1168 bp, Homo Sapiens; identical to SEQ ID NO: 185174
  misc_feature (228)..(265): n is a, c, g, or t
  misc_feature (369)..(401): n is a, c, g, or t
  misc_feature (795)..(813): n is a, c, g, or t

SEQ ID NO: 192668 - DNA, 1357 bp, Homo Sapiens; identical to SEQ ID NO: 185176

SEQ ID NO: 192669 - DNA, 994 bp, Homo Sapiens; identical to SEQ ID NO: 185177

SEQ ID NO: 192670 - DNA, 985 bp, Homo Sapiens; identical to SEQ ID NO: 180522
  misc_feature (768)..(792): n is a, c, g, or t

SEQ ID NO: 192671 - DNA, 924 bp, Homo Sapiens
cccacactgtctgtctcagttcttggctccagctgctgctgttcagggtggagtcactgttccaaggttgtaaagtacctgttttcttcggctcctggtccaatatggcacagtctcaatagtggacacagcttcgatgggcccgccatcattgggaacagtcactgtagtttttgcaactatggattcattcccctggtctactgcagagccaatggaacgagttttctttacaggtccagggggaccatcaacaaactgtcggctagtagagcgcctcttttctctcttcttcagtttgaaagtcttcaccaaagaagagtcccaatccagtgattcatcagtcttgtcaaagctgatatctgataaaatggaaccagattcatcaatggttgatagtcttttgttcccagcattgctgctggatggttggcctctgttgagaaaagccagagctgatttttgctcctcgcttagttgaatgctgccagatgtgtcacacatgagcatctctcgaatcagctgaatctgtcgttccagcttttcgcagtcagcctcagctctctgtctccgtttgatctctacatccacctgattacgtgcatgcttcagcttaacatccagagcacttcgctcagtctctgctttcatcaaaagatccttgtatttccccagctcatggtcagtcctctgccactttttacggaaatcctcaaagtccttcgccaactggataaattggacttcatttccttcactgagaatctccacccggcgcacaagctgctcaaacagattccgcacattcagcatcatagtatccatctttcacacgaacactctgcttcctatcacaatccagcggcagacgcacctggtctggcacccccactactcacttcagtcagccccaacttttttgta

SEQ ID NO: 192672 - DNA, 1388 bp, Homo Sapiens; identical to SEQ ID NO: 185181

SEQ ID NO: 192673 - DNA, 930 bp, Homo Sapiens
actttgtacaaaaaagttggcaggaagacaacttctgcagggtcactccctggcttctggaggaaagagaaggagggcagtgctccagtggtacagaagtgagacataatggaatcaggcttcacctccaaggacacctatctaagccattttaaccctcgggattacctagaaaaatattacaagtttggttctaggcactctgcagaaagccagattcttaagcaccttctgaaaaatcttttcaagatattctgcctagacggtgtgaagggagacctgctgattgacatcggctctggccccactatctatcagctcctctctgcttgtgaatcctttaaggagatcgtcgtcactgactactcagaccagaacctgcaggagctggagaagtggctgaagaaagagccagaggcctttgactggtccccagtggtgacctatgtgtgtgatcttgaagggaacagagtcaagggtccagagaaggaggagaagttgagacaggcggtcaagcaggtgctgaagtgtgatgtgactcagagccagccactgggggccgtccccttacccccggctgactgcgtgctcagcacactgtgtctggatgccgcctgcccagacctccccacctactgcagggcgctcaggaacctcggcagcctactgaagccagggggcttcctggtgatcatggatgcgctcaagagcagctactacatgattggtgagcagaagttctccagcctccccctgggccgggaggcagtagaaggctgctgtgaaagaggctggctacacaatcgaatggttttgaggtgatctcgcaaagttattcttccaccatggcccacaacgaaggacttttctccctggtggcgaggaagctgagcaaacccctgtgatgcctgtgacctcatttaagcaatt

SEQ ID NO: 192674 - DNA, 721 bp, Homo Sapiens
agcaatgcttttttatatttgccaactttgtacaaaaaagttggcagccagaacatttgtggtctatttctctgttagtgtttaaccaaccatctgttctaaaagaagggctgaactgatggaaggaatgctgttagcctgagactcaggaagacaacttctgcagggtcactccctggcttctggaggaaagagaaggagggcagtgctccagtggtacagaagtgagacataatggaatcaggcttcacctccaaggacacctatctaagccattttaaccctcgggattacctagaaaaatattacaagtttggttctaggcactctgcagaaagccagattcttaagcaccttctgaaaaatcttttcaagatattctgcctagacggtgtgaagggagacctgctgattgacatcggctctggccccactatctatcagctcctctctgcttgtgaatcctttaaggagatcgtcgtcactgactactcagaccagaacctgcaggagctggagaagtggctgaagaaagagccagaggcctttgactggtccccagtggtgacctatgtgtgtgatcttgaagggaacagagtcaagggtccagagaaggaggagaagttgagacaggcggtcaagcaggtgctgaaagtgtgatgtgactcagagccagccactgaggggccgtccccttaccccccggcttgactgcgtgctc

SEQ ID NO: 192675 - DNA, 856 bp, Homo Sapiens
  misc_feature (140)..(162): n is a, c, g, or t
  misc_feature (215)..(228): n is a, c, g, or t
ttggatagaggagaggaaaaggtgtaggcctgccttaccgagagccaaacagagcccagggagactccgctgtgggaaacctcattgttctgtacaaagtactagctaaaccagaaaggtgattccaggaggagttagcnnnnnnnnnnnnnnnnnnnnnnntgtgctgttcaagttttcagctttaagatatctttggataatgttatttctannnnnnnnnnnnnncattagaagttaccaaattaagatggtaagacctctgagaccaaaattttgtcccatctctaccccctcacaactgcttacagaatggatcatgtcccccttatgttgaggtgaccacttaattgctttcctgcctccttgaaagaaagaaagaaagaagactgtgtttttgccactgatttagccatgtgaaactcatctcattacccttttctgggtttgaagctgctgtctctagaagtgccatctcaattgtgctttgtatcagtcagtgctggagaaatcttgaatagcttatgtacaaaactttttaaattttatattattttgaaactttgctttgggtttgtggcaccctggccaccccatctggctgtgacagcctctgcagtccgtgggctggcagtttgttgatcttttaagtttccttccctacccagtccccattttctggtaaggtttctaggaggtctgttaggtgtacatcctgcagcttattggcttaaaatgtactctccttttatgtggtctctttggggccgattgggagaaagagaaatcaatagtgcaactgttttgatactgaatattgacaagtgtctttttgaaataaagaaccagtccctcc

SEQ ID NO: 192676 - DNA, 1584 bp, Homo Sapiens
  misc_feature (1360)..(1371): n is a, c, g, or t
  misc_feature (1424)..(1437): n is a, c, g, or t
gccaactttgtacaaaaaagttggagcagtagctgggtgggcaccatggctgggatcaccaccatcgaggcggtgaagcgcaagatccaggttctgcagcagcaggcagatgatgcagaggagcgagctgagcgcctccagcgagaagttgagggagaaaggcgggcccgggaacaggctgaggctgaggtggcctccttgaaccgtaggatccagctggttgaagaagagctggaccgtgctcaggagcgcctggccactgccctgcaaaagctggaagaagctgaaaaagctgctgatgagagtgagagaggtatgaaggttattgaaaaccgggccttaaaagatgaagaaaagatggaactccaggaaatccaactcaaagaagctaagcacattgcagaagaggcagataggaagtatgaagaggtggctcgtaagttggtgatcattgaaggagacttggaacgcacagaggaacgagctgagctggcagagtcccgttgccgagagatggatgagcagattagactgatggaccagaacctgaagtgtctgagtgctgctgaagaaaagtactctcaaaaagaagataaatatgaggaagaaatcaagattcttactgataaactcaaggaggcagagacccgtgctgagtttgctgagagatcggtagccaagctggaaaagacaattgatgacctggaagataaactgaaatgcaccaaagaggagcacctctgtacacaaaggatgctggaccagaccctgcttgacctgaatgagatgtagaacgccccagtcccaccctgctgctgctcctccctctgacccagactccgcctgaggccagcctgcgggaagctgacctttaactgagggctgatctttaactggaaggctgctttctcctttcaccaccccctccttccctgtgtctttttcgccaaactgtctctgcctcttcccggagaatccagctgggctagaggctgagcacctttggaaacaacatttaagggaatgtgagcacaatgcataatgtctttaaaaagcatgttgtgatgtacacattttgtaattaccttttttgttgttttgtagcaaccatttgtaaaacattccaaataattccacagtcctgaagcagcaatcgaatccctttctcacttttggaaggtgacttttcaccttaatgcatattcccctctccatagaggagaggaaaaggtgtaggcctgccttaccgagagccaaacagagcccagggagactccgctgtgggaaacctcattgttctgtacaaagtactagctaaaccagaaaggtgattccaggaggagttagccaaacaacaacnnnnnnnnnnnntgtgctgttcaagttttcagctttaagatatctttggataatgttatttctannnnnnnnnnnnnncattagaagttaccaaattaagatggtaagacctctgagaccaaatttgtcccatctctaccccctcacaactgcttacagaatggatcatgtccccttatgttgaagtgaccacttaattgctttcctgcctcttgaaagaaagaa

SEQ ID NO: 192677 - DNA, 1771 bp, Homo Sapiens; identical to SEQ ID NO: 180523
  misc_feature (532)..(547): n is a, c, g, or t
  misc_feature (1307)..(1355): n is a, c, g, or t
  misc_feature (1368)..(1381): n is a, c, g, or t

SEQ ID NO: 192678 - DNA, 762 bp, Homo Sapiens
  misc_feature (302)..(324): n is a, c, g, or t
  misc_feature (377)..(390): n is a, c, g, or t
ctttgtacaaaaaagttgggtacacattttgtaattaccttttttgttgttttgtagcaaccatttgtaaaacattccaaataattccacagtcctgaagcagcaatcgaatccctttctcacttttggaaggtgacttttcaccttaatgcatattcccctctccatagaggagaggaaaaggtgtaggcctgccttaccgagagccaaacagagcccagggagactccgctgtgggaaacctcattgttctgtacaaagtactagctaaaccagaaaggtgattccaggaggagttagcnnnnnnnnnnnnnnnnnnnnnnntgtgctgttcaagttttcagctttaagatatctttggataatgttatttctannnnnnnnnnnnnncattagaagttaccaaattaagatggtaagacctctgagaccaaaattttgtcccatctctaccccctcacaactgcttacagaatggatcatgtcccccttatgttgaggtgaccacttaattgctttcctgcctccttgaaagaaagaaagaaagaagactgtgtttttgccactgatttagccatgtgaaactcatctcattacccttttctgggtttgaagctgctgtctctagaagtgccatctcaattgtgctttgtatcagtcagtgctggagaaatcttgaatagcttatgtacaaaactttttaaattttatatattttgaaactttgctttgggtttgtggcaccctggccaccccatctgg

SEQ ID NO: 192679 - DNA, 975 bp, Homo Sapiens
ccgcgcctacggaaactcagccacctgtgacaaatttgagtgtctctgttgaaaacctctgcacagtaatatggacatggaatccacccgagggagccagctcaaattgtagtctatggtattttagtcattttggcgacaaacaagataagaaaatagctccggaaactcgtcgttcaatagaagtacccctgaatgagaggatttgtctgcaagtggggtcccagtgtagcaccaatgagagtgagaagcctagcattttggttgaaaaatgcatctcacccccagaaggtgatcctgagtctgctgtgactgagcttcaatgcatttggcacaacctgagctacatgaagtgttcttggctccctggaaggaataccagtcccgacactaactatactctctactattggcacagaagcctggaaaaaattcatcaatgtgaaaacatctttagagaaggccaatactttggttgttcctttgatctgaccaaagtgaaggattccagttttgaacaacacagtgtccaaataatggtcaaggataatgcaggaaaaattaaaccatccttcaatatagtgcctttaacttcccgtgtgaaacctgatcctccacatattaaaaacctctccttccacaatgatgacctatatgtgcaatgggagaatccacagaattttattagcagatgcctattttatgaagtagaagtcaataacagccaaactgagacacataatgttttctacgtccaagaggctaaatgtgagaatccagaatttgagagaaatgtggagaatacatcttgtttcatggtccctggtgttcttcctgatactttgaacacagtcagaataagagtcaaaacaaataagttatgctatgaggatgacaaactctggagtaattggagccaagaaatgagtataggtaagaagcgcaattccacactctacataaccatgttactca

SEQ ID NO: 192680 - DNA, 1608 bp, Homo Sapiens; identical to SEQ ID NO: 185184
  misc_feature (153)..(162): n is a, c, g, or t

SEQ ID NO: 192681 - DNA, 768 bp, Homo Sapiens
actttgtacaaaaaagttggcagtctcattcggcagccatagataagcctggaacttggctgtcattagtgacttgatcctggtatgaaatgcatactgggtataaggttgctcaggtattttatttccttggccacaactcccatagatgccaatgttttgatagcctcagtttctcaacgatgtcttttgtttacagtgctacacttagtgtgagtcaagaagtgcttgagttacaagaaacttcttattcaggtttgagtaagcattttacttccatgtgtacttttaaataatccataccttgaagaagttggccagtgatattattttcatgctgatctgattgttcttttcattccttgagtcaacttcagggtcttggatactaaagagaaggagaactgtggttaatgttttggatcatcatttgtgaacaaggccagactttgcccattttaggctatccaggacttaaggtagccatctggatcataagaaggtcctgcagttgagacaaaatgacccaagtgtattttccacaagttttgatcctgtgtaatatttctttttccttccctagtgtatgtagatacaaggcatggaatgcagttccactttctccccagagttgatctttttgtgattgctttcccgtctctagtagtattctgttgtgtctagagaactgattttttcctacatacgcaaattgtacatttgtaagtgaaaatgtcaatacattaaagcattaaccttaaagcatga

SEQ ID NO: 192682 - DNA, 1497 bp, Homo Sapiens; identical to SEQ ID NO: 180526

SEQ ID NO: 192683 - DNA, 2591 bp, Homo Sapiens; identical to SEQ ID NO: 185186

SEQ ID NO: 192684 - DNA, 2281 bp, Homo Sapiens; identical to SEQ ID NO: 185187

SEQ ID NO: 192685 - DNA, 2432 bp, Homo Sapiens; identical to SEQ ID NO: 180529
  misc_feature (109)..(126): n is a, c, g, or t
  misc_feature (339)..(349): n is a, c, g, or t
  misc_feature (398)..(406): n is a, c, g, or t
  misc_feature (1504)..(1512): n is a, c, g, or t
  misc_feature (2291)..(2303): n is a, c, g, or t

SEQ ID NO: 192686 - DNA, 1236 bp, Homo Sapiens; identical to SEQ ID NO: 180530

SEQ ID NO: 192687 - DNA, 1423 bp, Homo Sapiens
ttggataatagagaacttcaaaaactaccatccttaaaagatgttcctcctgctgatcaagagaagctttttatccagaagttacgtcagtgttgcgtcctctttgactttgtttctgatccactaagtgacctaaagtggaaggaagtaaaacgagctgctttaagtgaaatggtagaatatatcacccataatcggaatgtgatcacagagcctatttacccagaagtagtccatatgtttgcagttaacatgtttcgaacattaccaccttcctccaatcctacgggagcggaatttgacccggaggaagatgaaccaacgttagaagcagcctggcctcatctacagcttgtttatgaatttttcttaagatttttagagtctccagatttccaacctaatatagcgaagaaatatattgatcagaagtttgtattgcagcttttagagctctttgacagtgaagatcctcgggagagagattttcttaaaaccacccttcacagaatctatgggaaattcctaggcttgagagcttacatcagaaaacagataaataatatattttataggtttatttatgaaacagagcatcataatggcatagcagagttactggaaatattgggaagtataattaatggatttgccttaccactaaaagaagagcacaagattttcttattgaaggtgttactacctttgcacaaagtgaaatctctgagtgtctaccatccccagctggcatactgtgtagtgcagtttttagaaaaggacagcaccctcacggaaccagtggtgatggcacttctcaaatactggccaaagactcacagtccaaaagaagtaatgttcttaaacgaattagaagagattttagatgtcattgaaccatcagaatttgtgaagatcatggaacccctcttccggcagttggccaaatgtgtctccagcccacacttccaggtggcagagcgagctctctattactggaataatgaatacatcatgagtttaatcagtgacaacgcagcgaagattctgcccatcatgtttccttccttgtaccgcaactcaaagacccattggaacaagacaatacatggcttgatatacaacgccctgaagctcttcatggagatgaaccaaaagctatttgatgactgtacacaacagttcaaagcagagaaactaaaagagaagctaaaaatgaaagaacgggaagaagcatgggttaaaatagaaaatctagccaaagccaatccccaggtactaaaaaagagaataacatgaaaacgcccagggttacttgaatgtttttataagataggaatatatgtcttcaccatggggggggtctcgatttcactaacgttgtatatgaaaatgtctgcaataaaaaagtacttttaaactttgt

SEQ ID NO: 192688 - DNA, 1120 bp, Homo Sapiens
tttgtacaaaaaagttggcaaaatactgtcctcttgctcaaagctggctgccaaatgtttggtgatgaaggcagaaatgaatggctcaaaacttgggagaagagcaaaacctgaaggggccctccagaacaatgatgggctttatgatcctgactgcgatgagagcgggctctttaaggccaagcagtgcaacggcacctccacgtgctggtgtgtgaacactgctggggtcagaagaacagacaaggacactgaaataacctgctctgagcgagtgagaacctactggatcatcattgaactaaaacacaaagcaagagaaaaaccttatgatagtaaaagtttgcggactgcacttcagaaggagatcacaacgcgttatcaactggatccaaaatttatcacgagtattttgtatgagaataatgttatcactattgatctggttcaaaattcttctcaaaaaactcagaatgatgtggacatagctgatgtggcttattattttgaaaaagatgttaaaggtgaatccttgtttcattctaagaaaatggacctgacagtaaatggggaacaactggatctggatcctggtcaaactttaatttattatgttgatgaaaaagcacctgaattctcaatgcagggtctaaaagctggtgttattgctgttattgtggttgtggtgatagcagttgttgctggaattgttgtgctggttatttccagaaagaagagaatggcaaagtatgagaaggctgagataaaggagatgggtgagatgcatagggaactcatgcataactatataatttgaagattatagaagaagggaaatagcaaatggacacaaattacaaatgtgtgtgcgtgggacgaagacatctttgaaggtcatgagtttgttagtttaacatcatatatttgtaatagtgaaacctgtactcaaaatataagcagcttgaaactggctttaccaatcttgaaatttgaccacaagtgtcttatatatgcagatctaatgtaaaatccagaacttggactccatcgttaaaattatttatgtgtaacattcaaatgtgtgcattaaatatgcttccacagtaaaatctgaaaaact

SEQ ID NO: 192689 - DNA, 514 bp, Homo Sapiens
actttgtacaaaaaagttgggttgtgctggcctatttccagaaagaagagaatggcaaagtatgagaaggctgagataaaggagatgggtgagatgcatagggaactcaatgcataactatataatttgaagattatagaagaagggaaatagcaaatggacacaaattacaaatgtgtgtgcgtgggacgaagacatctttgaaggtcatgagtttgttagtttaacatcatatatttgtaatagtgaaacctgtactcaaaatataagcagcttgaaactggctttaccaatcttgaaatttgaccacaagtgtcttatatatgcagatctaatgtaaaatccagaacttggactccatcgttaaaattatttatgtgtaacattcaaatgtgtgcattaaatatgcttccacagtaaaatctgaaaaactgatttgtgattgaaagctgcctttctatttacttgagtcttgtacatacatacttttttatgagctatgaaataaaacatt

SEQ ID NO: 192690 - DNA, 1171 bp, Homo Sapiens; identical to SEQ ID NO: 180531

SEQ ID NO: 192691 - DNA, 916 bp, Homo Sapiens
ctttgtacaaaaaagttggcaaaatactgtcatttgctcaaagctggctgccaaatgtttggtgatgaaggcagaaatgaatggctcaaaacttgggagaagagcaaaacctgaaggggccctccagaacaatgatgggctttatgatcctgactgcgatgagagcgggctctttaaggccaagcagtgcaacggcacctccatgtgctggtgtgtgaacactgctggggtcagaagaacagacaaggacactgaaataacctgctctgagcgagtgagaacctactggatcatcattgaactaaaacacaaagcaagagaaaaaccttatgatagtaaaagtttgcggactgcacttcagaaggagatcacaacgcgttatcaactggatccaaaatttatcacgagtattttgtatgagaataatgttatcactattgatctggttcaaaattcttctcaaaaaactcagaatgatgtggacatagctgatgtggcttattattttgaaaaagatgttaaaggtgaatccttgtttcattctaagaaaatggacctgacagtaaatggggaacaactggatctggatcctggtcaaactttaatttattatgttgatgaaaaagcacctgaattctcaatgcagggtctaaaagctggtgttattgctgttattgtggttgtggtgatagcagttgttgctggaattgttgtgctggttatttccagaaagaagagaatggcaaagtatgagaaggctgagataaaggagatgggtgagatgcatagggaactcaatgcataactatataatttgaagattatagaaaaagggaaatagcaatggacaccaattacaaatgtgtgtgcgtgggacgaagacatcctttgaaggtcatgaagtttgttagtttaa

SEQ ID NO: 192692 - DNA, 1488 bp, Homo Sapiens; identical to SEQ ID NO: 185192

SEQ ID NO: 192693 - DNA, 1353 bp, Homo Sapiens; identical to SEQ ID NO: 180534

SEQ ID NO: 192694 - DNA, 1030 bp, Homo Sapiens
ccataaaagacaactttgtacaaaaaagttggctactttgacctgccaggagctcttctgtgtgccagggtggtggactatttaacaaaactgaacaatggtcaaaaaacatttgatttttggaaggatatagttgctgctatacaacacaattataaaatgtcagcttttaaggaaaactgtggaatatattttccagaaataaaaagagatccaggcagatatttacatagttgtcctgaatctgtgaaaaaatggcttcgacagctaaagaatgctgggaaaattcttctgttaattaccagttctcacagtgattactgtagacttctctgcgaatatattcttgggaatgattttacagacctttttgacattgtgattacaaatgcattgaagcctggtttcttctcccacttaccaagtcagagacctttccggacactcgagaatgatgaggagcaggaggcactgccatctctggataaacctggctggtactcccaagggaacgctgtccacctctatgaacttctgaagaaaatgactggcaaacctgaacccaagaatgatcacattgttgatgttggacattggtgcatttctaacagcagaaccctttcttctaagaaaatatttaccagaatttctgtgagctgagagatcgtggggtaacagagccctgctccattggctgtcaccatgccacagtctcctggggactcctgagggttaatggatggagcagtctgacttgcagatgctgattctcatatcccttaactctgttttcacatctggaaaattgagaggttgttaattttggtgacagcatgcattccgatattttcccagctcgtccactatagtaattggggagacagtccctcattctggaagaactccacaggggatgaaggccacaaggagtcagaggcctgaggagtcagagcctctagagagaaagggaaattattgaggaataaagcaaacctttaaatccttcatctaaaaaatggggctccttttt

SEQ ID NO: 192695 - DNA, 1274 bp, Homo Sapiens
actttgtacaaaaaagttgggtttggcagggatcttctggatgacctgaaatcagaactaactggaaaatttgaaaaattaattgtggctctgatgaaaccctctcggctttatgatgcttatgaactgaaacatgccttgaagggagctggaacaaatgaaaaagtactgacagaaattattgcttcaaggacacctgaagaactgagagccatcaaacaagtttatgaagaagaatatggctcaagcctggaagatgacgtggtgggggacacttcagggtactaccagcggatgttggtggttctccttcaggctaacagagaccctgatgctggaattgatgaagctcaagttgaacaagatgctcaggctttatttcaggctggagaacttaaatgggggacagatgaagaaaagtttatcaccatctttggaacacgaagtgtgtctcatttgagaaaggtgtttgacaagtacatgactatatcaggatttcaaattgaggaaaccattgaccgcgagacttctggcaatttagagcaactactccttgctgttgtgaaatctattcgaagtatacctgcctaccttgcagagaccctctattatgctatgaagggagctgggacagatgatcataccctcatcagagtcatggtttccaggagtgagattgatctgtttaacatcaggaaggagtttaggaagaattttgccacctctctttattccatgattaagggagatacatctggggactataagaaagctcttctgctgctctgtggagaagatgactaacgtgtcacggggaagagctccctgctgtgtgcctgcaccaccccactgccttccttcagcacctttagctgcatttgtatgccagtgcttaacacattgccttattcatactagcatgctcatgaccaacacatacacgtcatagaagaaaatagtggtgcttctttctgatctctagtggagatctctttgactgctgtagtactaaagtgtacttaatgttactaagtttaatgcctggccattttccatttatatatattttttaagaggctagagtgcttttagccttttttaaaaactccatttatattacatttgtaaccatgatactttaatcagaagcttagccttgaaattgtgaactcttggaaatgttattagtgaagttcgcaactaaactaaacctgtaaaattatgatgattgtattcaaaagattaatgaaaaataaacatttctgtccccctga

SEQ ID NO: 192696 - DNA, 1784 bp, Homo Sapiens; identical to SEQ ID NO: 180536
  misc_feature (1443)..(1457): n is a, c, g, or t

SEQ ID NO: 192697 - DNA, 910 bp, Homo Sapiens
ttggcttggatcagtctaggggcagctgccggatccttcagcgtctgcatctcggcgtcgccccgcgtaccgtcgcccggctctccgccgctctcccgggggttcggggcacttgggtcccacagtctggtcctgcttcaccttcccctgacctgagtagtcgccatggcacaggttctcagaggcactgtgactgacttccctggatttgatgagcgggctgatgcagaaactcttcggaaggctatgaaaggcttgggcacagatgaggagagcatcctgactctgttgacatcccgaagtaatgctcagcgccaggaaatctctgcagcttttaagactctgtttggcagggatcttctggatgacctgaaatcagaactaactggaaaatttgaaaaattaattgtggctctgatgaaaccctctcggctttatgatgcttatgaactgaaacatgccttgaagggagctggaacaaatgaaaaagtactgacagaaattattgcttcaaggacacctgaagaactgagagccatcaaacaagtttatgaagaagaatatggctcaagcctggaagatgacgtggtgggggacacttcagggtactaccagcggatgttggtggttctccttcaggctaacagagaccctgatgctggaattgatgaagctcaagttgaacaagatgctcaggctttatttcaggctggagaacttaaatgggggacagatgaagaaaagtttatcaccatctttggaacacgaagtgtgtctcatttgagaaaggtgtttgacaagtacatgactatatcaagatttcaaattgaggaaaccattgaccgcgagacttctggcaatttagagcaactactccttgctgttgtgaaatctattcgaagtatacctg

SEQ ID NO: 192698 - DNA, 555 bp, Homo Sapiens
ctttgtacaaaaaagttggctctctttattccattgattaagggagatacatctggggactataagaaagctcttctgctgctctgtggagaagatgactaacgtgtcacggggaagagctccctgctgtgtgcctgcaccaccccactgccttccttcagcacctttagctgcatttgtatgccagtgcttaacacattgccttattcatactagcatgctcatgaccaacacatacacgtcatagaagaaaatagtggtgcttctttctgatctctagtggagatctctttgactgctgtagtactaaagtgtacttaatgttactaagtttaatgcctggccattttccatttatatatattttttaacacgctagagtgcttttagccttttttaaaaactccatttatattacatttgtaaccatgatactttaatcagaagcttagccttgaaattgtgaactcttggaaatgttattagtgaagttcgcaactaaactaaacctgtaaaattatgatgattgtattcaaaagattaatgaaaaataaa

SEQ ID NO: 192699 - DNA, 1074 bp, Homo Sapiens; identical to SEQ ID NO: 180538

SEQ ID NO: 192700 - DNA, 731 bp, Homo Sapiens
gcgatgctactgtttaattgcaggaggtgggggtgtgtgtaccatgtaccagggctattagaagcaagaaggaaggagggagggcagagcgccctgctgagcaacaaaggactcctgcagccttctctgtctgtctcttggcgcaggcacatggggaggcctcccgcagggtgggggccaccagtccaggggtgggagcactacagggggtgggagtgggtggtggctggtgcgaatggcctggcacagatccctaggattcttgacacctggatttcaccagggaccttctgttctcccagggaacttcgtagatctcgaaagagcacaactgtttcttctgcagttctggctgttcatggaaggcacaggtgtccaagttgggctgggacttggtacatatggttcggcccacctctacgtcgaagaagtaattcacccccccaacggtctgttgcctggctcttagtacccgcagcggacgtctgtagtagtcatctttggtggccttgttatactcgctgatggcgaagtgaagggcacgctgtacccactcatcattgaggtctgcgttatagatgccacccgggattatcctatcctcctccttggggctccaggccagggccacagctagggtggccagcaggagcagcagggtactcagatgctgggccatggtctcctcagaggcagagcacaaagctggagctgcaggagagccaagccaa

SEQ ID NO: 192701 - DNA, 515 bp, Homo Sapiens
tttgtacaaaaaagttggcctcggtatcccattcgaagtcctctctatctagctccagcctctcgcctgcgccccactccccgcgtcccgcgtcctagccgaccatggccgggcccctgcgcgccccgctgctcctgctggccatcctggccgtggccctggccgtgagccccgcggccggctccagtcccggcaagccgccgcgcctggtgggaggccccatggacgccagcgtggaggaggagggtgtgcggcgtgcactggactttgccgtcggcgagtacaacaaagccagcaacgacatgtaccacagccgcgcgctgcaagaggtgtttttcccgcaagcagatcgtaactggggtgaactacttcttggacgtggagctgggccgaaccacgtgtaccaagacccagcccaacttggacaactgccccttccatgaccagccacatctgaaaaggaaagcattctgctctttccagatctacgctgtgccttggcagggcacaatgac

SEQ ID NO: 192702 - DNA, 927 bp, Homo Sapiens
ttgtacaaaaaagttggatgaatttcaggcagacagaaaccagacagagggtcaagtttacagatgaccgtgtctgcaagagtcaccttctggactgctgcccccatgacatcctggctgggacgcgcatggatttaggagaatgtaccaaaatccacgacttggccctccgagcagattatgagattgcaagtaaagaaagagacctgttttttgaattagatgcaatggatcacttggagtcctttattgctgaatgtgatcggagaactgagctcgccaagaagcggctggcagaaacacaggaggaaatcagtgcggaagtttctgcaaaggcagaaaaagtacatgagttaaatgaagaaataggaaaactccttgctaaagccgaacagctaggggctgaaggtaatgtggatgaatcccagaagattcttatggaagtggaaaaagttcgtgcgaagaaaaaagaagctgaggaagaatacagaaattccatgcctgcatccagttttcagcagcaaaagctgcgtgtctgcgaggtctgttcagcctaccttggtctccatgacaatgaccgtcgcctggcagaccacttcggtggcaagttacacttggggttcattcagatccgagagaagcttgatcagttgaggaaaactgtcgctgaaaagcaggagaagagaaatcaggatcgcttgaggaggagagaggagagggaacgggaggagcgtctgagcagaggtcgggatcaagaaccagagatcgcaagaggtcacgctcccgggatcggcgtcggaggcggtcaagatctacctcccgagagcgacggaaattgtcccgggtccctggtcccgagatagacatcggcgccaccgcagccgttcccggagccacagcccggggacatcgtcgggcttcccggga

SEQ ID NO: 192703 - DNA, 1422 bp, Homo Sapiens; identical to SEQ ID NO: 180540
  misc_feature (191)..(205): n is a, c, g, or t

SEQ ID NO: 192704 - DNA, 1055 bp, Homo Sapiens
  misc_feature (764)..(817): n is a, c, g, or t
ttggcagcggttattccgaactatataaagttcagaaaacatgtctcgaagatatgactccaggaccactatattttctccagaaggtcgcttataccaagttgaatatgccatggaagctattggacatgcaggcacctgtttgggaattttagcaaatgatggtgttttgcttgcagcagagagacgcaacatccacaagcttcttgatgaagtctttttttctgaaaaaatttataaactcaatgaggacatggcttgcagtgtggcaggcataacttctgatgctaatgttctgactaatgaactaaggctcattgctcaaaggtatttattacagtatcaggagccaataccttgtgagcagttggttacagcgctgtgtgatatcaaacaagcttatacacaatttggaggaaaacgtccctttggtgtttcattgctgtacattggctgggataagcactatggctttcagctctatcagagtgaccctagtggaaattacgggggatggaaggccacatgcattggaaataatagcgctgcagctgtgtcaatgttgaaacaagactataaagaaggagaaatgaccttgaagtcagcacttgctttagctatcaaagtactaaataagaccatggatgttagtaaactctctgctgaaaaagtggaaattgcaacactaacaagagagaatggaaagacagtaatcagagttctcaaacaaaaagaagtggagcagttgatcaaaaaacacgagnnnnnnnnnnnnnnnnnnnnnnnnnnnnnnnnnnnnnnnnnnnnnnnnnnnnnngataaatagaatcagagattttattactcatttggggcaccatttcagtgtaaaagcagtcctactcttccacactaggaaggctttactttttttaactggtgcagtgggaaaataggacattacatactgaattgggtccttgtcatttctgtccaattgaatactttattgtaacgaatgatggttaccccttcatgggacgtctttaatcttccacacacatccccctcttttt

SEQ ID NO: 192705 - DNA, 774 bp, Homo Sapiens
  misc_feature (200)..(233): n is a, c, g, or t
ttggcatgtggtggacattgtggctttaaagaccatgaagatgagggggcaggcctttgtcatatttaaggaactgggctcatccacaaatgccttgagacagctacaaggatttccattttatggtaaaccaatgcgaatacagtatgcaaaaacagattcggatataatatcaaaaatgcgtggaacttttgctgacnnnnnnnnnnnnnnnnnnnnnnnnnnnnnnnnnnctgtggaacagactgcaacaaccacaaacaaaaagcctggccagggaactccaaattcagctaatacccaaggaaattcaacaccaaatcctcaggtccctgattaccctccaaactatattttattccttaataacttaccagaagagactaatgagatgatgttatccatgctgtttaatcagttccctggcttcaaggaagtacgtctggtaccagggaggcatgacattgcttttgttgaatttgaaaatgatgggcaggctggagctgccagggatgctttacagggatttaagatcacaccgtcccatgctatgaagatcacctatgccaagaaataacatttgggatagtcgtctttaaaagacttggtgttatttacagtgtttgttttgataacatttggctgggtcattttaatagttacagatgaggaggagtaaaagtgaaatttttgtgaggacttaattatcccatgtttctttaacccttggtgaactatgaaatacgaaggccctaattttgtacataaactttt

SEQ ID NO: 192706 - DNA, 2665 bp, Homo Sapiens; identical to SEQ ID NO: 180542
  misc_feature (251)..(259): n is a, c, g, or t

SEQ ID NO: 192707 - DNA, 885 bp, Homo Sapiens
actttgtacaaaaaagttggcgagaatactgcccagttactctagcgcgccaggccgaaccgcagcttcttggcttaggtacttctactcacagcggccgattccgaggccaactccagcaatggcttttgcaaatctgcggaaagtgctcatcagtgacagcctggacccttgctgccggaagatcttgcaagatggagggctgcaggtggtggaaaagcagaaccttagcaaagaggagctgatagcggagctgcaggactgtgaaggccttattgttcgctctgccaccaaggtgaccgctgatgtcatcaacgcagctgagaaactccaggtggtgggcagggctggcacaggtgtggacaatgtggatctggaggccgcaacaaggaagggcatcttggttatgaacacccccaatgggaacagcctcagtgccgcagaactcacttgtggaatgatcatgtgcctggccaggcagattccccaggcgacggcttcgatgaaggacggcaaatgggagcggaagaagttcatgggaacagagctgaatggaaagaccctgggaattcttggcctgggcaggattgggagagaggtagctacccggatgcagtcctttgggatgaagactatagggtatgaccccatcatttccccagaggtctcggcctcctttggtgttcagcagctgcccctggaggagatctggcctctctgtgatttcatcactgtgcacactcctctcctgccctccacgacaggcttgctgaatgacaacacctttgcccagtgcaagaaaggggtgcgtgtggtgaactgtgcccgtggagggatcgtggacgaaagcgccctgctccgggtccctgcagtctggccagtgtg

SEQ ID NO: 192708 - DNA, 2288 bp, Homo Sapiens; identical to SEQ ID NO: 185197
  misc_feature (2082)..(2090): n is a, c, g, or t

SEQ ID NO: 192709 - DNA, 1387 bp, Homo Sapiens; identical to SEQ ID NO: 185198
  misc_feature (1202)..(1210): n is a, c, g, or t

SEQ ID NO: 192710 - DNA, 2240 bp, Homo Sapiens; identical to SEQ ID NO: 185199
  misc_feature (448)..(457): n is a, c, g, or t
  misc_feature (478)..(728): n is a, c, g, or t
  misc_feature (943)..(951): n is a, c, g, or t

SEQ ID NO: 192711 - DNA, 884 bp, Homo Sapiens; identical to SEQ ID NO: 185201
  misc_feature (408)..(416): n is a, c, g, or t

SEQ ID NO: 192712 - DNA, 785 bp, Homo Sapiens
gccaactttgtacaaaaaagttggcgcagatccagcgcccagagagacaccagagaacccaccatggccccctttgagcccctggcttctggcatcctgttgttgctgtggctgatagcccccagcagggcctgcacctgtgtcccaccccacccacagacggccttctgcaattccgacctcgtcatcagggccaagttcgtggggacaccagaagtcaaccagaccaccttataccagcgttatgagatcaagatgaccaagatgtataaagggttccaagccttaggggatgccgctgacatccggttcgtctacacccccgccatggagagtgtctgcggatacttccacaggtcccacaaccgcagcgaggagtttctcattgctggaaaactgcaggatggactcttgcacatcactacctgcagttttgtggctccctggaacagcctgagcttagctcagcgccggggcttcaccaagacctacactgttggctgtgaggaatgcacagtgtttccctgtttatccatcccctgcaaactgcagagtggcactcattgcttgtggacggaccagctcctccaaggctctgaaaagggcttccagtcccgtcaccttgcctgcctgcctcgggagccagggctgtgcacctggcagtccctgcggtcccagatagcctgaatcctgcccggagtggaagctgaagcctgcacagtgtccaccctgttcccactcccatctttcttccggacaatgaaataaagagttaccacccagcc

SEQ ID NO: 192713 - DNA, 1399 bp, Homo Sapiens; identical to SEQ ID NO: 185202

SEQ ID NO: 192714 - DNA, 1276 bp, Homo Sapiens
ttgggaataatcttaagagttggcattaatctttcaccaactatagaatgtattttatatatcgttcattgtaaaaagcccttaaaaatatgtgtatactactttggctcttgtgcataaaaacaagaacactgaaaattgggaatatgcacaaacttggcttctttaaccaagaatattattggaaaattctctaaaagttaatagggtaaattctctattttttgtaatgtgttcggtgatttcagaaagctagaaagtgtatgtgtggcatttgttttcactttttaaaacatccctaactgatcgaatatatcagtaatttcagaatcagatgcatcctttcataagaagtgagaggactctgacagccataacaggagtgccacttcatggtgcgaagtgaacactgtagtcttgttgttttcccaaagagaactccgtatgttctcttaggttgagtaacccactctgaattctggttacatgtgtttttctctccctccttaaataaagagaggggttaaacatgccctctaaaagtaggtggttttgaagagaataaattcatcagataacctcaagtcacatgagaatcttagtccatttacattgccttggctagtaaaagccatctatgtatatgtcttacctcatctcctaaaaggcagagtacaaagtaagccatgtatctcaggaaggtaacttcattttgtctatttgctgttgattgtaccaagggatggaagaagtaaatatagctcaggtagcactttatactcaggcagatctcagccctctactgagtcccttagccaagcagtttctttcaaagaagccagcaggcgaaaagcagggactgccactgcatttcatatcacactgttaaaagttgtgttttgaaattttatgtttagttgcacaaattgggccaaagaaacattgccttgaggaagatatgattggaaaatcaagagtgtagaagaataaatactgttttactgtccaaagacatgtttatagtgctctgtaaatgttcctttcctttgtagtctctggcaagatgctttaggaagataaaagtttgaggagaacaaacaggaattctgaattaagcacagagttgaagtttatacccgtttcacatgcttttcaagaatgtcgcaattactaagaagcagataatggtgttttttagaaacctaattgaagtatattcaaccaatactttaatgtataaaataaatattatacaatatacttgtatagcagtttc

SEQ ID NO: 192715 - DNA, 1556 bp, Homo Sapiens; identical to SEQ ID NO: 180543
  misc_feature (422)..(682): n is a, c, g, or t

SEQ ID NO: 192716 - DNA, 1276 bp, Homo Sapiens; identical to SEQ ID NO: 185203

SEQ ID NO: 192717 - DNA, 598 bp, Homo Sapiens
tttgtacaaaaaagttggagaagaataaatactgttttactgtccaaagacatgtttatagtgctctgtaaatgttcctttcctttgtagtctctggcaagatgctttaggaagataaaagtttgaggagaacaaacaggaattctgaattaagcacagagttgaagtttatacccgtttcacatgcttttcaagaatgtcgcaattactaagaagcagataatggtgttttttagaaacctaattgaagtatattcaaccaaatactttaatgtataaaataaatattatacaatatacttgtatagcagtttctgcttcacatttgattttttcaaatttaatatttatattagagatctatatatgtataaatatgtattttgtcaaatttgttacttaaatatatagagaccagttttctctggaagtttgtttaaatgacagaagcgtatatgaattcaagaaaatttaagctgcaaaaatgtatttgctataaaatgagaagtctcactgatagaggttctttattgctcattttttaaaaaatggactcttgaaatctgttaaaataaaattgtacatttggagatgtttc

SEQ ID NO: 192718 - DNA, 1042 bp, Homo Sapiens; identical to SEQ ID NO: 185204

SEQ ID NO: 192719 - DNA, 1166 bp, Homo Sapiens
ttggatctttgaacaacaaagattaatgccaactcttaagattattctttcaccaactatagaatgtattttatatatcgttcattgtaaaaagcccttaaaaatatgtgtatactactttggctcttgtgcataaaaacaagaacactgaaaattgggaatatgcacaaacttggcttctttaaccaagaatattattggaaaattctctaaaagttaatagggtaaattctctattttttgtaatgtgttcggtgatttcagaaagctagaaagtgtatgtgtggcatttgttttcactttttaaaacatccctaactgatcgaatatatcagtaatttcagaatcagatgcatcctttcataagaagtgagaggactctgacagccataacaggagtgccacttcatggtgcgaagtgaacactgtagtcttgttgttttcccaaagagaactccgtatgttctcttaggttgagtaacccactctgaattctggttacatgtgtttttctctccctccttaaataaagagaggggttaaacatgccctctaaaagtaggtggttttgaagagaataaattcatcagataacctcaagtcacatgagaatcttagtccatttacattgccttggctagtaaaagccatctatgtatatgtcttacctcatctcctaaaaggcagagtacaaagtaagccatgtatctcaggaaggtaacttcattttgtctatttgctgttgattgtaccaagggatggaagaagtaaatatagctcaggtagcactttatactcaggcagatctcagccctctactgagtcccttagccaagcagtttctttcaaagaagccagcaggcgaaaagcagggactgccactgcatttcatatcacactgttaaaagttgtgttttgaaattttatgtttagttgcacaaattgggccaaagaaacattgccttgaggaagatatgattggaaaatcaagagtgtagaagaataaatactgttttactgtccaaagacatgtttatagtgctctgtaaatgttcctttcctttgtagtctctggcaagatgctttaggaagataaaagtttgaggagaacaaacaggaattctgaattaagcacagagttgaagtttatacccgttttcacatgc

SEQ ID NO: 192720 - DNA, 709 bp, Homo Sapiens; identical to SEQ ID NO: 185205

SEQ ID NO: 192721 - DNA, 1048 bp, Homo Sapiens
actttgtacaaaaaagttggattctaagatgtcgttaattgcaaagtttgtaaagtgtgtagttttcatttgataaacttaaaaaatcaatatcaaaattaaagtcataattttatattgataaggccctggtgaatttataaaatcaaacttatttttctaggtcctaggcctacttacaagcctccagtctcaaattatccaggatatcctaaacctgaggaaggaatacttgacagtttggatgtttgggtcattgctgtgattgttattgccatagttgttggagttgcagtaatttgtgttgtcccgtacagatatcttcaaaggaggaagaagaaaggcacatacctaactgatgagacccacagagaagtaaaatttacttctctctgagaaggagagatgagagaaaggtttgcttttatcattaaaaggaaagcagatggtggagctgaatatgccacttaccagactaaatcaaccactccagcagagcagagaggctgaatagattccacaacctggtttgccagttcatcttttgactctattaaaatcttcaatagttgttattctgtagtttcactctcatgagtgcaactgtggcttagctaatattgcaatgtggcttgaatgtaggtagcatcctttgatgcttctttgaaacttgtatgaatttgggtatgaacagattgcctgctttcccttaaataacacttagatttattggaccagtcagcacagcatgcctggttgtattaaagcagggatatgctgtattttataaaattggcaaaattagagaaatatagttcacaatgaaattatattttctttgtaaagaaagtggcttgaaatcttttttgttcaaagattaatgccaactcttaaaattattctttcaccaactatagaatgtattttatatatcgttcattgtaaaaagcccttaaaaatatgtgtatactactttggctctttgtgcataaaaacaagaacactgaaaattgggaatatgcacaaactttgcttctttaacccagaa

SEQ ID NO: 192722 - DNA, 897 bp, Homo Sapiens
caatgcttttcttttaatgccaactttgtacaaaaaagctcgccccacacgacccgtgacactctgtggaccgcgagcacggagcagggtttctacagctgctccccactttctcggacccggtcctggacccagcccccgactccgacacggctccaccatggaggaggcggaccgaatcctcatccattcgctgcgccaggccggcacggcagttcctccagatgtgcagaccttgcgcgccttcaccactgagctggttgtagaggctgtggtccgctgcctgcgtgtgatcaaccctgcggtgggctctggcctcagccctctgctgcctcttgccatgtctgcccggttccgcctggccatgagcctggctcaggcctgcatggacctgggctatcccttggagcttggctatcagaacttcctctaccccagtgagcctgacctccgagacctgcttctcttcttggctgagcgtctgcccaccgatgcctctgaggatgcagaccagcctgcaggtgactcagctattctcctccgggccattgggagccaaattcgggaccagctggcactgccttgggtcccgccccaccttcgcactcccaagctgcagcacctccagggctcggccctccagaagcctttccatgccagcaggctggtcgtgccagaattgagttccagagtgagccacgggagttccaggcgagtcccctgctgcttccagtccctacccaggtgcctcagcctgttggaagggtggcctcgctcctcgaacaccatgccctgcagctctgccagcagacgggccgggaccggccaggggatgaggactgggtccaccggacatcccgcctcccaccccaggagacacacgggctcagcggcagc

SEQ ID NO: 192723 - DNA, 1423 bp, Homo Sapiens; identical to SEQ ID NO: 185209
  misc_feature (1291)..(1325): n is a, c, g, or t

SEQ ID NO: 192724 - DNA, 2425 bp, Homo Sapiens; identical to SEQ ID NO: 185210
  misc_feature (87)..(121): n is a, c, g, or t
  misc_feature (2213)..(2273): n is a, c, g, or t

SEQ ID NO: 192725 - DNA, 801 bp, Homo Sapiens
  misc_feature (280)..(334): n is a, c, g, or t
  misc_feature (697)..(723): n is a, c, g, or t
ttggcaagaatatcctatgtgatcagctttcaaagcatttacaagtgctgcaagttagtgaaacagctgtctccgtaaatggaggaaatgtggggaagccttggaatgcccttctggttctggcacattggaaagcacactcagaaggcttcatcaccaagattttgggagagtaaagctaagtatagttgatgtaacattgtagaagcagcataggaacaataagaacaataggtaaagctataattatggcttatatttagaaatgactgcatttgannnnnnnnnnnnnnnnnnnnnnnnnnnnnnnnnnnnnnnnnnnnnnnnnnnnnnngacattttatgatagatttgctctctagaaggaaacgtctttatttaggagggcaaaaattttggtcatagcattcacttttgctattccaatctacaactggaagatacataaaagtgctttgcattgaatttgggataacttcaaaaatcccatggttgttgttagggatagtactaagcatttcagttccaggagaataaaagaaattcctatttgaaatgaattcctcatttggaggaaaaaaagcatgcattctagcacaacaagatgaaattatggaatacaaaagtggctccttcccatgtgcagtccctgtccccccccgccagtcctccacacccaaactgtttctgattggcnnnnnnnnnnnnnnnnnnnnnnnnnnnccttctaacacttgtatttggaggctcttctgtgattttgagaagtatactcttgagtgtttaataaagtttttttcc

SEQ ID NO: 192726 - DNA, 1986 bp, Homo Sapiens; identical to SEQ ID NO: 185212
  misc_feature (344)..(385): n is a, c, g, or t
  misc_feature (1862)..(1870): n is a, c, g, or t

SEQ ID NO: 192727 - DNA, 1051 bp, Homo Sapiens; identical to SEQ ID NO: 185213
  misc_feature (811)..(819): n is a, c, g, or t

SEQ ID NO: 192728 - DNA, 1154 bp, Homo Sapiens; identical to SEQ ID NO: 185214
  misc_feature (971)..(979): n is a, c, g, or t

SEQ ID NO: 192729 - DNA, 1289 bp, Homo Sapiens; identical to SEQ ID NO: 185215
  misc_feature (1003)..(1011): n is a, c, g, or t

SEQ ID NO: 192730 - DNA, 1813 bp, Homo Sapiens; identical to SEQ ID NO: 185216
  misc_feature (1088)..(1107): n is a, c, g, or t
  misc_feature (1130)..(1365): n is a, c, g, or t

SEQ ID NO: 192731 - DNA, 758 bp, Homo Sapiens
ttggctcatggctgaactgggtgaagcacctgtcccagcatctgtgggctccacctctgggcctgccaccacacccctggccagcgcacctcgtcctgctgctcccgccaacaacccacctccaccgtctctcatgtctaccacccagagccgcccaccctggatgaattctggcccttcagagagtcggccctaccacggcatgcatggaggtggtcctggtgggcccggaggtggcccccacagcttcccacacccattacccagcctgacaggtgggcatggtggacatcccatgcagcacaaccccaatggacccccacccccttggatgcagccaccaccaccaccgatgaaccagggcccccaccctcctgggcaccatggccctcctccaatggatcagtacctgggaagtacgcctgtgggctctggggtctatcgcctgcatcaaggaaaaggtatgatgccgccaccacctatgggcatgatgccgccgccgccgccgcctcccagtgggcagcccccaccccctccctctggtcctcttcccccatggcaacaacagcagcagcagcctccgccaccccctccgcccagcagcagtatggcttccagtacccccttgccatggcagcaaaatacgacgactaccaccacgagcgctggcacagggtccatcccgccatggcaacagcagcaggcggctgccgcagcttctccaggagcccctcagatgcaaacaaccccactatggt

SEQ ID NO: 192732 - DNA, 1129 bp, Homo Sapiens
  misc_feature (831)..(878): n is a, c, g, or t
ttggagaatatttgtccctcatggctgaactgggtgaagcacctgtcccagcatctgtgggctccacctctgggcctgccaccacacccctggccagcgcacctcgtcctgctgctcccgccaacaacccacctccaccgtctctcatgtctaccacccagagccgcccaccctggatgaattctggcccttcagagagtcggccctaccacggcatgcatggaggtggtcctggtgggcccggaggtggcccccacagcttcccacacccattacccagcctgacaggtgggcatggtggacatcccatgcagcacaaccccaatggacccccacccccttggatgcagccaccaccaccaccgatgaaccagggcccccaccctcctgggcaccatggccctcctccaatggatcagtacctgggaagtacgcctgtgggctctggggtctatcgcctgcatcaaggaaaaggtatgatgccgccaccacctatgggcatgatgccgccgccgccgccgcctcccagtgggcagcccccaccccctccctctggtcctcttcccccatggcaacaacagcagcagcagcctccgccaccccctccgcccagcagcagtatggcttccagtacccccttgccatggcagcaaagatccctccccgcggcggcgatggcccgagccatgagagtgaggactttccgcgcccattggtgacccttccaggcagacagcctcagcaacgcccctggtggacaggatggttcggcaaagcagcctgagttatttttgtggacggaatcggaacacgctggctccatatcgtgannnnnnnnnnnnnnnnnnnnnnnnnnnnnnnnnnnnnnnnnnnnnnnncctttcttcagactccgtccaaggagatgctctccccggtcttctgctgcaatttagattcctttcccttctctccagttctccttcccttaccaaggagaggggagcaaatggttttgggcaagggctttggccattcatgtcaaagctggttgtgggtttttcaaggtgccatagccacccccaaatatgtttgtttaaagcgtggggttttttaatctctgccacccttgtctagggagtcttgtaaa

SEQ ID NO: 192733 - DNA, 908 bp, Homo Sapiens
ttgggtctgctgctgccagagcaggaacccccagtctaggacttgggcattttaacagggagaaagtagtggcttcccttttctctctctcctcctttttccctttaagcccacagattcaggtcatgccaaaagctctctggttgtaacctggagacatgtggaggggaatggcgatgggattataggactctccccatctcgggccctgaccctgacccttgccaccaacccaaagacagctggtgggtttccccttggagacaatcctgcgtttgcctgggccggccctggctgccctcagctttcgctgatctgcccggcctggagcctcccatcaccccgcttcttgttgggcctcaggcactggttaccagaagggggtctgggtctgctcaggatcatgttttgtagcacctcctgttggaggggtggagggatgttcccctgagccaggctgagactagaaccccatcttccctgagccaggctgagactagaaccccatcttccccaccacgccacccctgtggctgctacaggagcacagtagtgaaggcctgagctccaggtttgaaagacccaactggagcgtggggcgggcaggcaggggttagtgaaaggacacttccagggttaggacagagcatttagccttctggaagaacccctgcctggggtgggactgtgcaggccagagaaggtggcatgggcctgaacccacctggactgacttctgcactgaagccacagatggagggtaggctggtgggtgggggtggttcgttctctagccgggggcagacacccagctggctgggtccttcctcagcccttgcctcctcctgtccccaacccttttcttttcctcctgcttgcggactgctggtccctctccttccctcctt

SEQ ID NO: 192734 - DNA, 709 bp, Homo Sapiens; identical to SEQ ID NO: 180548

SEQ ID NO: 192735 - DNA, 993 bp, Homo Sapiens
ttggcgtcatcagggcgcgtcctcgtctttcccctcccatctcctcagatcggtggacgtgctcgcctccactcggggccaggtctatgtcccggtttcccgcagtcgcgggcagggcgccaaggcggcaggaggagggtgagcggtcaagagacctccaggaagagcggctctcggctgtttgcatcgccgatagagaagagaaaggatgcacgtcccaggagggaggaactactccaacttttcctattcagaaacaaagaaaaaagattattcaagctgtgagggacaattcattccttattgttactggaaatacaggaagtggtaaaacaactcaactcccaaaatatctatatgaagcagggttttcacaacatggtatgattggtgtaactcaaccacgaaaagtagctgctatatcagttgctcagagagtagctgaagaaatgaaatgcactttgggatccaaagtaggataccaagttcgttttgatgattgcagttctaaggagacagcaatcaaatatatgactgatggatgtttactgaaacatattctgggagacccaaatcttaccaaattcagtgtcattattttggatgaagcccatgaaagaactctaactacagatatcttatttggtttattgaagaagctatttcaggagaagtctcctaataggaaggagcatttaaaagtggtggtaatgtcagcaactatggaattagccaagctctctgcattctttggaaattgtccaatatttgatatacctggaaggctttatccagtcagagagaaattctgcaatttgattggtccacgagacagagaaaatactgcgtatattcaagcgattgtgaaagtcaccatggatatccatttgaatgaaatggctggagacatcttggtttttctgactggccagtttgaaataaaaaaagttgtgagttactttttcagatggcagagtctgttgattatgatta

SEQ ID NO: 192736 - DNA, 1164 bp, Homo Sapiens
ttggaaaaaaactctacctctctaactacagatatcttatttggtttattgaagaagctatttcaggagaagtctcctaataggaaggagcatttaaaagtggtggtaatgtcagcaactatggaattagccaagctctctgcattctttggaaattgtccaatatttgatatacctggaaggctttatccagtcagagagaaattctgcaatttgattggtccacgagacagagaaaatactgcgtatattcaagcgattgtgaaagtcaccatggatatccatttgaatgaaatggctggagacatcttggtttttctgactggccagtttgaaatagaaaaaagttgtgagttactttttcagatggcagagtctgttgattatgattatgatgttcaagataccaccctcgatggcttgttaatattgccgtgttatggatcaatgacaacagatcaacagaggaggatatttttgccaccaccacctggaattagaaaatgtgtcatatccaccaatatttctgcaacgtctttgacaatagatggaatcagatatgtggtagatggtggcttcgtgaagcagttaaatcacaaccccagattagggttggacatcctggaggtggttccaatttcaaagagcgaggcattacagcgaagtggccgagctggcaggacttcttcaggaaaatgctttcggatctatagtaaagatttttggaaccagtgtatgcctgaccatgtgatccctgaaattaagagaactagtttgacatctgtagttctgaccttaaagtgccttgccatacacgatgtcataaggtttccctatttggatccacctaatgagagacttattttagaagctcttaaacactttaccagtgtgatgctattgacaggagtggccatgtcaccagattgggtttgtctatggtggagtttcctttgcctccacatctgacatgtgcagtaataaaagctgcttccctggattgtgaagatctactacttccaatagcagcaatgttgtctgtggaaaacgtcttcattagacctgttgatccagagtaccagaaagaagcagaacagagacatcgagaattggcagctaaagctggagatttaatgactttgcaactttagctgtcatctttga

SEQ ID NO: 192737 - DNA, 1237 bp, Homo Sapiens; identical to SEQ ID NO: 180551

SEQ ID NO: 192738 - DNA, 2045 bp, Homo Sapiens; identical to SEQ ID NO: 185223
  misc_feature (168)..(177): n is a, c, g, or t
  misc_feature (255)..(267): n is a, c, g, or t
  misc_feature (1920)..(1928): n is a, c, g, or t

SEQ ID NO: 192739 - DNA, 1675 bp, Homo Sapiens; identical to SEQ ID NO: 185225
  misc_feature (1522)..(1565): n is a, c, g, or t

SEQ ID NO: 192740 - DNA, 768 bp, Homo Sapiens; identical to SEQ ID NO: 185226
  misc_feature (163)..(185): n is a, c, g, or t

SEQ ID NO: 192741 - DNA, 1877 bp, Homo Sapiens; identical to SEQ ID NO: 180553
  misc_feature (364)..(382): n is a, c, g, or t

SEQ ID NO: 192742 - DNA, 810 bp, Homo Sapiens; identical to SEQ ID NO: 185229
  misc_feature (336)..(361): n is a, c, g, or t

SEQ ID NO: 192743 - DNA, 2219 bp, Homo Sapiens
ctttgtacaaaaaagttggctcatttgacacgtaaatataatcgtgtcggacttcacccaaaaggagtggcagctactggatccctctcagaagaatttatacaaggatgtgatgttggagaactatagcagcctagtgtcactggggtatgaagttatgaaaccagatgtcatcttcaaattggagcaaggagaagagccgtgggtaggagatggagaaattccaagttcagattctccagaagtctggaaagtagatggtaacatgatgtggcaccaggataaccaagacaagcttaaaattataaaaagaggtcatgaatgtgatgcatttggaaaaaatttcaatctgaacatgaactttgttcctttaaggaaatcaaacagtgaaggtgacttagatggattgattttaaaacatcatttagatttgcttattccaaaaggagattatggaaaagcagaatcagatgactttaatgtgtttgataatttttttctccattccaagcctgaggatactgatacctggttaaaatactatgactgtgataaatataaagagagctataaaaagtcacagattatcatatatcatagaaatcgtttaggggagaaactctatgaatgcagtgaatgtaggaagcgcttcagtaagaaaccaagtctcattaaacatcagagcagacatataagagacatagcctttggctgtggtaattgtggcaaaacctttccccagaagtctcagtttattacacatcacagaactcatacaggagaaaaaccttataattgtagccagtgtgggaaagccttctcccaaaagtcacagctcacatcccatcagcggacacatacaggagagaaaccttatgagtgtggtgaatgtgggaaagccttctcccggaagtcacatctcatatcgcattggagaacacacacaggagagaaaccctatggatgcaatgaatgtgggagggcctttagtgaaaagtccaatctcattaaccatcagagaattcataccggtgagaagccttttgaatgcagggaatgtgggaaagccttcagcaggaagtcacaactcgttacacatcacagaactcacacaggaacaaaaccctttggatgtagtgattgtagaaaagccttctttgagaagtcagagcttattagacatcagacaattcatactggagagaaaccctatgaatgcagcgagtgtaggaaagcatttagagagaggtcgagtctcattaatcatcagagaacacatacaggagagaaacctcatggatgcattcagtgtgggaaggccttctcccagaagtcacatctcatatcacatcagatgacacacacaggagaaaaaccctttatatgcagtaaatgtgggaaagccttcagcaggaaatcacagctcgttagacatcagagaactcatacgggagaaaaaccgtatgaatgcagtgagtgtgggaaagctttcagtgaaaaattaagtctcactaatcatcaaagaattcatacaggagaaaaaccatatgtatgcagtgaatgtgggaaagccttttgtcagaagtcacatctcatatcacatcagaggacacatacaggggagaaaccctatgaatgcagtgaatgtgggaaggcctttggtgagaagtcaagtcttgcaactcatcagagaactcatactggagaaaaaccgtatgaatgcagggactgtgaaaaagctttctcccagaaatcacagctaaatacccatcagagaattcacactggagagaaaccctatgaatgcagtctttgtaggaaagctttttttgagaagtcggagctaattagacatctgagaactcatacaggagaaaaaccttatgaatgcaatgaatgtagaaaagccttcagggagaagtcaagtctcatcaatcatcagagaatacatacaggagagaagccttttgaatgcagtgagtgtggcaaagctttctctcggaagtcacaccttataccacatcaaaggacacatacgggtgagaaaccctatggatgcagtgaatgtaggaaggccttctctcagaagtcacagctggttaatcatcagagaattcatacaggagagaaagccttatcgatgcattgaatgtgggaaagctttctcacagaagtcacagctcatcaatcatcagagaactcatacagtaaaaaaatcc

SEQ ID NO: 192744 - DNA, 879 bp, Homo Sapiens
tcatcatttaataagtctgaattcattttcaccacacggtattgtacacggtcatctgttgaaacagatttcttttttaacagatcttagtttaaaaaagtcataggtactgtgagttctgtataaactggtggacagtaagttagttcctttgttttaacttataagcctcaacttcaccgcagaataaagaatgtaggccaaagaaagcataatcggtcactcgtatagaacagtattgtttctataatttgaagctttctgaatggacgggttcaggcctgatgcaactgtaaaaagattacttaatgaatagactatatggaaattgtataaaatgttattaccttttatcgttagtagcttaaacagcactatatcactaattgctattcaaaatcaaaaacctgtttttgaatccccaagaaggcagcatgtgtatacaaccataccaccttgtacttaggggtgtgtcaaaacataattcaacagaaactttggctttaggaaagagtcacaaatatttaaaagaatggctttgtcattttaagtatacggtcggggaaaagtgtgctttaattaaatatacatcataccagtgatgctggcaaggttgaaagttactcctaatgttgatagctataaaaactagtttgtacataacaagacaatgagaggaaaaagcaatccctttgaaacaaaattctcaaataaaaaatgttcacagtggtttgtatcaacagtatgcattttatgacaagaacatgtacagattcagagcaccctagggctctctttatgtcctaaagaaaatgagcatttacatgattatgggttgtacttgaaggtgaaaaaagatcccaacttttttgtacaaag

SEQ ID NO: 192745 - DNA, 1360 bp, Homo Sapiens
tatggcccataaagaagtcccggccgggccgctgcactccccgcgcgcatccgtgcgccgcccgaggctgtctaaggagtcggcggccattttgttcttctcgtggttccagtggggagagaaggaggaagtagggagcggggtggcaggggggggacccgccgcggctgctgccaccgccgccaccaccgcctctgctcgtggcgtgggaaaggaggtgtgagtcccgggcgcgagccggcggcggcgccgctgcgggagggtcggcggtgggaaggcgatggcggatttagataaactcaacatcgacagcattatccaacggctgctggaagtgagagggtccaagcctggtaagaatgtccagcttcaggagaatgaaatcagaggactgtgcttaaagtctcgtgaaatctttctcagtcagcctatcctactagaacttgaagcaccactcaaaatatgtggtgacatccatggacaatactatgatttgctgcgactttttgagtacggtggtttcccaccagaaagcaactacctgtttcttggggactatgtggacaggggaaagcagtcattggagacgatctgcctcttactggcctacaaaataaaatatcctgagaattttttttcttctcagagggaaccatgaatgtgccagcatcaacagaatttatggattttatgatgaatgtaaaagaagatacaacattaaactatggaaaactttcacagactgttttaactgtttaccgatagcagccatcgtggatgagaagatattctgctgtcatggaggtttatcaccagatcttcaatctatggagcagattcggcgaattatgcgaccaactgatgtaccagatcaaggtcttctttgtgatcttttgtggtctgaccccgataaagatgtcttaggctggggtgaaaatgacagaggagtgtccttcacatttggtgcagaagtggttgcaaaatttctccataagcatgatttggatcttatatgtagagcccatcaggtggttgaagatggatatgaattttttgcaaagaggcagttggtcactctgttttctgcgcccaattattgcggagagtttgacaatgcaggtgccatgatgagtgtggatgaaacactaatgtgttcttttcaggtagagcatgctttcaacatgatttccttttaatatgtttacactttgctgattgaaaaatataattgctactttttgcctagtgttcacttatgctgagtaggctaagtttttattttccctttaccagtgtgtattatagttgaataatgtgtggatcccttgtaaaagaaaaaataattatggccaccttttcc

SEQ ID NO: 192746 - DNA, 943 bp, Homo Sapiens
ttaaaaaagtcataggtactgtgagttctgtataaacttgtgacagtaagttagtcctttgttttaacttataagcctcaacttcaccgcagaataaagaatgtagggcaaagaaagcataatcggtcactcgtatagaacagtattgtttctataatttgaagctttctgaatggacgggttcaggcctgatgcaactgtaaaaagattacttaatgaatagactatatggaaattgtataaaatgttattaccttttatcgttagtagcttaaacagcactatatcactaattgctattcaaaatcaaaaacctgtttttgaatccccaagaaggcagcatgtgtatacaaccataccaccttgtacttaggggtgtgtcaaaacataattcaacagaaactttggctttaggaaagagtcacaaatatttaaaagaatggctttgtcattttaagtatacggtcggggaaaagtgtgctttaattaaatatacatcataccagtgatgctggcaaggttgaaagttactcctaatgttgatagctataaaaactagtttgtacataacaagacaatgagaggaaaaagcaatccctttgaaacaaaattctcaaataaaaaatgttcacagtggtttgtatcaacagtatgcattttatgacaagaacatgtacagattcagagcaccctagggctctctttatgtcctaaagaaaatgagcatttacatgattatgggttgtactgaattaaaaaagatcaattgtacacttactcctcagacaggataaactgtcctggggtgtacagctttaacaccatcattaaaattgtttgcaaaaggaacagagaattaaaaaacaaaacacttttctttttggagtgaagagtctttcatttgctgttatagaccagcaaatgccaacttttttgtacaaag

SEQ ID NO: 192747 - DNA, 1795 bp, Homo Sapiens; identical to SEQ ID NO: 185230

SEQ ID NO: 192748 - DNA, 1324 bp, Homo Sapiens; identical to SEQ ID NO: 185232
  misc_feature (324)..(415): n is a, c, g, or t

SEQ ID NO: 192749 - DNA, 1247 bp, Homo Sapiens; identical to SEQ ID NO: 185233

SEQ ID NO: 192750 - DNA, 1493 bp, Homo Sapiens; identical to SEQ ID NO: 185234
  misc_feature (337)..(357): n is a, c, g, or t
  misc_feature (412)..(476): n is a, c, g, or t

SEQ ID NO: 192751 - DNA, 730 bp, Homo Sapiens; identical to SEQ ID NO: 185237
  misc_feature (359)..(387): n is a, c, g, or t

SEQ ID NO: 192752 - DNA, 1095 bp, Homo Sapiens
ttggctgtattgctgtggagcctcttgaggagttctccgggcgtggaacgggtctgtttccgggctcgaatccagccctggcacggtggcctgctccaaccgctaccttgctctttcgagatggggctgccacgccgccggttcagctccgaggccgcaatctggtagcccagagaccaagaaacctacatttatggatgaggaagttcaaagcatactcacgaaaatgacaggcttgaacttgcagaagacttttaagccagctatacaagaactgaagccaccaacctataagctaatgactcaggcacagttggaagaggctacaagacaggcagttgaggcagctaaagtacgattaaaaatgccaccagttctggaagagcgagtaccaataaatgatgtgttagctgaagataagattttggaaggaacagaaacaaccaaatatgtgtttactgatatatcatatagcataccacaccgggagcgttttattgtcgtcagagaaccaagtggcacactacgcaaagcctcttgggaagaacgggaccgaatgatacaagtttatttcccaaaagaaggtcgtaaaattttgacaccaataattttcaaggaagaaaatcttaggactatgtatagccaggacaggcatgttgatgtcctcaatctctgctttgcccagtttgagccagattccacagagtatatcaaggttcatcacaagacctatgaagatatagataaacgtggaaaatatgaccttttacgttcaacaagatactttggtggaatggtgtggtattttgtaaataataaaaagattgatggtttgctgattgaccagattcagagagatttaatcgatgatgcaaccaacttggtccagctgtatcacgtgctccatccagatggccagtcggctcaaggggccaaggatcaggctgctgagggaataaatttaatcaaggtctttgcaaaaacagaagcacagaagggagcctatatagaactaacactgcagacttatcaagaagcactcagtcgccattctgcagcttcctaaaaatattttaaaaatacatttattttact

SEQ ID NO: 192753 - DNA, 1302 bp, Homo Sapiens; identical to SEQ ID NO: 180557
  misc_feature (50)..(58): n is a, c, g, or t

SEQ ID NO: 192754 - DNA, 947 bp, Homo Sapiens
actttgtacaaaaaagttggctcaaggcctgatttaaaccggtaacaaacgagggttcccgggattggaccgacgcagccatgcctctgcgacttgatatcaaaagaaagctaactgctagatctgatcgagttaagagtgtggatctgcatcctacagagccatggatgttggcaagtctttacaatggcagtgtgtgtgtttggaatcatgaaacacagacactggtgaagacatttgaagtatgtgatcttcctgttcgagctgcaaagtttgttgcaaggaagaattgggttgtgacaggagcggatgacatgcagattagagtgttcaattacaatactctggagagagttcatatgtttgaagcacactcagactacattcgctgtattgctgttcatccaacccagcctttcattctaactagcagtgatgacatgcttattaagctctgggactgggataaaaaatggtcttgctcacaagtgtttgaaggacacacccattatgttatgcagattgtgatcaaccccaaagataacaatcagtttgccagtgcctctttggacaggactatcaaggtgtggcagttgggctcttcgtcaccaaacttcactttggaaggacatgagaaaggcgtgaattgcattgattactacagtggtggggacaagccatacctcatttcaggtgcagatgaccgtcttgttaaaatatgggattatcagaataaaacatgtgtgcagacactggaaggacatgcccaaaatgtgtcttgtgccagctttcatcctgagttgccaatcattatcacaggttcagaagatggaacagtacgtatttggcattcaagcacctaccgggcttgagagcacactgaattatggaatggagagggtatggtgcgtggccagtctaagagggtcaaacaatgtcgctttggg

SEQ ID NO: 192755 - DNA, 921 bp, Homo Sapiens
ttggcgatgagctgcgcggggcgggcgggccctgcccggctcgccgcgctagccctgctgacctgcagcctgtggccggcacgggcagacaacgcgagccaggagtactacacggcgctcatcaacgtgacggtgcaggagcccggccgcggcgccccgctcacgtttcgcatcgaccgcgggcgctacgggcttgactcccccaaggccgaggtccgcggccaggtgctggcgccgctgcccctccacggagttgctgatcatctgggctgtgatccacaaacccggttctttgtccctcctaatatcaaacagtggattgccttgctgcagaggggaaactgcacgtttaaagagaaaatatcacgggccgctttccacaatgcagttgctgtagtcatctacaataataaatccaaagaggagccagttaccatgactcatccaggcactggagatattattgctgtcatgataacagaattgaggggtaaggatattttgagttatctggagaaaaacatctctgtacaaatgacaatagctgttggaactcgaatgccaccgaagaacttcagccgtggctctctagtcttcgtgtcaatatcctttattgttttgatgattatttcttcagcatggctcatattctacttcattcagaagatcaggtacacaaatgcacgcgacaggaaccagcgtcgtctcggagatgcagcccaagaaagccatcagtaaattgacaaccaggacagtaaagaagggtgacaaggaaactgacccagactttgatcattgtgcagtctgcatagagagctataagcagaatgatgtcgtccgaattctcccctgcaagcatgttttccacaatcctgcgtggatccctggacttagtgaacattgtacctgtcctatgtgcaa

SEQ ID NO: 192756 - DNA, 835 bp, Homo Sapiens; identical to SEQ ID NO: 185241

SEQ ID NO: 192757 - DNA, 824 bp, Homo Sapiens
actttgtacaaaaaagttggcctaagggtcctaaccggggagttatcattaccatgttggtgacctgttcagtttgctgctatctcttttggctgattgcaattctggcccaactcaaccctctctttggaccgcaattgaaaaatgaaaccatctggtatctgaagtatcattggccttgaggaagaagacatgctctacagtgctcagtctttgaggtcacgagaagagaatgccttctagatgcaaaatcacctccaaaccagaccacttttcttgacttgcctgttttggccattagctgccttaaacgttaacagcacatttgaatgccttattctacaatgcagcgtgttttcctttgccttttttgcactttggtgaattacgtgcctccataacctgaactgtgccgactccacaaaacgattatgtactcttctgagatagaagatgctgttcttctgagagatacgttactctctccttggaatctgtggatttgaagatggctcctgccttctcacgtgggaatcagtgaagtgtttagaaactgctgcaagacaaacaagactccagtggggtggtcagtaggagagcacgttcagagggaagagccatctcaacagaatcgcaccaaactatactttcaggatgaatttcttctttctgccatcttttggaataaatattttcctcctttctatggaaatctggggctcggtgtttgtaaagttcatttttataagcttttctatcgctacataatgcctttttaaaaaatgatttttgtagtctaaaacttaggttgagtatataaaccc

SEQ ID NO: 192758 - DNA, 605 bp, Homo Sapiens
tttcatgccaactttgtacaaaaaagttggcgagtgaggcgacggggtaggggttggcgctcaggcggcgaccatggcgtatcacggcctcactgtgcctctcattgtgatgagcgtgttctggggcttcgtcggcttcttggtgccttggttcatccctaagggtcctaaccggggagttatcattaccatgttggtgacctgttcagtttgctgctatctcttttggctgattgcaattctggcccaactcaaccctctctttggaccgcaattgaaaaatgaaaccatctggtatctgaagtatcattggccttgaggaagaagacatgctctacagtgctcagtctttgaggtcacgagaagagaatgccttctagatgcaaaatcacctccaaaccagaccacttttcttgacttgcctgttttggccattagctgccttaaacgttaacagcacatttgaatgccttattctacaatgcagcgtgttttcctttgccttttttgcactttggtgaattacgtgcctccataacctgaactgtgccgactccacaaaacgattatgtactcttctgagataaaagatgctgttcttctga

SEQ ID NO: 192759 - DNA, 857 bp, Homo Sapiens
  misc_feature (756)..(771): n is a, c, g, or t
actttgtacaaaaaagttggctacgtcctcttcttgatggcgctgaccttcctcatgtcctccttcaccttctgtggttccttcacgggctggaagagacatggggcccacatctacctcacgatgctcctctccattgccatctgggtggcctggatcaccctgctcatgcttcctgactttgaccgcaggtgggatgacaccatcctcagctccgccttggctgccaatggctgggtgttcctgttggcttatgttagtcccgagttttggctgctcacaaagcaacgaaaccccatggattatcctgttgaggatgctttctgtaaacctcaactcgtgaagaagagctatggtgtggagaacagagcctactctcaagaggaaatcactcaaggttttgaagagacaggggacacgctctatgccccctattccacacattttcagctgcagaaccagcctccccaaaaggaattctccatcccacgggcccacgcttggccgagcccttacaaagactatgaagtaaagaaagagggcagctaactctgtcctgaagagtgggacaaatgcagccgggcggcagatctagcgggagctcaaagggatgtgggcgaaatcttgagtcttctgagaaaactgtacaagacactacgggaacagtttgcctccctcccagcctcaaccacaattcttccatgctggggctgatgtgggctagtaagactccagttcttagaggcgctgtagtannnnnnnnnnnnnnnnggctcatccttaagatacttcttttaagtgggagtctcaggaactcaaagtttaaaccctttactccttttgtttgttttttgaaa

SEQ ID NO: 192760 - DNA, 1439 bp, Homo Sapiens; identical to SEQ ID NO: 185243

SEQ ID NO: 192761 - DNA, 973 bp, Homo Sapiens
tataatagcgcaactttgtacaaaaaagttggccagagaaaagtagccagagcggcgcagtggcggccgcgttctgtggttttccgctattcccccagacccgcaccttctcggcctctttgcggagaatcgtgaccaagatgtggaacagtggattcgaaagctatggcagctcctcatacgggggagccggcggctacacgcagtccccggggggctttggatcgcccgcaccttctcaagccgaaaagaaatcaagagcccgagcccagcacattgtgccctgtactatatctcagctgctttctgccactttggttgatgaagtgttcagaattgggaatgttgagatttcacaggtcactattgtggggatcatcagacatgcagagaaggctccaaccaacattgtttacaaaatagatgacatgacagctgcacccatggacgttcgccagtgggttgacacagatgacaccagcagtgaaaacactgtggttcctccagaaacatatgtgaaagtggcaggccacctgagatcttttcagaacaaaaagagcctggtagcctttaagatcatgcccctggaggatatgaatgagttcaccacacatattctggaagtgatcaatgcacacatggtactaagcaaagccaacagccagccctcagcagggagagcacctatcagcaatccaggaatgagtgaagcagggaactttggtgggaatagcttcatgccagcaaatggcctcactgtggcccaaaaccaggtgttgaatttgattaaagcttgtccaagacctgaagggttgaactttcagatctcaagaaccagctgaaacacatgtctgtatcctcaatcaagcaagctgtggattttctgagcaatgaggggcacatctattctactgtggatgatgaccatttttaattcaccagatgcagaataactggatctaactggggtacc

SEQ ID NO: 192762 - DNA, 922 bp, Homo Sapiens; identical to SEQ ID NO: 180563

SEQ ID NO: 192763 - DNA, 527 bp, Homo Sapiens; identical to SEQ ID NO: 185246

SEQ ID NO: 192764 - DNA, 2501 bp, Homo Sapiens; identical to SEQ ID NO: 185247
  misc_feature (1299)..(1322): n is a, c, g, or t

SEQ ID NO: 192765 - DNA, 1337 bp, Homo Sapiens; identical to SEQ ID NO: 185249

SEQ ID NO: 192766 - DNA, 1049 bp, Homo Sapiens; identical to SEQ ID NO: 185250
  misc_feature (702)..(761): n is a, c, g, or t
  misc_feature (840)..(852): n is a, c, g, or t

SEQ ID NO: 192767 - DNA, 558 bp, Homo Sapiens; identical to SEQ ID NO: 185253

SEQ ID NO: 192768 - DNA, 1693 bp, Homo Sapiens; identical to SEQ ID NO: 185254
  misc_feature (365)..(384): n is a, c, g, or t
  misc_feature (1348)..(1360): n is a, c, g, or t

SEQ ID NO: 192769 - DNA, 1283 bp, Homo Sapiens; identical to SEQ ID NO: 185255
  misc_feature (147)..(166): n is a, c, g, or t
  misc_feature (1130)..(1142): n is a, c, g, or t

SEQ ID NO: 192770 - DNA, 1461 bp, Homo Sapiens
  misc_feature (505)..(515): n is a, c, g, or t
gacagacaaatcgattacaaggtcaattcccaggattcctcagggtgtgttcaggagtgcagatgttctttggatgacctttctactaaattagacctctgaaggagaaagctacttgccagaggctttccctgagagcattaggttgggcaaaatctgactaaaatttaattactaaatgaaagtgtgtaccttagagttcctggccagagttgactctaggtagtgatgtgattttcttgggatgtttttctaaatattcttttatgctaaagcacatggcttgatacttctgttgattaagctcgtgtctacttacagtcatctagtgagaacctgtggtgtggtgagatgataacttggtctttggtcttcatcatttgaactagttttggttttgtcttgtcccttccttgagcattttgtgtgtgtttaatcctatttggtaaacgaaccactgtgaaagaccaagttggagaaaacagaacacccccaaaacatttannnnnnnnnnnagaaaatcatggctcactatggtagtatacaatattgttttcacacatgtacacttgaaaccaaatttctaaaacttgtttttcttaaaaaatagttgttgtaacattaaaccataacctaatcagtgtgttcactatgcttccacactagccagtcttctcacacttcttctggtttcaagtctcaaggcctgacagacagaagggcttggagattttttttctttacaattcagtcttcagcaacttgagagctttcttcatgttgtcaagcaacagagctgtatctgcaggttcgtaagcatagagacgatttgaatatcttccagtgatatcggctctaactgtcagagatgggtcaacaaacataatcctggggacatactggccatcaggagaaaggtgtttgtcagttgtttcataaaccagattgaggaggacaaactgctctgccaatttctggatttctttattttcagcaaacactttctttaaagcttgactgtgtgggcactcatccaagtgatgaataatcatcaagggtttgttgcttgtcttggatttatatagagcttcttcatatgtctgagtccagatgagttggtcaccccaacctctggagagggtctggggcagtttgggtcgagagtcctttgtgtcctttttggctccaggtttgactgtggtatctctggccagagtgtaggagagggccacaaggagcaagaatgctgacactggaattttctccatggcaactctgccttgtgtgagtcggcggctaggatgcggtccaagcttctgagtgtgccagcacagctgagtctctatttatgcaccagggcacacctcaatcccacccactagtgctgcatttacttgttgctaactcagaaacgaaccttcctttccccaagtgattatcttccctgggttaaagagccaa

SEQ ID NO: 192771 - DNA, 985 bp, Homo Sapiens
  misc_feature (827)..(838): n is a, c, g, or t
actttgtacaaaaaagttggatcctagccgccgactcacacaaggcaggtgggtgaggaaatccagagttgccatggagaaaattccagtgtcagcattcttgctccttgtggccctctcctacactctggccagagataccacagtcaaacctggagccaaaaaggacacaaaggactctcgacccaaactgccccagaccctctccagaggttggggtgaccaactcatctggactcagacatatgaagaagctctatataaatccaagacaagcaacaaacccttgatgattattcatcacttggatgagtgcccacacagtcaagctttaaagaaagtgtttgctgaaaataaagaaatccagaaattggcagagcagtttgtcctcctcaatctggtttatgaaacaactgacaaacacctttctcctgatggccagtatgtccccaggattatgtttgttgacccatctctgacagttagagccgatatcactggaagatattcaaaccgtctctatgcttacgaacctgcagatacagctctgttgcttgacaacatgaagaaagctctcaagttgctgaagactgaattgtaaagaaaaaaaatctccaagcccttctgtctgtcaggccttgagacttgaaaccagaagaagtgtgagaagactggctagtgtggaagcatagtgaacacactgattaggttatggtttaatgttacaacaactattttttaagaaaaacaagttttagaaatttggtttcaagtgtacatgtgtgaaaacaatattgtatactaccatagtgagccatgattttctnnnnnnnnnnnntaaatgttttgggggtgttctgttttctccaacttggtctttcacagtggttcgtttaccaaataggattaaacacacacaaaatgctcaaggaaggacagacaaaccaaaactagttcaaatgatgagaccaaagaccaagttatc

SEQ ID NO: 192772 - DNA, 809 bp, Homo Sapiens
gggggtgaatagaactgtccctcggacagagcaccggagaacagcaggggtccacgggcaacagcaacctgggcggcaagataccctggaggagcagactcggtcccggaccgaggacagttacaccctagcagcctggggtacccccacccaagctccccctcaggctactggaggctgctcagaggtggcgagatgcttcagactgactctcatgcccgcaactcccctctcttggggctgtgggtaaccctcgctgcacccccctacccgcaagcactcacatcgctcctcttcagcttcctggggtaggactttgaagtcaaggaaccaggtctccaaccaggcgaggacaaaagagacgatggggagcaggtagccaaatgcccctttgctgagcagctcagagaggatgaccttgacaatgaggaatgcactggacaccagcgtcgtgaccgcaatcacccaccagtgccggagccgcagcacggcatagcctaggagcagtccagagaagcggaagaaggccaggacaaagatgtcgaagaaggaagttttaaagttgtactggatgatctcctgctccaagttcttacggatgcctgtgttggtattcagttcgatgatccagagcagggagatgaagagcaggtcgaaggtgacgaagagacagaaggtgcggcggacatcagagatggcccttcgcttctcaggcggcggaaggaggtgcgaggagaggctctggctgtgggacagtgaggagcccagggaggccacggcaggcaggctgcgctccaagtctcggccaa

SEQ ID NO: 192773 - DNA, 2026 bp, Homo Sapiens; identical to SEQ ID NO: 185256

SEQ ID NO: 192774 - DNA, 859 bp, Homo Sapiens; identical to SEQ ID NO: 185257

SEQ ID NO: 192775 - DNA, 1353 bp, Homo Sapiens
ttgggctctggagcctcagcgagcggaggagcgcggagcggcagccggctggggcgggtggcatcatggacgagaaggtgttcaccaaggagctggaccagtggatcgagcagctgaacgagtgcaagcagctgtccgagtcccaggtcaagagcctctgcgagaaggctaaagaaatcctgacaaaagaatccaacgtgcaagaggttcgatgtccagttactgtctgtggagatgtgcatgggcaatttcatgatctcatggaactgtttagaattggtggcaaatcaccagatacaaattacttgtttatgggagattatgttgacagaggatattattcagttgaaacagttacactgcttgtagctcttaaggttcgttaccgtgaacgcatcaccattcttcgagggaatcatgagagcagacagatcacacaagtttatggtttctatgatgaatgtttaagaaaatatggaaatgcaaatgtttggaaatattttacagatctttttgactatcttcctctcactgccttggtggatgggcagatcttctgtctacatggtggtctctcgccatctatagatacactggatcatatcagagcacttgatcgcctacaagaagttccccatgagggtccaatgtgtgacttgctgtggtcagatccagatgaccgtggtggttggggtatatctcctcgaggagctggttacacctttgggcaagatatttctgagacatttaatcatgccaatggcctcacgttggtgtctagagctcaccagctagtgatggagggatataactggtgccatgaccggaatgtagtaacgattttcagtgctccaaactattgttatcgttgtggtaaccaagctgcaatcatggaacttgacgatactctaaaatactctttcttgcagtttgacccagcacctcgtagaggcgagccacatgttactcgtcgtaccccagactacttcctgtaatgaaattttaaacttgtacagtattgccatgaaccatatatcgacctaatggaaatgggaagagcaacagtaactccaaagtgtcagaaaatagttaacattcaaaaaacttgttttcacatggaccaaaagatgtgccatataaaaatacaaagcctcttgtcatcaacagccgtgaccactttagaatgaaccagttcattgcatgctgaagcgacattgttggtcaagaaaccagtttctggcatagcgctatttgtagttacttttgctttctctgagagactgcagataataagatgtaaacattaacacctcgtgaatacaatttaacttccatttagctatagctttactc

SEQ ID NO: 192776 - DNA, 1068 bp, Homo Sapiens
  misc_feature (799)..(807): n is a, c, g, or t
ttggcacagagattccccgccgcgttccctggactcaggagctcgccgcgatgccccgccccactctccacccgctgaatgcagggcgcatgctgctacttggcggctcaagccccgcccgcaccgtccccattctctgaccgcccctctcccggtacactgcgcaggcacaacagagccgctcccctctcctcgccccgccaccgggacggagagcgcccgccgctgcatttccggcgacacctcgcagtcattcctgcggcttgcgcgcccttgtagacagccggggccttcgtgagaccggtgcaggcctggggtagtctcctgtctggacagagaagagaaaaatgcaggacactggctcagtagtgcctttgcattggtttggctttggctacgcagcactggttgcttctggtgggatcattggctatgtaaaagcaggcagcgtgccgtccctggctgcagggctgctctttggcagtctagccggcctgggtgcttaccagctgtctcaggatccaaggaacgtttgggttttcctagctacatctggtaccttggctggcattatgggaatgaggttctaccactctggaaaattcatgcctgcaggtttaattgcaggtgccagtttgctgatggtcgccaaagttggagttagtatgttcaacagaccccattagcagaagtcatgttccagcttagactgatgaagaattaaaaatctgcatcttccactattttcaatatattaagagaaataagtgcagcatttttgcatctgacattttacctnnnnnnnnngacaccaaacttggcagagaggtggaaaatcagtcatgattacaaacctacagaggtggcgagtatgtaacacaagagcttaataagaccctcatagagcttgattcttgtatattgatgttgtcttttctttctgtatctgtaggtaaatctcaagggtaaaatgttagtgtcagctttcaggctctgaaaccccattccctgctctgaggaacagtgtgaaaaaaagtcttttaaggagatttacaatatctgttcttt

SEQ ID NO: 192777 - DNA, 882 bp, Homo Sapiens
  misc_feature (578)..(586): n is a, c, g, or t
ctttgtacaaaaaagttggcacctcgcagtccttcctgcggcttgcgcgcccttgtagacagccggggccttcgtgagaccggtgcaggcctggggtagtctcctgtctggacagagaagagaaaaatgcaggacactggctcagtagtgcctttgcattggtttggctttggctacgcagcactggttgcttctggtgggatcattggctatgtaaaagcaggcagcgtgccgtccctggctgcagggctgctctttggcagtctagccggcctgggtgcttaccagctgtctcaggatccaaggaacgtttgggttttcctagctacatctggtaccttggctggcattatgggaatgaggttctaccactctggaaaattcatgcctgcaggtttaattgcaggtgccagtttgctgatggtcgccaaagttggagttagtatgttcaacagaccccattagcagaagtcatgttccagcttagactgatgaagaattaaaaatctgcatcttccactattttcaatatattaagagaaataagtgcagcatttttgcatctgacattttacctnnnnnnnnngacaccaaacttggcagagaggtggaaaatcagtcatgattacaaacctacagaggtggcgagtatgtaacacaagagcttaataagaccctcatagagcttgattcttgtatattgatgttgtcttttctttctgtatctgtaggtaaatctcaagggcaaaatgttaggtgtcagctttcagggctctgaaaccccattccctgctctgaggaacagtgtgaaaaaaagtcttttagagatttacaatatctgttcttttgctcatcttagaccacaaactgactttgaaatta

SEQ ID NO: 192778 - DNA, 1757 bp, Homo Sapiens; identical to SEQ ID NO: 185263
  misc_feature (983)..(1007): n is a, c, g, or t

SEQ ID NO: 192779 - DNA, 632 bp, Homo Sapiens
  misc_feature (184)..(213): n is a, c, g, or t
actctgtacaaagtgtggcagcatcaacccgggaaatggcacatttgaaccaggatcgccctgacatgggcttgcctttttgtatgtgttttccccaccccctgacctagctggtatcttgtgaatgtttctgtgacagtggtaaaagtaaataaattgcatttaaggggtaagcaggtgtttnnnnnnnnnnnnnnnnnnnnnnnnnnnnnntgaaagaatgtggtcggagggggggaggttttcacatgttgtttaactccagtaaagtcaaaaacagcatctgatgcatagtaaggttttcttctttggcatgagccactttcgtcttctaagtcatcaatgcttttctccaatttagttactgacctctccgcaaactcagcccgagtctcagcctccttcagcttgtcggaaaggaccttgatctcttcctcatatctgtcttccttctgcgagtacttatcctctgcagccattaatgctttcaaggtctgatccattattcttaattgttcttccagctgtcggacttggccttctgagagctcagcccgctcctctgcacgttccaggtcgctctcaatgatgaccagcttacgggccacctttagttccgcactgtccgccaa

SEQ ID NO: 192780 - DNA, 1088 bp, Homo Sapiens; identical to SEQ ID NO: 185265
  misc_feature (726)..(799): n is a, c, g, or t

SEQ ID NO: 192781 - DNA, 2376 bp, Homo Sapiens; identical to SEQ ID NO: 180570
  misc_feature (867)..(899): n is a, c, g, or t
  misc_feature (1090)..(1119): n is a, c, g, or t
  misc_feature (1602)..(1628): n is a, c, g, or t
  misc_feature (1649)..(1769): n is a, c, g, or t

SEQ ID NO: 192782 - DNA, 916 bp, Homo Sapiens
tttgtacaaaaaagttgggtgaaaaataagctttcccaaatagaaactggtgtgttcttcatagtcctgtcttcagcaccgtgagcagtccattggaggcaaggcagtgaatcaactctcacatctatttctttcccagtggccacaagtaatcatcctgagactgactacaagaacaaagactgggtcttcatcaattacacgtacaagcgctttgagggcctgactgcaaggggggcaataccttcctacatgaaagcagcaaaatagtactcttgccacggaatcctatgtggagcagagttctttgtataacatcatgcttttcctctcacactcttgaagagcttccaagaagttgatggaacccaccaatatgtcatagtaaagtctcctgaaatgtggtagtaagaggattttcttccataatgcatctgaaaaactgtaaacaaagacaaccatttctactacgtcggccataaacagctatcctgctttggaagagaagcatcatgagccaatttgataggtgttttaaaaataacttgagttttcctaagttcatcagaatgaaggggaaaaacagccatcatccaacattattgagattgtcgtgtatagtcatcgaatatcagccagttcctgtaattttgtgacacgctctctgccaagcccaccaagtatttcctttatagctaaaagttccctagtactaaggaaataaagcaataaagacagtctcagcagccaggattctggctgaaggaaatgatccgccaccctgagggtggtgatggtagtttctactcatacctcaacctctagcgtagtggcttataagctccattcatggtgcacttttattatggaataagataaagactgtccatctatggatttatctccccctgtcccc

SEQ ID NO: 192783 - DNA, 2124 bp, Homo Sapiens; identical to SEQ ID NO: 185268

SEQ ID NO: 192784 - DNA, 1357 bp, Homo Sapiens; identical to SEQ ID NO: 185270

SEQ ID NO: 192785 - DNA, 2081 bp, Homo Sapiens; identical to SEQ ID NO: 185271

SEQ ID NO: 192786 - DNA, 1386 bp, Homo Sapiens
aaagccaactttgtacaaaaaagttggctattgatctcttcatgattgagatcatggagatgaaacataaatctgaaactgatacaagcttaatcagagggcttgttttggaccacggagcacggcatcctgatatgaagaaaagggtggaggatgcatacatcctcacttgtaacgtgtcattagagtatgagaaaacagaagtgaattctggctttttttacaagagtgcagaagagagagaaaaactcgtgaaagctgaaagaaaattcattgaagatagggttaaaaaaataatagaactgaaaaggaaagtctgtggcgattcagataaaggatttgttgttattaatcaaaagggaattgaccccttttccttagatgctctttcaaaagaaggcatagtcgctctgcgcagagctaaaaggagaaatatggagaggctgactcttgcttgtggtggggtagccctgaattcttttgacgacctaagtcctgactgcttgggacatgcaggacttgtatatgagtatacattgggagaagagaagtttacctttattgagaaatgtaacaaccctcgttctgtcacattattgatcaaaggaccaaataagcacacactcactcagatcaaagatgcagtgagggacggcttgagggctgtcaaaaatgctattgatgatggctgtgtggttccaggtgctggtgccgtggaagtggcaatggcagaagccctgattaaacataagcccagtgtaaagggcagggcacagcttggagtccaagcatttgctgatgcattgctcattattcccaaggttcttgctcagaactctggttttgaccttcaggaaacattagttaaaattcaagcagaacattcagaatcaggtcagcttgtgggtgtggacctgaacacaggtgagccaatggtggcagcagaagtaggcgtatgggataactattgtgtaaagaaacagcttcttcactcctgcactgtgattgccaccaacattctcttggttgatgagatcatgcgagctggaatgtcttctctgaaaggttgaattgaagcttcctctgtatctgaatcttgaagactgcaaagtgatcctgaggattacagctgtggaatttttgtccaagcttcaaataattttgaaagaaattttcccatatgaaaaaaggagagaacactggcatctgttgaaatttggaagttctgaaattatagtatttttaaaaattgcactgaagtgtatacacataaagcaggtcttttatccagtgaacaggatgttttgctttatcagcagtgacataaaattccatgttagataagcatatgtaacttaccttgttattaaatatttcttgaaaagc

SEQ ID NO: 192787 - DNA, 928 bp, Homo Sapiens
ttgtacaaaaaagttggctccgctggagcagctatggcggcggtgaagaccctgaaccccaaggccgaggtggcccgagcgcaggcggcgctggcggtcaacatcagcgcagcgcggggtctgcaggacgtgctaaggaccaacctggggcccaagggcaccatgaagatgctcgtttctggcgctggagacatcaaacttactaaagacggcaatgtgctgcttcacgaaatgcaaattcaacacccaacagcttccttaatagcaaaggtagcaacagcccaggatgatataactggtgatggtacgacttctaatgtcctaatcattggagagctgctgaaacaggcggatctctacatttctgaaggccttcatcctagaataatcactgaaggatttgaagctgcaaaggaaaaggcccttcagtttttggaagaagtcaaagtaagcagagagatggacagggaaacacttatagatgtggccagaacatctcttcgtactaaagttcatgctgaacttgcagatgtcttaacagaggctgtagtggactccattttggccattaaaaagcaagatgaacctattgatctcttcatgattgagatcatggagatgaaacataaatctgaaactgatacaagcttaatcagagggcttgttttggaccacggagcacggcatcctgatatgaagaaaagggtggaggatgcatacatcctcacttgtaacgtgtcattagagtatgagaaaacagaagtgaattctggctttttttacaagagtgcagaagagagagaaaaactcgtgaaagctgaaagaaaattcattgaagatagggttaaaaaaataatagaactgaaaaggaaagtctgtggcgattcagataaaggatttgttgttataatcaaaaggaattgacccc

SEQ ID NO: 192788 - DNA, 946 bp, Homo Sapiens
ttgggaaagaggcaatgatgaatctgccatcgaaatgattaaagtatctcatttgaagcagtatttggcagtcgtattcagagataaacccctggagctatgggatgttaggacttgtacccttcttagagagatgtccaaaaacttccctacaataactgctttggagtggtcaccatctcacaacttgaagagcctgagaaagaagcaacttgctactcgagaggccatggcccgccagaccgtagtctcagacacagagctgagtattgttgaatcatctgtgatcagcttgctgcaggaggcagaaagtaaatctgaacttagtcagaacatctctgcccgggaacattttgtatttaccgatattgatggccaagtgtatcatctcactgttgaaggaaactcagtaaaagacagtgctcggattccaccagatggaagtatgggtagtattacctgcatcgcttggaaaggtgatacattagtgcttggagatatggatggaaatttaaatttctgggacttgaaaggcagagtatccagaggaatacccacacaccgaagttgggtgaggaagattcgttttgctcctggtaaaggaaatcaaaaattaatagcaatgtacaatgatggagctgaagtgtgggatactaaagaggttcagatggtgagcagtttaagaagtggcagaaatgtgacctttcgtatattggatgtggactggtgtacgtcagataaagtgatcttggcctcagatgatgggtgcatcagagtcctagagatgtctatgaagtctgcgtgctttagaatggatgaacaagagttaaccgagcctgtgtggtgcccctatctccttgttccaagggcctctcttgccttgaaagccttcttattacaccagccttggaatggacagtattctttgggacatttctcatgttga

SEQ ID NO: 192789 - DNA, 1334 bp, Homo Sapiens
  misc_feature (1158)..(1168): n is a, c, g, or t
ttggcacatttattcagtatttctccaagttgctatctactcagccttatgaatgcccctcgcttttctaaggccatgtgaaaatcacggcactgcccttagccttgtgtcatctgctttttcgttctgcgatatgcccagttcccaaatcaattataggtacctgtttaggagagaggaagattttacctctcaaagggtgagatttgaaatttacactaaaaagacaactttacatttaatgcttcacttaatgagacattcttttttttataagtctatttttctactcagtttcagaacactaatctgattttcactctgatttttaacgtttctttaaatatttataatgtagcttctttcaaaatattttcatgaaaaattacttttattataccattatgtgcatgttattggtagcaggcatagtttattatttagtactgaaacatgctcttttacctaacagtaaacaagtatgttttgatatatatctgttaatatgcttatagtggtaagaaatggacttgaggtcccaggagatttcattttattcaccctggtcagatacaataaaggctatgagtataaatacataacttcctaaccaggtgtagggcatgttcatgaatatcaaatcttttgatgctggacccaagagaggaaaagttgtagctaaatgttgatttacttataactagacgtctatgtgagaaaatatatgtatacatatatatgatatgcagaagtcactttttttatcaggctttattctccttacaaagccacagtttaactgtctgcaacagttggtttatgttaatgatagacaaatacccagtgtttgttactttttccaactaccactgtaatgataatctttctcacgtatatacatgcaacttcttggcttcatttccatgaagctgtttcaatatattcagtatactttgtccttaatgctgcttctgttaacagtgatctctttctttttttcattcttatatcttcattagttcatcataaatctgtccagttgaggcctcaggaccacggcatgatttcatgactccgaagtattttacagaaacattttttaaataagggaaatattttatataccagatggttcacaagtgatggctcatagctagnnnnnnnnnnncttctaaaaaatgtcaggtttttaaaatcatttaccttattaaaatgaaaagtgccatacttaacttttaaaggaaagacctgacttgctttttctctatttaaactgtttttgtactttactaatctttaaactatcagaaaaaaaccaaactttataccaatga

SEQ ID NO: 192790 - DNA, 1193 bp, Homo Sapiens; identical to SEQ ID NO: 185277
  misc_feature (332)..(392): n is a, c, g, or t
  misc_feature (923)..(933): n is a, c, g, or t

SEQ ID NO: 192791 - DNA, 1016 bp, Homo Sapiens
  misc_feature (777)..(787): n is a, c, g, or t
caaattgatgagcaatgcttttcccataaaaaaacaactttgtacaaaaaagttggatttagtactgaaacatgctcttttacctaacagtaaacaagtatgttttgatatatatctgttaatatgcttatagtggtaagaaatggacttgaggtcccaggagatttcattttattcaccctggtcagatacaataaaggctatgagtataaatacataacttcctaaccaggtgtagggcatgttcatgaatatcaaatcttttgatgctggacccaagagaggaaaagttgtagctaaatgttgatttacttataactagacgtctatgtgagaaaatatatgtatacatatatatgatatgcagaagtcacttttttttatcaggctttattctccttacaaagccacagtttaactgtctgcaacagttggtttatgttaatgatagacaaatacccagtgtttgttactttttccaactaccactgtaatgataatctttctcacgtatatacatgcaacttcttggcttcatttccatgaagctgtttcaatatattcagtatactttgtccttaatgctgcttctgttaacagtgatctctttctttttttcattcttatatcttcattagttcatcataaatctgtccagttgaggcctcaggaccacggcatgatttcatgactccgaagtattttacagaaacattttttaaataagggaaatattttatataccagatggttcacaagtgatggctcatagctagnnnnnnnnnnncttctaaaaaatgtcaggtttttaaaatcatttaccttattaaaatgaaaagtgccatacttaacttttaaaggaaagacctgacttgctttttctctatttagactgtttttgtactttactaatctttaaactatcaggaaaaaaaccaaaactttataccaatgatttagtaattttgaggcatagggtagcttacgtagtggaggatgtgccaaatattctcttc

SEQ ID NO: 192792 - DNA, 944 bp, Homo Sapiens
  misc_feature (774)..(785): n is a, c, g, or t
ttggcttttattataccattatgtgcatgttattggtagcaggcatagtttattatttagtactgaaacatgctcttttacctaacagtaaacaagtatgttttgatatatatctgttaatatgcttatagtggtaagaaatggacttgaggtcccaggagatttcattttattcaccctggtcagatacaataaaggctatgagtataaatacataacttcctaaccaggtgtagggcatgttcatgaatatcaaatcttttgatgctggacccaagagaggaaaagttgtagctaaatgttgatttacttataactagacgtctatgtgagaaaatatatgtatacatatatatgatatgcagaagtcactttttttatcaggctttattctccttacaaagccacagtttaactgtctgcaacagttggtttatgttaatgatagacaaatacccagtgtttgttactttttccaactaccactgtaatgataatctttctcacgtatatacatgcaacttcttggcttcatttccatgaagctgtttcaatatattcagtatactttgtccttaatgctgcttctgttaacagtgatctctttctttttttcattcttatatcttcattagttcatcataaatctgtccagttgaggcctcaggaccacggcatgatttcatgactccgaagtattttacagaaacattttttaaataagggaaatattttatataccagatggttcacaagtgatggctcatagctagnnnnnnnnnnnncttctaaaaaatgtcaggtttttaaaatcatttaccttattaaaatgaaaagtgccatacttaacttttaaaggaaagacctgacttgctttttctctatttagactgtttttgtactttactaatctttaaactatcaggaaaaaaaccgaaacttta

SEQ ID NO: 192793 - DNA, 962 bp, Homo Sapiens
cttttccataaaaggcaactttgtacaaaaaagttggcagggttgttacgaagctgcaggagcgagatggaggtggacgcaccgggtgttgatggtcgagatggtctccgggagcggcgaggctttagcgagggagggaggcagaacttcgatgtgaggcctcagtctggggcaaatgggcttcccaaacactcctactggttggacctctggcttttcatccttttcgatgtggtggtgtttctctttgtgtattttttgccatgacttgttcgctgatatctaaattaagaagttggttcttgagtgaattctgaaaatggctacaaacttcttgaataaagaagacaggactctcaatagaagaatttcacatctccaagggacccttcctttcattttacactttgttactaatttgcagaactctattaattgggtaggatttcacccattcctagctaagttcttaaaattaaaccctttggttcgtgtttaaaaactttcaaacatctgatggctttacaggggctgaatataaaagcatttgtacttaaaggtcttgtgtattcattaagaaatatagtaatgtcttttaatgttttaagagttgatcagggtttactatgatgcaagtaataggatgattaataagggaaggtttttatgaattcaaaagtcaattattcaaaagcagggaaagattttgagagagggaacaaagtattcttagattgcgtagaagctgctaggttccagttttaatttttaggtttagttggactctgttatgaaaagataggttatgggtgggcgacaggttgatacagtcttagaaaaagcaggtaatatcaaagtattggaaagctagcatgcatgccctcttacctgggtatcttcccccttttttccttttaaactcttgaacccctataacgaagggattatgtgtttcaaaccta

SEQ ID NO: 192794 - DNA, 1763 bp, Homo Sapiens; identical to SEQ ID NO: 185279

SEQ ID NO: 192795 - DNA, 1705 bp, Homo Sapiens; identical to SEQ ID NO: 185280

SEQ ID NO: 192796 - DNA, 867 bp, Homo Sapiens; identical to SEQ ID NO: 180575

SEQ ID NO: 192797 - DNA, 1509 bp, Homo Sapiens; identical to SEQ ID NO: 180577
  misc_feature (825)..(859): n is a, c, g, or t
  misc_feature (949)..(1012): n is a, c, g, or t

SEQ ID NO: 192798 - DNA, 1753 bp, Homo Sapiens; identical to SEQ ID NO: 185282
  misc_feature (320)..(334): n is a, c, g, or t

SEQ ID NO: 192799 - DNA, 1009 bp, Homo Sapiens
ttggcaaaaaattgtactgtgtactgtggaggaattgcgtctgggttaacagatcagcttatgagacagacattctcaccatttggacaaattatggaaataagagttttcccagaaaagggctattcatttgtcagattttcaacccatgaaagtgcagcccatgccattgtttcggtgaacggtactacgattgaaggacatgtggttaaatgctattggggtaaagaatctcctgatatgactaaaaacttccaacaggttgactatagtcaatggggccaatggagccaagtgtatggaaacccacaacagtatggacagtatatggcaaatgggtggcaagtaccgccttatggagtatacgggcaaccatggaatcaacaaggatttggagtagatcaatcaccttctgctgcttggatgggtggatttggtgctcagcctccccaaggacaagctcctccccctgtaatacctcctcctaaccaagccggatatggtatggcaagttaccaaacacagtgagccgggactctaaaaaaaattgtaattcatgataggcttcgatttcctgtgacactctgaagacatgaaagtagacatcggaaaatgaaaatatttattttaaaaattgaaatgtttggaacctttagcacagatttgctttggtgaaggacacgtgtcttctagttctgcctttttaagtttttgttcatgatggatatgaacatgatttttctttatgtacaaaaactaaaataaagtcaataaagacaattctgactacaaattttgatataataggaaaaatggctaatacattttgattcttagatactattccatttttatcttgctgttcagtattttaactcactgtgtttttaaaagagcaaaaaagggagggatcgtgaaaacctgggaatcacatataagttcatcctgaatcctgatactcccctccccttccctgacgtggaccacatttgaagtcagcagagaaaaa

SEQ ID NO: 192800 - DNA, 950 bp, Homo Sapiens
gtagctttcgtgttcgtatacaggaggcatcactgcattgatgagcagagagcggaagcccccactctctagaaagtccagggcgtggatggtggctcccccaggggagcagacattgtccttaagctggcatggatggtgctccgagtccagcagcatcttggcagctcccagcaaagcctgggccccgagttggattgccaggcgccgtggcaaacccatcttcaccccaccatcagccaatgcgtccagagccatgaatgcataggcaggcccgctgccactgagccccgtgacggcatcgatgaggtcctcttccacctcagtgcagaagcccacgctgctcatgagctgctccaggagctgcccatcctccaccagggcatgggtgcccgtggcgtacactgtagcgccttcctgcactaccacaggtgtgttggtcatgcagcgaatcactttgggggctggctggaatgccatcagcttcttctccacagagctgatggtgacaccagccgcacaggagaccacgatgtgtctggcttgcacgtcggccccaatctcatccaggatgaaggggatgatatgtggcttcacagccagaaacaggacgtcgctgtgcttcaccgtctccttgttgctgcgtgtcaggttcacacccatcttcctgagcgcggacaccgtgggcaggttcatttctggggagctggctattatcttgtgagccgacaggatgcctgcggccgtgaagccccgcgccagagcataggccagctggccggccccgatgaagcccacgctcatggtccgcggttcacgcctcctgggagccgcacgaaccccctcagcgagggaccggaagtaacgctaggggaagggcggacagcgcaggggcgaacgggcggcgtgccgaggaccggcgagctaacagcagcttctgggatggccaa

SEQ ID NO: 192801 - DNA, 886 bp, Homo Sapiens; identical to SEQ ID NO: 180581

SEQ ID NO: 192802 - DNA, 1485 bp, Homo Sapiens
tgtggcccttttcacaagggaaggagaggtttgtccatgaataaagggcagggaggggccgggagggggcgagggatcccacctttggtgagccttcacagagggggtccttgacctttgctctcaggaaggagcccgtgccagaagatactggagtaggagtgggtgaagaccctccgggctcccgagctcttagaggaaggtggtcctgacatggtttgggagcagagaagaaaggaggttgaggttggggaatccacccctgttctgggctgggaagcacttgcagaccacagagatttccagtgggaagtgatgtggcccctccctggctatgtccctggctggcccctgcgctgatcagagccacagaaagtgggccactttggggaccccctagtccccctagtgacaagagaagagaaggtggtggcaggatggtggtcaggcaggacgtgtcaatccttgcccgctggggccaggctgcgggggagcagcttggtgtggccagaaggcgacagagcggtccctgcaggggagtccagcttcaccttgtccaggatggtcttcttgatggcggctggtgacacctgctcctggtcagccatggactgcagctcccgtgtgcggatgcaggaggcctccacagcgttgatgagcagggagcggaagcccccactctccagcacatgcaaggcatggatggtggccccaccaggagagctgacgttgtccttgagctggcctgggtgctgttctgagtgcagcagcatcttggcagcccccaggagggcctgggccccgaggcggactgccaggcgccttggaagtcccatcttcacacccccatcagccagggcatccagggctgtgaatgcgtaggcggggccgctgccactgagccccgtgacggcatcaatcaggtcctcttccacctccgtgcagaagcccacgctgctcagcagctgctccatgagcctcccgtcctccacctgggcgtgcgtgcctgtggcatacacggtggccccctcccgcaccacgactggagtgttggtcatgcagcggatgaccctgggggctggccgaaacgctgacagcttcttctcaatggagctgatggtgacgccggccgcgcaggacaccacaatgtgtctgtcctcaatgtcggcgcctatttcatccaggatgaaggggatgatgtgtggcttcacagccaggaagagcacatcactgtgctgcaccgtctccttgttgtggggtgtcaacttcacccccatcttcctgagagcagaaactgtggccaggtccatgtctggggagctagccattatcttgtgggcagccaagacgcctgctgctgtgaagcccttggccagggcaaaagccagctggccagcgccgatgaagcccacgctcatgctgtccggagacccctggcccaaagcccccacagatggcaccggctcgtgcgggggtcgtacccaa

SEQ ID NO: 192803 - DNA, 1197 bp, Homo Sapiens
actttgtacaaaaaagttggcctcatcactgttcctgtgctcacagtcatcaattatagaccccacaacatgcgccctgaagacagaatgttccatatcagagctgtgatcttgagagccctctccttggctttcctgctgagtctccgaggagctggggccatcaaggcggaccatgtgtcaacttatgccgcgtttgtacagacgcatagaccaacaggggagtttatgtttgaatttgatgaagatgagatgttctatgtggatctggacaagaaggagaccgtctggcatctggaggagtttggccaagccttttcctttgaggctcagggcgggctggctaacattgctatattgaacaacaacttgaataccttgatccagcgttccaaccacactcaggccaccaacgatccccctgaggtgaccgtgtttcccaaggagcctgtggagctgggccagcccaacaccctcatctgccacattgacaagttcttcccaccagtgctcaacgtcacgtggctgtgcaacggggagctggtcactgagggtgtcgctgagagcctcttcctgcccagaacagattacagcttccacaagttccattacctgacctttgtgccctcagcagaggacttctatgactgcagggtggagcactggggcttggaccagccgctcctcaagcactgggaggcccaagagccaatccagatgcctgagacaacggagactgtgctctgtgccctgggcctggtgctgggcctagtcggcatcatcgtgggcaccgtcctcatcataaagtctctgcgttctggccatgacccccgggcccaggggaccctgtgaaatactgtaaaggtgacaaaatatctgaacagaagaggacttaggagagatctgaactccagctgccctacaaactccatctcagcttttcttctcacttcatgtgaaaactactccagtggctgactgaattgctgacccttcaagctctgtccttatccattacctcaaagcagtcattccttagtaaagtttccaacaaatagaaattaatgacactttggtagcactaatatggagattatcctttcattgagccttttatcctctgttctcctttgaagaactctctcactgtcaccttctcgagaataccctaagaccaataaatacttcagtaatttc

SEQ ID NO: 192804 - DNA, 923 bp, Homo Sapiens
tttgtacaaaaaagttgggttcctgtgcccacagtcatcaattatagaccccacaacatgcgccctgaagacagaatgttccatatcagagctgtgatcttgagagccctctccttggctttcctgctgagtctccgaggagctggggccatcaaggcggaccatgtgtcaacttatgccgcgtttgtacagacccatagaccaacaggggagtttatgtttgaatttgatgaagatgagcagttctatgtggatctggataaaaaggagaccgtctggcatctggaggagtttggccgagccttttcctttgaggctcagggcgggctggctaacattgctatattgaacaacaacttgaataccttgatccagcgttccaaccacactcaggccgccaatgatccccctgaggtgaccgtgtttcccaaggagcctgtggagctgggccagcccaacaccctcatctgccacattgacaggttcttcccaccagtgctcaacgtcacatggctgtgcaatggggagccagtcactgagggtgtcgctgagagcctcttcctgcccagaacagattacagcttccacaagttccattacctgacctttgtgccctcagcagaggacgtctatgactgcagggtggagcactggggcttggaccagccgctcctcaagcactgggaggcccaagagccaatccagatgcctgaaacaacggagactgtgctctgtgccctgggcctggtgctgggcctagtgggcatcatcgtgggcaccgtcctcatcataaagtctctgcgttctggccatgacccccgggcccaggggcccctgtgaaatactgtaaaggtgacaaatatctgaacagaagaggacttatgagagatctgaactccagctgccctacaaactccgtcaca

SEQ ID NO: 192805 - DNA, 949 bp, Homo Sapiens
ttggaccgcggaggcctacgtcggacccggaggccctgaatgccccatgcgcaccccacagctcgcgctcctgcaagtgttctttctggtgttccccgatggcgtccggcctcagccctcttcctccccatcaggggcagtgcccacgtctttggagctgcagcgagggacggatggcggaaccctccagtccccttcagaggcgactgcaactcgcccggccgtgcctggactccctacagtggtccctactctcgtgactccctcggcccctgggaataggactgtggacctcttcccagtcttaccgatctgtgtctgtgacttgactcctggagcctgcgatataaattgctgctgcgacagggactgctatcttctccatccgaggacagttttctccttctgccttccaggcagcgtaaggtcttcaagctgggtttgtgtagacaactctgttatcttcaggagtaattccccgtttccttcaagagttttcatggattctaatggaatcaggcagttttgtgtccatgtgaacaactcaaacttaaactatttccagaagcttcaaaaggtcaatgcaaccaacttccaggccctggctgcagagtttggaggcgaatcattcacttcaacattccaaactcaatcaccaccatctttttacagggctggggaccccattcttacttacttccccaagtggtctgtaataagcttgctgagacaacctgcaggagttggagctgggggactctgtgctgaaagcaatcctgcaggtttcctagagagtaaaagtacaacttgcactcgttttttcaagaacctggctagtagctgtaccttggattcagccctcaatgctgcctcttactataacttcacagtcttaaaggttccaagaagcatgactgatccacgaatatgggagttccaggttcctgta

SEQ ID NO: 192806 - DNA, 1051 bp, Homo Sapiens
ttggattaggtccaagcgcccgcccagaggtaggcagtccgcgagcccagccgccgctgtcgccgccagtagcagccttcgccagcagcgccgcggcggaaccgggcgcaggggagcgagcccggccccgccagcccagcccagcccagccctactccctccccacgccagggcagcagccgttgctcagagagaaggtggaggaagaaatccagaccctagcacgcgcgcaccatcatggaccattatgattctcagcaaaccaacgattacatgcagccagaagaggactgggaccgggacctgctcctggacccggcctgggagaagcagcagagaaagacattcacggcatggtgtaactcccacctccggaaggcggggacacagatcgagaacatcgaagaggacttccgggatggcctgaagctcatgctgctgctggaggtcatctcaggtgaacgcttggccaagccagagcgaggcaagatgagagtgcacaagatctccaacgtcaacaaggccctggatttcatagccagcaaaggcgtcaaactggtgtccatcggagccgaagaaatcgtggatgggaatgtgaagatgaccctgggcatgatctggaccatcatcctgcgctttgccatccaggacatctccgtggaagagacttcagccaaggaagggctgctcctgtggtgtcagagaaagacagccccttacaaaaatgtcaacatccagaacttccacataagctggaaggatggcctcggcttctgtgctttgatccaccgacaccggcccgagctgattgactacgggaagctgcggaaggatgatccactcacaaatctgaatacggcttttgacgtggcagagaagtacctggacatccccaagatgctggatgccgaagacatcgttggaactgcccgaccggatgagaaagccatcatgacttacgtgtctagcttctaccacgccttctctggagcccagaaacggagacagcagccaatcgcatctgcaagtgttggccgtcaaccaggagaac

SEQ ID NO: 192807 - DNA, 2480 bp, Homo Sapiens; identical to SEQ ID NO: 185285
  misc_feature (2302)..(2337): n is a, c, g, or t

SEQ ID NO: 192808 - DNA, 2791 bp, Homo Sapiens; identical to SEQ ID NO: 185286

SEQ ID NO: 192809 - DNA, 1212 bp, Homo Sapiens; identical to SEQ ID NO: 185287
  misc_feature (804)..(839): n is a, c, g, or t
  misc_feature (990)..(998): n is a, c, g, or t

SEQ ID NO: 192810 - DNA, 1254 bp, Homo Sapiens; identical to SEQ ID NO: 180583
  misc_feature (819)..(943): n is a, c, g, or t

SEQ ID NO: 192811 - DNA, 2129 bp, Homo Sapiens; identical to SEQ ID NO: 185289
  misc_feature (1026)..(1081): n is a, c, g, or t

SEQ ID NO: 192812 - DNA, 2263 bp, Homo Sapiens; identical to SEQ ID NO: 185290
  misc_feature (360)..(408): n is a, c, g, or t

SEQ ID NO: 192813 - DNA, 1224 bp, Homo Sapiens; identical to SEQ ID NO: 185293
  misc_feature (366)..(391): n is a, c, g, or t
  misc_feature (393)..(437): n is a, c, g, or t
  misc_feature (757)..(801): n is a, c, g, or t
  misc_feature (805)..(820): n is a, c, g, or t

SEQ ID NO: 192814 - DNA, 1883 bp, Homo Sapiens; identical to SEQ ID NO: 185294
  misc_feature (171)..(205): n is a, c, g, or t
  misc_feature (207)..(231): n is a, c, g, or t

SEQ ID NO: 192815 - DNA, 819 bp, Homo Sapiens; identical to SEQ ID NO: 185295
  misc_feature (242)..(274): n is a, c, g, or t
  misc_feature (595)..(649): n is a, c, g, or t
  misc_feature (651)..(675): n is a, c, g, or t

SEQ ID NO: 192816 - DNA, 2914 bp, Homo Sapiens; identical to SEQ ID NO: 185298
  misc_feature (535)..(549): n is a, c, g, or t
  misc_feature (1544)..(1865): n is a, c, g, or t

SEQ ID NO: 192817 - DNA, 1066 bp, Homo Sapiens; identical to SEQ ID NO: 185300

SEQ ID NO: 192818 - DNA, 1263 bp, Homo Sapiens; identical to SEQ ID NO: 185301

SEQ ID NO: 192819 - DNA, 1222 bp, Homo Sapiens; identical to SEQ ID NO: 185302
  misc_feature (260)..(272): n is a, c, g, or t
  misc_feature (518)..(526): n is a, c, g, or t
  misc_feature (530)..(561): n is a, c, g, or t
  misc_feature (601)..(642): n is a, c, g, or t
  misc_feature (675)..(716): n is a, c, g, or t

SEQ ID NO: 192820 - DNA, 2303 bp, Homo Sapiens; identical to SEQ ID NO: 185303

SEQ ID NO: 192821 - DNA, 814 bp, Homo Sapiens
  misc_feature (250)..(269): n is a, c, g, or t
  misc_feature (665)..(679): n is a, c, g, or t
ttggccgccttctcttattttctgcccattgataaacctctccccatattttgcaaagaggaaattcacagcaaaagtccacattatgtcagctttctcatattgagagctctgctatgccactgttgaatttttcccaagattcctgtccctagccctcacttcaaactctgcttccttggacagatttggcaatagctttgtaagtgatgtggacataattgcctacaataatgaaaacctacaggannnnnnnnnnnnnnnnnnnnccccttaggcatatttagtatttttcccccaggcagatcattctgagtgtgcgagtgtgtgtgcacatgttacaaaggcaactaccatgttaataaaatattcaatttgaaatccttttcggtatttgaattgcttttgaataatgttttttatctggatgtaacattgttgcattagctttttaactttcccaagtaattgaatacattttattacttggacttttataaactctttccctacccactataaatgagacattcacagcgttcaagtttgtattaaaggaaaggattagtttgaccccttctcttgatggttaatgcatacatgcagttaaatccctttatgcaaatgtgacactgctttactaggtcttttagttatttatttannnnnnnnnnnnnnngccaatttatattgtaacatgatttcttgaaacacagtaagtttgttttaaaataaaagaacagcatactgtagtttttatagtaaagcgtaatggaaatggtacccctacagaaatttcattaacttgttaatt

SEQ ID NO: 192822 - DNA, 1248 bp, Homo Sapiens
ttgggttctgtttcggtaatagtgaggagggggtgttgtaacaaaattggacaacttaaaagaatggtgtgtgctgggtgaaagacaaagactaaagaatgaggaaacaaacgtgatgcctggccagtgactgtcatataaacctttcttatttgagctaggcttgaacagacgtgacctagaagaaactgaacataaagagaagggggtggggggctagttttcaagttggggaacctgatagtgaaaagtcacagatggagaaaattgctctcagaaaaactgtttggattgctttcctcttgttgcacatgtaccatgcatttctcagcttggggtactacattttgtggaaagttaatctatctatctttccacatctgaattaatcattctaggaaagaatacttattcctactcatttcctttatgatgtccaatcagtgttattcagtgctatgcctccttgtaatgggtagttattaattattttcagagctttccggaaatactgtcctaactggctatgtttaggatctttgttatctctgaagacaaagaaagaagctaggactcttaattttggggtgcttcttgactcttagttgggaaactgaaaatatttccaaccttttacccacgtcaatggcatattctgggaatcaccacaaccaccaccactaccaaacaaagaggctggaggctcctgtaccctgttcattccttaagggccctgcttcccttaataagtaagtaagttggtctacggccctaaatatgcaaatgagagctgaaggtttttaaaaggtagaaaggaaaagggcaagggcttccacccctgctttaaaatgatttatttattctctgcttgtatttcttgtggagagagtaaggatagaaccaacaaggggctgagtaactgagaaaggggccacccaagagtgaaacatactttataccaaaggagcagtggagcctcatgcatcacattatcatttgttatttgggtttaataataattttgacatcttttcactcatacacaaaaaaagtcccaactggtgttatttactgttgatttcatcctcctgtgtatgaaatagcaagcctataagaatgaactagtgctactgaactgtttaaattaattttgtgttaatagtacactttgagtatctttttccacattaaaaaactttctgtattataaatgtttttctctacatttatttaacaatgtacactgtt

SEQ ID NO: 192823 - DNA, 989 bp, Homo Sapiens
  misc_feature (796)..(819): n is a, c, g, or t
ttgggacacagtggttaaaaacagaaagttctgtttcgggaatagtgaggagggggtgttgtaacaaaattggacaacttaaaagaatggtgtgtgctgggtgaaagacaaagactaaagaatgaggaaacaaacgtgatgcctggccagtgactgtcatataaacctttcttatttgagctaggcttgaacagacgtgacctagaagaaactgaacataaagagaagggggtggggggctagttttcaagttggggaacctgatagtgaaaagtcacagatggagaaaattgctctcagaaaaactgtttggattgctttcctcttgttgcacatgtaccatgcatttctcagcttggggtactacattttgtggaaagttaatctatctatctttccacatctgaattaatcattctaggaaagaatacttattcctactcatttcctttatgatgtccaaatggttgcaggatcataatctattgtgccacctttatttctagaagtacaactaatatgttcacattttcaaataaataatactccccgtaagtaataactgcaaccaatcagtgttattcagtgctatgcctccttgtaatgggtagttattaattattttcagagctttccggaaatactgtcctaactggctatgtttaggatctttgttatctctgaagacaaagaaagaagctaggactcttaattttggggtgcttcttgactcttagttgggaaactgaaaatatttccaaccttttacccacgtcaatggcatattctgggaatnnnnnnnnnnnnnnnnnnnnnnnnagaaagaggctggaggctcctgtaccctgttcattccttaagggccctgcttcccttaataagtaagtaagttggtctacggccctaaatatgcaaatgagagctgaaggtttttaaaaggtaaaaaggaaaaagggcaagggcttccacccctgctttaaaatgattta

SEQ ID NO: 192824 - DNA, 1257 bp, Homo Sapiens; identical to SEQ ID NO: 185309

SEQ ID NO: 192825 - DNA, 1220 bp, Homo Sapiens
  misc_feature (69)..(79): n is a, c, g, or t
  misc_feature (1091)..(1099): n is a, c, g, or t
ccaactttgtacaaaaaagttggtaaacacattttcacaagtttttgagacactggatttctttaattnnnnnnnnnnntgccaagaaacattatttatacagggttgattgctttcatgttgttattctgtaccctatagtagcctccatgagaatctggtatttcttgctgcttggaactactttgcagtgattacttggttgcagtccaagtactctcgtttagtctgagcctggagatgttctagacttgcttctcccacctctgagattaggacaggaaaaatgtgaaatttcccaattacaggattatacggtaccatcacatcatttgtggaaattggggtgactgtatagctgggattgggctaaggactgtggtcttatctgtccacatacagccaaaatgcctatccagaaatccagttcgttggaaaggaaaattggtactcctgtgccacaggggttccagaaaagggaagtcactttaccttgcggtggtgggatcctgatgtctttcatccatttgtagtaaaagctggtaaagcttttcttactcctggttccctaccagtatttctaaacatgtcgcactttctccacaggcatgtggttttgacctttttttcaatcttctagaaagggaacggaagcagaagtgggacatcgagggctctgctgtcctctgcgctgggtgtggaatgctgctgcacctgtcccttctgctggctcagggaagtgtcttcttgcccacatttctgtggggaaaggtttttaatcctctgatgcttccatcttcctgtttaggccatgtgcccagaaacctggactgatctttctttaatagtgaacccctgggccactgaagagtaacatggctccactggacacaaaagagggatggaatcaacaggcagggggccttttataagccttaggaaaagaaaatgaaactatttcatctttggacttttcaatactattggagtgattttttttctttctaaacagggaaaataatgttacaaaagcatcttttttgttatttgtttgcatccctcccccacaccctggtgttttaaaatgaagnnnnnnnnnccatcaccttttgtacaaaaactcttaatgattaaaaaacaaacaaaacatattggccttgtcatttgtgtgaaagtgggcaaagactggaatagagtaagacaactgaaaccaattccaa

SEQ ID NO: 192826 - DNA, 1580 bp, Homo Sapiens
  misc_feature (151)..(214): n is a, c, g, or t
  misc_feature (1216)..(1225): n is a, c, g, or t
aaattgatgagcaatgcttttctataagggggcaactttgtacaaaaaagttggatttttttcctcagtaaaaggatgaaaattggtttcagttgtcttactctattccagtctttgcccactttcacacaaatgacaaggccaatatgtnnnnnnnnnnnnnnnnnnnnnnnnnnnnnnnnnnnnnnnnnnnnnnnnnnnnnnnnnnnnnnnnaaaacaccagggtgtgggggagggatgcaaacaaataacaaaaaagatgcttttgtaacattattttccctgtttagaaagaaaaaaaatcactccaatagtattgaaaagtccaaagatgaaatagtttcattttcttttcctaaggcttataaaaggccccctgcctgttgattccatccctcttttgtgtccagtggagccatgttactcttcagtggcccaggggttcactattaaagaaagatcagtccaggtttctgggcacatggcctaaacaggaagatggaagcatcagaggattaaaaacctttccccacagaaatgtgggcaagaagacacttccctgagccagcagaagggacaggtgcagcagcattccacacccagcgcagaggacagcagagccctcgatgtcccacttctgcttccgttccctttctagaagatgaaaaaaaggtcaaaaccacatgcctgtggagaaagtgcgacatgtttagaaatactggtagggaaccaggagtaagaaaagctttaccagcttttactacaaatggatgaaagacatcaggatcccaccaccgcaaggtaaagtgacttcccttttctggaacccctgtggcacaggagtaccaattttcctttccaacgaactggatttctggataggcattttggctgtatgtggacagataagaccacagtccttagcccaatcccagctatacagtcaccccaatttccacaaatgatgtgatggtaccgtataatcctgtaattgggaaatttcacatttttcctgtcctaatctcagaggtgggagaagcaagtctagaacatctccaggctcagactaaacgagagtacttggactgcaaccaagtaatcactgcaaagtagttccaagcagcaagaaataccagattctcatggaggctactatagggtacagaataacaacatgaaagcaatcaaccctgtataaataatgtttcttggcannnnnnnnnnaattaaagaaatccagtgtctcaaaaacttgtgaaaatgtgtttaaaaaacaaacggccagtgagcctgctacaccattttgcccatatgcctattgtaacttctgatgtcaagagacaatgcaaaagcctctgttttcacaggccctattatattaactctgacttacaactgtacctctctagagaaaaaacagaaaataaggaacaaagggaaggcagttttactagtgagaagatgcaaatcaaaagcaaactggaaagcaagagcaatagtaagggtgagatgagggactggagttgagactgcttgagaaatctggctgtgtagctttggtttgggggactgaggccaa

SEQ ID NO: 192827 - DNA, 409 bp, Homo Sapiens
  misc_feature (210)..(236): n is a, c, g, or t
ctttgtacaaaaaagttggttttttatctgggctgatgaatacatttacctaagaaactcatttcgttttacttaagaggggaagtgcagttttcttttggcagttcagaatccaagcacttgatttgctgggtttggaaaactccttttttggccttctatgtgcttagccataacaattccattaagcaagaaggtaagcaaaagacnnnnnnnnnnnnnnnnnnnnnnnnnnncttgcactggctggtctcacttacgaaacatgtcggagctgtttgcctgggtggggctgggtaccgtacctgtcaatgcctgtgattttcataattagcacgtacataaagaagtacattctgttcaggtgataactgagcctcaatcaagcagaaactttttgcttgaaatt

SEQ ID NO: 192828 - DNA, 927 bp, Homo Sapiens
actttgtacaaaaaagttggctcagatgtcagcagcgaatcctctgacagctccgaggaactttctcccacggccaagtttacctccgaccccattggcgaagttttggtcagctcgggaaaattgagctcctctgtcacctccacgcctccatcttctccggaactgagcagggaaccttctcaactgtggggttgcgtgcccggggagctgccctcgccagggaaggtgcgcagcgggacttcggggaagccaggtgacaagggaaatggcgatgcctcccccgacggcaggaggagggtgcaccggtgccactttaacggctgcaggaaagtttacaccaaaagctcccacttgaaagcacaccagcggacgcacacaggagaaaagccttacagatgctcatgggaagggtgtgagtggcgttttgcaagaagtgatgagttaaccaggcacttccgaaagcacaccggggccaagccttttaaatgctcccactgtgacaggtgtttttccaggtctgaccacctggccctgcacatgaagaggcacctctgagggagcagagaggtggatcctgtaggctaaaaggcttccaggctgagagccggccgtggaaggagggatgcgtgttccagccaaagcatgccgttctgcaccctacccagttgcctccagggcctctccttggaaggtcttttgagggctaaaaaggtcctgtaagaagcggcatagcacccgtggtgcatggtatgtgggtgaccctggactcgccactggtacccgcccttcctagcggcgcctaagcctttgccgtgagcatgcacactgagaatgctaatggttgggttgattgtatgttgaggatctatttactgaacgtatgatgaaggcccacttttttttcttgtggtttagcaagactgc

SEQ ID NO: 192829 - DNA, 1382 bp, Homo Sapiens
ccaactttgtacaaaaaagttgggcaaatattgtgtgggctccgcgcgctgcgggctgcgggagggtccggccgggcgtctctgcgagcctggagtttgcatgaaactttcacctgcgctccggggagactttcggctccggctcccaccgcgcgcctcgccgccctcgcgaccgcgggctccgtccaacccggcccgacatggacgtgctccccatgtgcagcatcttccaggagctccagatcgtgcacgagaccggctacttctcggcgctgccgtctctggaggagtactggcaacagacctgcctagagctggaacgttacctccagagcgagccctgctatgtttcagcctcagaaatcaaatttgacagccaggaagatctgtggaccaaaatcattctggctcgggagaaaaaggaggaatccgaactgaagatatcttccagtcctccagaggacactctcatcagcccgagcttttgttacaacttagagaccaacagcctgaactcagatgtcagcagcgaatcctctgacagctccgaggaactttctcccacggccaagtttacctccgaccccattggcgaagttttggtcagctcgggaaaattgagctcctctgtcacctccacgcctccatcttctccggaactgagcagggaaccttctcaactgtggggttgcgtgcccggggagctgccctcgccagggaaggtgcgcagcgggacttcggggaagccaggtgacaagggaaatggcgatgcctcccccgacggcaggaggagggtgcaccggtgccactttaacggctgcaggaaagtttacaccaaaagctcccacttgaaagcacaccagcggacgcacacaggtcagtgcccacgcgggccccggagggcggccgctggtgggcgccactgcattgcaccagccctggagggagccgggcctggctgcacaggatgtggtcagggcagacaaatcctcacttcctcagatgttttccaccaaagcattaggtctttttggagttcagagtagaatcctaaagactggacttttgagttggataaatgtgtaacaattttcagattaaacaaacaagagactagatccttttctccacggacacccaaacctccaccccccaccccttagtagtgctggggatccgaggccactgccccttcaccagtgcactcgcacgagctacctcgagcggccctggggtttcctaaatgaaactcaagggtcaagacagagagtagctgggcacagcggaagcgtgtgggtttgatgctgacggcccgaggcccgagtgggaactggcctgctctgtagcagcagcattgatcagcgagtgtttcctgaaaactt

SEQ ID NO: 192830 - DNA, 1405 bp, Homo Sapiens; identical to SEQ ID NO: 180589
  misc_feature (421)..(429): n is a, c, g, or t
  misc_feature (540)..(617): n is a, c, g, or t
  misc_feature (1212)..(1221): n is a, c, g, or t

SEQ ID NO: 192831 - DNA, 1393 bp, Homo Sapiens; identical to SEQ ID NO: 180590
  misc_feature (528)..(605): n is a, c, g, or t
  misc_feature (1200)..(1209): n is a, c, g, or t

SEQ ID NO: 192832 - DNA, 1338 bp, Homo Sapiens; identical to SEQ ID NO: 185315
  misc_feature (99)..(144): n is a, c, g, or t
  misc_feature (234)..(249): n is a, c, g, or t
  misc_feature (251)..(261): n is a, c, g, or t

SEQ ID NO: 192833 - DNA, 995 bp, Homo Sapiens; identical to SEQ ID NO: 185316

SEQ ID NO: 192834 - DNA, 1068 bp, Homo Sapiens
gtgcagtcaaactgaaaaaccatgtggttggtgaaggtgtgtttggtgcagcggatgacatactccgtctctgactcggtgagggccacgggctcaggcgaggacttgaagaggggcccaagaccgcggaactctggcactgctgccaactgctcctggaagatctcctgcctggtagctgccactttctcaggctgtttgactgctgtgatgggggtactttctgttctctgctctgccatgggcgccgtggccaggggcacagacttgaggtcaaaaggtttttctgatggttctagagtgtactgctgcagagccctctccagaccagggatggacacagtcagaccatttaggatatagcctgcattaagggccttctgcttctgctccaggacatttaggtagaaggtggctcggtcccttacttcattgtcatcatccatcacacacctcttcagcaacaccaagatactgggtaacatctcttcattctgggctccaaacttcgccagagcactcacagcacctgcccggacctcctcatgctccaagaccactcggttatagatgaagcggatgtactttgagggattggtggtcttgggcccctcctggcccaggagatgtagaatacgggtggccagcactgtgaactcgcagtcctcgatgaactcgcacagatgtgacagccctgtctccttgctctctgagttctcttcaatgatgctgatgatgcagtccacgatagcgcgcttatactcaaagccaccctcttcccgcagcatggtgaacaggaagttcataaggacggcgtgtttgcgaggatatttctgacacagggcactgatggcctggacaaccaccaccttgaattcatccgagatttctgacatgaaggaggagatctgcttcatgaggcggtcgatgctgctctcgctgcccgtcttaaggagggtggtgatggccagcgtggcaatgctgcggtttgaatctgtgaccaggttctccagatccagattacaagctgtcacagctgacggatgcttcatggcaaccttattccaa

SEQ ID NO: 192835 - DNA, 1078 bp, Homo Sapiens; identical to SEQ ID NO: 180596
  misc_feature (100)..(116): n is a, c, g, or t

SEQ ID NO: 192836 - DNA, 1502 bp, Homo Sapiens
ttggcgagtttcctgtttaagatggcgtcccccgtagcagcgcaggccgggaagcttctgcgagccctagcgctgcggccccgcttcctggcggccgggtcccaggcagttcaattaacctccagaagatgggaacctgcaggaataccagagcaagaaactgatgtctgacaacggagtgagagttcaaagattctttgtagcagacactgcaaatgaagctctcgaggctgctaagagactaaatgcaaaagaaattgttttaaaagcccagatcttagctggaggaagaggaaaaggtgtcttcaatagtggtttgaaaggaggtgttcatttaacaaaagaccctaatgttgtgggacagctggctaaacagatgattgggtacaatctagcgacaaaacaaactccaaaagaaggtgtgaaagttaacaaggtgatggttgctgaagccttggatatttccagagaaacctacctggcaattctgatggaccggtcctgcaatggccccgtgctggtgggcagcccccaggggggcgtcgacattgaagaggtggctgcttcaaacccggagctcatttttaaggagcaaattgacatttttgaaggaataaaggacagccaagctcagcggatggccgaaaatctaggcttcgttgggcctttgaaaagccaggctgcagatcaaattacgaagctgtataatctcttcctgaaaattgatgctactcaggtggaagtgaatccctttggtgaaactccagaaggacaagttgtctgttttgatgccaagataaactttgatgacaacgcagaattccgacaaaaagacatatttgctatggacgacaaatcagagaatgagcccattgaaaatgaagctgccaaatatgatctaaaatacataggactagatgggaacattgcctgctttgtgaatggtgctgggctcgccatggctacttgtgatatcattttccttaatggtgggaagccagccaacttcttggatcttggaggtggtgtaaaggaagctcaagtatatcaagcattcaaattgctcacagctgatcctaaggttgaagccatccttgtcaatatatttggtggtatcgtcaactgtgccatcattgccaatgggatcaccaaagcctgccgggagctagaactcaaggtgcccctggtggtccggcttgaaggaaccaacgtccaagaggcccagaagatactcaacaacagcggactccccattacttcagccattgacctggaggatgcagccaagaaactgtggccagtgtggccaagaaagtgatgtctttgtcctgatccaatggagaaagaaagccatttttccataaaaagggatggttcatcattgtgaaagaaatggttatctcattggggaagaaacggggagggggaacgcaagaatcactgaaaaatcttaaatctgtgttttctggataagatatctagacagcctaaatctgatttta

SEQ ID NO: 192837 - DNA, 1903 bp, Homo Sapiens; identical to SEQ ID NO: 180599
  misc_feature (115)..(126): n is a, c, g, or t

SEQ ID NO: 192838 - DNA, 1115 bp, Homo Sapiens; identical to SEQ ID NO: 185320

SEQ ID NO: 192839 - DNA, 1043 bp, Homo Sapiens; identical to SEQ ID NO: 185321
  misc_feature (89)..(102): n is a, c, g, or t

SEQ ID NO: 192840 - DNA, 1789 bp, Homo Sapiens; identical to SEQ ID NO: 185323

SEQ ID NO: 192841 - DNA, 2253 bp, Homo Sapiens; identical to SEQ ID NO: 185324

SEQ ID NO: 192842 - DNA, 833 bp, Homo Sapiens; identical to SEQ ID NO: 185325

SEQ ID NO: 192843 - DNA, 1057 bp, Homo Sapiens; identical to SEQ ID NO: 185329

SEQ ID NO: 192844 - DNA, 1401 bp, Homo Sapiens; identical to SEQ ID NO: 185331
  misc_feature (1208)..(1236): n is a, c, g, or t

SEQ ID NO: 192845 - DNA, 1844 bp, Homo Sapiens; identical to SEQ ID NO: 185332

SEQ ID NO: 192846 - DNA, 926 bp, Homo Sapiens
  misc_feature (851)..(880): n is a, c, g, or t
caaaagctcttcaccagcatcttaaatacagcgagagtcagtagtgcttacaaaaagtagagggttctcttctagggaatcagaaaattatcaaaataaggcacagcctgttgttatcacagatttgtgttaggcagtagtgtttttttctggaaggcataagttggaatctgattacccaaaggtttaaaatgtggttctgaaaataatgccaaatgacaagggtaactaactgggagtaatggcaattaattagtgacaacattacatctagattatagcactctggaacttaagaaggcctcttcatcagcccatacgtaaatctgtaaaggcactgtgcaaaatgtggacggggccggccttctaatttggagtgcatattaaaaaacaaaggcacgtttcctagaaattcaactttacattaacacaaaaaaaattttagagataacagtaggtaagcttgataatatagcaggttctaagtcaaaagtcttgaagaggtttcttgaacagcagttttgagttccgctggttcttcatgaagagacaacccacacgatgatgatgatgatgaagataaccagaacagtaatcccgattgcccacatcttgcaattcttccaccaatatttcctcttcaacttggctgcgctcgtttcaaattgagaagcgcctgcctgcagtgcgtctgcacggtcgtctaactcagagagcttctggtctctttccagaaccttgtccacgttaactcgcattatgtccaccacctcatctacttgattttgtgtctgctgaagtcttcgattactgccagtggcagcagttggacctgtagacattttggcagnnnnnnnnnnnnnnnnnnnnnnnnnnnnnngtcagcagagaagcgaagttgggaccggaggccagggagatgccaa

SEQ ID NO: 192847 - DNA, 945 bp, Homo Sapiens
actttgtacaaaaaagttggctcagcagcagaagcaggagccgctgggcagcgactccgaaggtgttaactgtctggcctatgatgaagccatcatggctcagcaggaccgaattcagcaagagattgctgtgcagaaccctctggtgtcagagcggctggagctctcggtcctatacaaggagtatgctgaagatgacaacatctatcaacagaagatcaaggacctccacaaaaagtactcgtacatccgcaagaccaggcctgacggcaactgtttctatcgggctttcggattctcccacttggaggcactgctggatgacagcaaggagttgcagcggttcaaggctgtgtctgccaagagcaaggaagacctggtgtcccagggcttcactgaattcacaattgaggatttccacaacacgttcatggacctgattgagcaggtggagaagcagacctctgtcgccgacctgctggcctccttcaatgaccagagcacctccgactaccttgtggtctacctgcggctgctcacctcgggctacctgcagcgcgagagcaagttcttcgagcacttcatcgagggtggacggactgtcaaggagttctgccagcaggaggtggagcccatgtgcaaggagagcgaccacatccacatcattgcgctggcccaggccctcagcgtgtccatccaggtggagtacatggaccgcggcgagggcggcaccaccaatccgcacatcttccctgagggctccgagcccaggtctaccttctctaccggcctggacactacgatatcctctacaaaaaaggctggctccagcccgctgctgccctgctgccccctctgccaagcgctaacatgtacaaaggtttttctgggtggaaaaggtcctatttcaccccttctctggtcacatgaccccccccatgtttt

SEQ ID NO: 192848 - DNA, 978 bp, Homo Sapiens
  misc_feature (740)..(749): n is a, c, g, or t
ctttgtacaaaaaagttggcaaggacctccacaataaaagtactcgtacatccgcaagaccaggcctgacggcaactgtttctatcgggctttcggattctcccacttggaggcactgctggatgacagcaaggagttgcagcggttcaaggctgtgtctgccaagagcaaggaagacctggtgtcccagggcttcactgaattcacaattgaggatttccacaacacgttcatggacctgattgagcaggtggagaagcagacctctgtcgccgacctgctggcctccttcaatgaccagagcacctccgactaccttgtggtctacctgcggctgctcacctcgggctacctgcagcgcgagagcaagttcttcgagcacttcatcgagggtggacggactgtcaaggagttctgccagcaggaggtggagcccatgtgcaaggagagcgaccacatccacatcattgcgctggcccaggccctcagcgtgtccatccaggtggagtacatggaccgcggcgagggcggcaccaccaatccgcacatcttccctgagggctccgagcccaaggtctaccttctctaccggcctggacactacgatatcctctacaaatagggctggctccagcccgctgctgccctgctgcccccctctgccaggcgctagacatgtacagaggtttttctgtggttgtaaatggtcctatttcacccccttcttcctgtcacatgannnnnnnnnnatgttttattaaagggggtgctggtggtgagccgtgtgtgcgtgtccctgctctgctgcccgcctggctgctctgtctgctgccccctccccccaggtgggtccccctgcttttcacctatctactcctgagcttccccaacaggagcaggtttgaggggccagggcctcttggaggcccctcctgcttcgttgggttctgcttccttctcttcttagctggctcaggg

SEQ ID NO: 192849 - DNA, 2105 bp, Homo Sapiens; identical to SEQ ID NO: 185335
  misc_feature (937)..(1070): n is a, c, g, or t

SEQ ID NO: 192850 - DNA, 1368 bp, Homo Sapiens
  misc_feature (263)..(390): n is a, c, g, or t
agctttaggtataacactgacatcttttgaaaaacgtgttagtaaatactcaagttctggcctcatttcctgatgtatgaagcatggaagcagtgctgtcctgtggagattgcttttgcaccaactacacaggaaggtccttgacctctaagcatgcctttagaggttagaattcacagaaaacaaattcaattgtcaaacacctgttcctaattttgtgcaaagcaatacaacatagcacaactccatttgttgtttttcgnnnnnnnnnnnnnnnnnnnnnnnnnnnnnnnnnnnnnnnnnnnnnnnnnnnnnnnnnnnnnnnnnnnnnnnnnnnnnnnnnnnnnnnnnnnnnnnnnnnnnnnnnnnnnnnnnnnnnnnnnnnnnnnnccacctccatttattaggctatctcatgcaaacttaaaattaaaaaaataatcccaggccccaatgtagatcatgaacctacttaagactcattatggtaaaaacaaattcttacatttttctgtctttctaaaagtgtagtggttatggctaaagactaatcaacattacagatccaatctgttgtcaaagaacacaatttctgaccgggtaacaaaattgttctgataatctgacacatggccaagattctcagacaagaattaaaggcattcttttggattctgtcctttaataactttcagaggcttccagctcagtaaagacactgatcaaatcttggtaaaaatgggctcgtgtgcagactttaggtgatgttcttcagcaaattcaacaggccaaaggagtgtttgtcactgacagagctctcaccactcactggttctgtgccagttttccatagcctcctctcccagcatcgtagtcctgccgatactcatcccgaacctggcccccagatcgcccacggccgtattgcctgccctccttaaagcctgcgtcccagtctgtgcgaatgattcggtcatccagacgcgtcccatttatgtaccgcatggcgttttccgcatctgcgcgtgagtaatattccacaaaacagaatccacatgctgttttcttcattttatccagacccataatgattttctttatgtcaccacttttgctgaagagttcatagatttgttcttcagttgtgtaaaaagaaagatttccaacatataacgtacagcttttcttcagtaatttttcttgttcttcattgtcacccgtttctcagcgttcttgcccagggccttcccgtctcgcggcccggcctccctcacccggaagtgctggtcccggtactggctcagctccacgtaggagtcgctgcgcagcgccttcaggaggccacccgacatagtgcagagaagccaa

SEQ ID NO: 192851 - DNA, 626 bp, Homo Sapiens
ctttgtacaaaaaagttggctcacactcacctagccaccatggacatcgccatccaccacccctggatccgccgccccttctttcctttccactcccccagccgcctctttgaccagttcttcggagagcacctgttggagtctgatcttttcccgacgtctacttccctgagtcccttctaccttcggccaccctccttcctgcgggcacccagctggtttgacactggactctcagagatgcgcctggagaaggacaggttctctgtcaacctggatgtgaagcacttctccccagaggaactcaaagttaaggtgttgggagatgtgattgaggtgcatggaaaacatgaagagcgccaggatgaacatggtttcatctccagggagttccacaggaaataccggatcccagctgatgtagaccctctcaccattacttcatccctgtcatctgatggggtcctcactgtgaatggaccaaggaaacaggtctctggccctgagcgcaccattcccatcacccgtgaagagaagcctgctgtcaccgcagcccccaagaaatagatgccctttcttgaattgcattttttaaaacaagaaagtttccccaccagtgaatgaaa

SEQ ID NO: 192852 - DNA, 1901 bp, Homo Sapiens; identical to SEQ ID NO: 185338

SEQ ID NO: 192853 - DNA, 1185 bp, Homo Sapiens
ttgggacacttcggaggaagtggctgaattgataagacctgggattaaccagatgttgagagtaagggccagagggagctgtgtgggcttctgtgcttgaggctgcttggctgggagatggtagcagagataaaaataagtccctatgctgtccctttacatcagttaattcatttgtcctttgtcctccaacagtcccacaagccacaggctattctcctcatcttcatctggtactggtccatgcggctgcaggcccggggtggcccctcccctctgaagagcaactcagacagcgccaggctccccatcagctcgggcagcacctcgtccagccgcatctaggcctccagcccacctgcccatgtgatgaagcagagattcggcctcgtcgcacactgcctgtggcccccgagcccggcccagccccaggccagtcagccgcagactttggaaagcccaacgaccatggagagatgggccgttgccatggtggacggactcccgggctgggcttttgaattggccttggggactactcggctctcactcagctcccacgggactcagaagtgcgccgccatgctgcctagggtactgtccccacatctgtcccaacccagctggaggcctggtctctccttacaacccctgggcccagccctcattgctgggggccaggccttggatcttgagggtctggcacatccttaatcctgtgcccctgcctgggacagaaatgtggctccagttgctctgtctctcgtggtcaccctgagggcactctgcatcctctgtcattttaacctcaggtggcacccagggcgaatggggcccagggcagaccttcagggccagagccctggcggaggagaggccctttgccaggagcacagcagcagctcgcctacctctgagctcaggctccctctctccctcagctccccagtcctctctccatcttccctggggttctcctcctctcccagggcctccttgctccttcgttcacagctgggggtccccgattccaatgctgttttttggggagtggtttccaggagctgcctggtgtctgctgtaaatgtttgtctactgcacaagcctcggtctgcctctgagccaggctcggtactgatgcgtgggctgggctaggtctctctgtccatctgggcctttgtatga

SEQ ID NO: 192854 - DNA, 2129 bp, Homo Sapiens; identical to SEQ ID NO: 185340

SEQ ID NO: 192855 - DNA, 647 bp, Homo Sapiens
ctttgtacaaaaaagttggctggattttaacaaacacatgcatacacacaattaagagctcatgtcttagcaagatctgggaaaccaacattgcgagagtagctattttgaaagaataattctccagaagttaacatctaatatctagtatcaccaaacagtatcgctgttctcttttattcatttgaaatgaatataattatataactaacaattgtccaaatagatgagagagcaaatcatgtgagaaaattcagaataccatctgtttcatagccgcacagattttggactttcacaaacattgggaactaaatttagaattggcaaaagtctagaagatgggtatcaaaacagaagacattccaggagctagcaattttaagaggtgtccctccaaagtgacctgatggaagtcctgaacttggaaattaggttctactcacttggacatccctgcatcatggactgttgctgctccctgttccatatgctcgcaatctcagctatttggaagctaccaggaatgctttctaattatcatttgcaactagaactgtaatcagaaagaaattttgtatttttgtataacttgattgtgtgccattttatataacaggtcctgttttacaaataaattttgtttt

SEQ ID NO: 192856 - DNA, 874 bp, Homo Sapiens
ttgggggatatggcggatgacaaggattctctgcctaagcttaaggacctggcatttctcaagaaccagctggaaagcctgcagcggcgtgtagaagacgaagtcaacagtggagtgggccaggatggctcgctgttgtcctccccgttcctcaagggattcctggctggctatgtggtggccaaactgagggcatcagcagtattgggctttgctgtgggcacctgcactggcatctatgcggctcaggcatatgctgtgcccaacgtggagaagacattaagggactatttgcagttgctacgcaaggggcccgactagctctaggtgccatggaagaggcaggatgagcagctcagccttcaggtggagacactttatctggattccccagctgtcatccatttgctatctccaactttcctgccaccttcatccttgcctcccttcctgcagattgtggacagtagttcctcagcctgcaccctggattccttcttccccttcctagctccatgggactcgccccaagactgtggcttcaaggaccaccagccccttactcttcaagccctgactgtggagttggtagatgcctctgatcctcagtattctctctggcaatgttccacggcttctccttcctgggagctggctccataacttgattttccccaaacgtgttgcaatccctgctgccccttagccacccagggtcttgtgtgggtatgagtgtagaggatgggggtatgccaggcctgggccgtcccaggcagggcccgctggaccctgatgctactcctatccactgccatgtacggtgcccatgccccattgctggcactgtgccatgtggacggccgagtgcccttcc

SEQ ID NO: 192857 - DNA, 796 bp, Homo Sapiens; identical to SEQ ID NO: 185343
  misc_feature (371)..(409): n is a, c, g, or t

SEQ ID NO: 192858 - DNA, 1222 bp, Homo Sapiens; identical to SEQ ID NO: 185344
  misc_feature (837)..(890): n is a, c, g, or t

SEQ ID NO: 192859 - DNA, 1883 bp, Homo Sapiens; identical to SEQ ID NO: 185346

SEQ ID NO: 192860 - DNA, 1999 bp, Homo Sapiens; identical to SEQ ID NO: 185349
  misc_feature (104)..(140): n is a, c, g, or t
  misc_feature (943)..(1003): n is a, c, g, or t
  misc_feature (1051)..(1100): n is a, c, g, or t
  misc_feature (1850)..(1858): n is a, c, g, or t

SEQ ID NO: 192861 - DNA, 1261 bp, Homo Sapiens; identical to SEQ ID NO: 185350
  misc_feature (812)..(864): n is a, c, g, or t

SEQ ID NO: 192862 - DNA, 972 bp, Homo Sapiens
ttgggttgagggtttaaactagagtatgtgccacgtgacaacctaaatcagcttgcgttgtctttgtccacctttggtatgcagtctgaatctttaaatccgaaaaccttacaaattggaccggaaaacccttaagcagtagggtaacttggagctgtatcttaatttgctaatcaactgacttggaaataggataattcattttatgagctctttaaatgagtttatttgggaatatgcctatcattggaattgaaagcagcatagcttgcttcagtaactccaataatttgggaagcagaaatggaaaaagtaatttgagtcatgtttgcttatgtagtgccgtttaaaattcccctagtaattacctttcatattttattaactaggttaacatcaactgtggttgtaagagtaaatgtttcaccttaagataaacatgggcaatatattaaactctagtctgttttcttgcctgtgaagtgaggctgcacttgattatatttgattctttgttcgtaatacatgggaacgacagctaagtgtggtgaaaaacgcggggatccaaagagctggatttttatctcagatctgccgctaacttttgtatcctataggctacttttatttctatggtctcaatctataacatgaatgggttgggttaaatgactgaagttccttcaagtgctaaaattctttttctacagtcttcattggatttatgtatttcttattcctaatatgtttaactgggatgtctgtcactctagggcggcaagacagacatttaaaagtaacagtcacactgctgaactggcatttctgttaacacaaaagtttagaaaactcacggtaactgttacttgatttaagtgtacataaaattttcagtaaggctgcttttaaaaggaaccactgtccatttaaaggtttcatagttatcttcaatgggttagtattgtttggggc

SEQ ID NO: 192863 - DNA, 1021 bp, Homo Sapiens; identical to SEQ ID NO: 180609

SEQ ID NO: 192864 - DNA, 1863 bp, Homo Sapiens; identical to SEQ ID NO: 180610
  misc_feature (1346)..(1354): n is a, c, g, or t

SEQ ID NO: 192865 - DNA, 1505 bp, Homo Sapiens; identical to SEQ ID NO: 185355

SEQ ID NO: 192866 - DNA, 845 bp, Homo Sapiens
ttggggcgcgcgctcggacctctcccgccctgctcgttcgctctccagcttgggatggccggctacctgcgggtcgtgcgctcgctctgcagagcctcaggctcgcggccggcctgggcgccggcggccctgacagcccccacctcgcaagagcagccgcggcgccactatgccgacaaaaggatcaaggtggcgaagcccgtggtggagatggatggtgatgagatgacccgtattatctggcagttcatcaaggagaagctcatcctgccccacgtggacatccagctaaagtattttgacctcgggctcccaaaccgtgaccagactgatgaccaggtcaccattgactctgcactggccacccagaagtacagtgtggctgtcaagtgtgccaccatcacccctgatgaggcccgtgtggaagagttcaagctgaagaagatgtggaaaagtcccaatggaactatccggaacatcctgggggggactgtcttccgggagcccatcatctgcaaaaacatcccacgcctagtccctggctggaccaagcccatcaccattggcaggcacgcccatggcgaccagtacaaggccacagactttgtggcagaccgggccggcactttcaaaatggtcttcaccccaaaagatggcagtggtgtcaaggagtgggaagtgtacaacttccccgcaagcggcgtgggcatgggcatgtacaacaccgacgagtccatctcatgttttgcgcacagctgcttccagtatgccatccagaaaaaatggccgctgtacatgagcaccaagaacaccatactgaaagcctacgatgggcgtttcaagga

SEQ ID NO: 192867 - DNA, 1567 bp, Homo Sapiens; identical to SEQ ID NO: 185358
  misc_feature (271)..(279): n is a, c, g, or t
  misc_feature (389)..(422): n is a, c, g, or t
  misc_feature (1104)..(1162): n is a, c, g, or t

SEQ ID NO: 192868 - DNA, 2745 bp, Homo Sapiens; identical to SEQ ID NO: 180612
  misc_feature (2140)..(2153): n is a, c, g, or t
  misc_feature (2171)..(2230): n is a, c, g, or t
  misc_feature (2304)..(2413): n is a, c, g, or t
  misc_feature (2509)..(2521): n is a, c, g, or t

SEQ ID NO: 192869 - DNA, 1843 bp, Homo Sapiens; identical to SEQ ID NO: 185359

SEQ ID NO: 192870 - DNA, 928 bp, Homo Sapiens; identical to SEQ ID NO: 185360
  misc_feature (320)..(335): n is a, c, g, or t
  misc_feature (353)..(412): n is a, c, g, or t
  misc_feature (486)..(595): n is a, c, g, or t
  misc_feature (691)..(703): n is a, c, g, or t

SEQ ID NO: 192871 - DNA, 1433 bp, Homo Sapiens; identical to SEQ ID NO: 185365
  misc_feature (994)..(1032): n is a, c, g, or t
  misc_feature (1062)..(1070): n is a, c, g, or t

SEQ ID NO: 192872 - DNA, 2192 bp, Homo Sapiens; identical to SEQ ID NO: 185366
  misc_feature (2064)..(2098): n is a, c, g, or t

SEQ ID NO: 192873 - DNA, 870 bp, Homo Sapiens
  misc_feature (587)..(617): n is a, c, g, or t
ttggctgtaacatatatgaaaggcttctgggacttgaaatcaaatgtttgggaatggtgcccttggaggcaacctcccattttagatgtttaaaggaccctatatgtggcattcctttctttaaactataggtaattaaggcagctgaaaagtaaattgccttctagacactgaaggcaaatctcctttgtccatttacctggaaaccagaatgattttgacatacaggagagctgcagttgtgaaagcaccatcatcatagaggatgatgtaattaaaaaatggtcagtgtgcaaagaaaagaactgcttgcatttctttatttctgtctcataattgtcaaaaaccagaattaggtcaagttcatagtttctgtaattggcttttgaatcaaagaatagggagacaatctaaaaaatatcttaggttggagatgacagaaatatgattgatttgaagtggaaaaagaaattctgttaatgttaattaaagtaaaattattccctgaattgtttgatattgtcacctagcagatatgtattacttttctgcaatgttattattggcttgcactttgtgagtattcnnnnnnnnnnnnnnnnnnnnnnnnnnnnnnntgcataggacagacttaggagttttgtttagagcagttaacatctgaagtgtctaatgcattaacttttgtaaggtactgaatacttaatatgtgggaaacccttttgcgtggtccttaggcttacaatgtgcactgaatcgtttcatgtaagaatccaaagtggacaccattaacaggtctttgaaatatgcatgtactttatattttctatatttgtacctttgcatgtcttgttttgttatataaaaaaa

SEQ ID NO: 192874 - DNA, 3232 bp, Homo Sapiens; identical to SEQ ID NO: 185368
  misc_feature (2835)..(2860): n is a, c, g, or t
  misc_feature (2966)..(3042): n is a, c, g, or t

SEQ ID NO: 192875 - DNA, 583 bp, Homo Sapiens
ttgggtgagtggtttttcggatcatgtctggtggctccgcggattataacagagaacatggcggcccagagggaatggaccccgatggtgtcatcgagagcaactggaatgagattgttgataactttgatgatatgaatttaaaggagtctctccttcgtggcatctatgcttacggttttgagaagccttccgctattcagcagagagctattattccctgtattaaagatccaaaaggtaattctggcacttggagactatatgggagccacttgtcatgcctgcattggtggaacaaatgttcgaaatgaaatgcaaaaactgcaagctgaagcaccacatattgttgttggtacacccgggagagtgtttgatatgttaaacagaagatacctttctccaaaatggatcaaaatgtttgttttggatgaagcagatgaaatgttgagccgtggttttaaggatcaaatctatgagattttccaaaaactaaacactagtattcaggttgtgttgctttctgccccaatgccaactgatgtgttggaagtgaccaaaaaattcatgacagatccaattc

SEQ ID NO: 192876 - DNA, 2172 bp, Homo Sapiens; identical to SEQ ID NO: 180617

SEQ ID NO: 192877 - DNA, 892 bp, Homo Sapiens; identical to SEQ ID NO: 185371

SEQ ID NO: 192878 - DNA, 1052 bp, Homo Sapiens; identical to SEQ ID NO: 185374
  misc_feature (291)..(416): n is a, c, g, or t

SEQ ID NO: 192879 - DNA, 861 bp, Homo Sapiens
acaaaaaagttggcttttagctctgggcacctccagctcctgctcgccggacggctcccagggagagcagacgcgccagacgcgccaccctcggggcgccgacggtcacggagcatggggtcggcctttgagcgggtagtccggagagtggtccaggagctggaccatggtggggagttcatccctgtgaccagcctgcagagctccactggcttccagccctactgcctggtggttaggaagccctcaagctcatggttctggaaaccccgttataagtgtgtcaacctgtctatcaaggacatcctggagccggatgccgcggaaccagacgtgcagcgtggcaggagcttccacttctacgatgccatggatgggcagatacagggcagcgtggagctggcagccccaggacaggcaaagatcgcaggcggggccgcggtgtctgacagctccagcacctcaatgaatgtgtactcgctgagtgtggaccctaacacctggcagactctgctccatgagaggcacctgcggcagccagaacacaaagtcctgcagcagctgcgcagccgcggggacaacgtgtacgtggtgactgaggtgctgcagacacagaaggaggtggaagtcacgcgcacccacaagcgggagggctcgggccggttttccctgcccggagccacgtgcttgcagggtgagggccagggccatctgagccagaagaagacggtcaccatcccctcaggcagcaccctcgcattccgggtggcccagctggttattgactctgacttggacgtccttctcttcccggataagaagcagaggaccttccagccacccgcgacaggccacaagcgt

SEQ ID NO: 192880 - DNA, 1541 bp, Homo Sapiens; identical to SEQ ID NO: 185377

SEQ ID NO: 192881 - DNA, 1257 bp, Homo Sapiens; identical to SEQ ID NO: 185378

SEQ ID NO: 192882 - DNA, 979 bp, Homo Sapiens
acaaaaaagttggctccgtccgtgtacacacactcacacaaggacgccaaccccacctagatgcaaagcaggattcaaaagaacatctttgcgttttctaccggctccccatcatcgtactagggaggaagaagcgggtgagaaacaaaacttctttccattgtcctgcccgtttctgcggacttgttctgaggccgaggcacctctaagatactgatggctctgcagaggacccattcattgcttctgcttttgctgctgaccctgctggggctggggctggtccagccctcctatggccaggatggcatgtaccagcgattcctgcggcaacacgtgcaccctgaggagacaggtggcagtgatcgctactgcaacttgatgatgcaaagacggaagatgactttgtatcactgcaagcgcttcaacaccttcatccatgaagatatctggaacattcgtagtatctgcagcaccaccaatatccaatgcaagaacggcaagatgaactgccatgagggtgtagtgaaggtcacagattgcagggacacaggaagttccagggcacccaactgcagatatcgggccatagcgagcactagacgtgttgtcattgcctgtgagggtaacccacaggtgcctgtgcactttgacggttagatgccaccatgtagggattatcgcgagtggttgaccttacacttactccttaaatagcagtgagtaatgcatttgagctgtcccaggctctgtctcctcagctcatttcctactctttttctctatataactcattctattaaatacattgcaccaaagagatatggagacataaacctgtaatgaatgaggctgggcttttctgtaataagcttccttttataatactggtcagcttagctctctcaaatcctatcctgtggaaatttagttattatgtgtatttatgtagtatttcaaacattttcaaaatgctttc

SEQ ID NO: 192883 - DNA, 984 bp, Homo Sapiens; identical to SEQ ID NO: 185381

SEQ ID NO: 192884 - DNA, 948 bp, Homo Sapiens; identical to SEQ ID NO: 185383

SEQ ID NO: 192885 - DNA, 1651 bp, Homo Sapiens; identical to SEQ ID NO: 185385

SEQ ID NO: 192886 - DNA, 2188 bp, Homo Sapiens; identical to SEQ ID NO: 185386

SEQ ID NO: 192887 - DNA, 1283 bp, Homo Sapiens; identical to SEQ ID NO: 185387

SEQ ID NO: 192888 - DNA, 678 bp, Homo Sapiens; identical to SEQ ID NO: 185390
  misc_feature (535)..(543): n is a, c, g, or t

SEQ ID NO: 192889 - DNA, 1212 bp, Homo Sapiens
  misc_feature (903)..(938): n is a, c, g, or t
ttggctcgacggcccccgtgtggctctatgatgcatgggacgccggtctctgttgctacccacctggtttgtgtcacttgttaagaactttgcctactttaagagatacctgagaaatttagaagacgacgagagggtaaaactgattattatgctcggaaacgcttggtgatacaaaataaaatttcttacaactgccccaaatacaggatgatagttcgtgtgacaaaaagagatatcctttgtcacattgcttatgcccccatagagggggatatgatattctgcgcagcgtatgcacacgaactgccaaaatatggtgtgaaggttggcctgactaattatgctgcagcatattgtactggcctgctgctggcccgcaggcttctcaataggttcggcatggacaagatctatgaaggccaagcggagttgattggagatgaatataatgtggaaagcattgatggtcaaccaggtgtcttcacctgctatttggatgcaggccttgccagaactaccactggcaataaagtttttggcgccccaaaggaagctatggatggaggcttgtctatccctcacagtaccaaacaattccctggttatgattctgaaagcaaataatttaatgtggaagtacaccagaagcacatcatgggccagaatgtttcagattacatgtgctacttaatggaggaagatgaagatgcttacaagaaacagttctctcaacacataaagaacagtgtaactccagacatgatggggaagatgtataagaaagctcttgctgccacaggagagaatccagtctatgagaagcccaagaaagaagttaaaatgatgaggtggaaccatcccaaaatgtcccttataaagacaatagacttaatgacagcnnnnnnnnnnnnnnnnnnnnnnnnnnnnnnnnnnnngaactgactttagaattcatccttagtttctgagtgaaaggtaagtagaaatgacttcttgaagggtttcttaacgataaaatgaagtttcattaaggagaagatgactctggctttttcttgggtcaaagttcctgaactctaaagggactttacttccctcaatcataagcttcttaagaacctggggttaaaagtgagggttaaaagtaagcttcttaagaacctggggttaaaagtgtaagaagagcaacttcaacaattgattccccaa

SEQ ID NO: 192890 - DNA, 963 bp, Homo Sapiens
ctttgtacaaaaaagttgggaatgacccaccttttagagttgaaaagaatttcagagacaaaggattctgatcccatcatataacaaattcaggcttttgggctcaaaaaagccaagtagcctcttcccctccctggcaccgctgggcctgcaggtctctgtcgagccgcggacgcgggtctctgttccgctggatggggtttgttaaagttgttaagaataaggcctactttaacagataccaagtgaaatttagaagacgacgagagggtaaaactgattactatgctcggaaacgcttggtgatacaggataaaaataaatacaacacacccaagtataggatgattgttcgtgtaactgacagagatatcatttgtcagattgcttatgcccgtatagagggggatatgatagtctgcgcggcatatgcacacgaactgccaaaatacggtgtgaaggttggcccgacaaattatgctgctgcatattgtactggcctgctgctggcccgcaggcttcttgataggtttggcatggacaagatctatgacggccaagtggaggtgactggcgataaatacaatgtggaaagtactgatggtcagccaggtgccttcacctgctgtatggatgcaggtcttgccagaactaccactggcaataaagtttttggcgccctgaagggagctgtggatggaggcttgtctgtccctcacagcaccaaatgattccctggttatgattctgaaagcaaggaatttaatgcaggagtacaccagaagcacttcatgggccagaatgttgcagattacatgcgctacttaatggaagaagatgacgatgcttataagaaacagttctctcaatacataaagaacagcgtaactccagacatgatgggaggagatgtataagaaaagctcatgctgctatacgagagaatccagtctatgaagagaa

SEQ ID NO: 192891 - DNA, 1495 bp, Homo Sapiens; identical to SEQ ID NO: 180621
  misc_feature (264)..(280): n is a, c, g, or t

SEQ ID NO: 192892 - DNA, 1293 bp, Homo Sapiens; identical to SEQ ID NO: 180622

SEQ ID NO: 192893 - DNA, 1086 bp, Homo Sapiens
cctataaaaggcaactttgtacaaaaaagttggcttagagtcttcggacattgtttatttgtgcaacaactagaaaggagcaatgaagtttatttcagttgtatttttccctaagcacaatctgcaatagtttatgtatgacagagataattcaaaaaggaaaactatatataaaagttgtatataaagtttgtctctgaaatatttctttgaagtttttaaaaaattgactcatgtttaaaaacaaaaacacatattcagagcattggacttttttaacttgttttcatctgtttatcatgacttttttatttctggtgtagagtccacattatttagtttgttgtacttttaaatttcaaagttcaaatctgaagaattagcgtttgtgatttcgggataccatgcagtggttttaatcccaggaaaaaaactatcaacaaaagttcgtttgattctcattatgtaactttgtagaaccatcctttctagatgggtccaccacagtgaatttgtaactttgaagtcaggatagaatatcattagattatctgtgagatagcattactatgttaggaccagcagagtttgggttggtaaaaataatgtttgctctattactgggttacagacatttcagcatttttaggttggttttaaatcactaaaaatatttattcggatttgaaggatttaagtgctaaaaatcaatccatttcttgcccttcaataattgtccatgcctgccttttgttgtttacatgctcttctgcccagactgttagtaatctagggaccccctttggagctgataagtacagttcagccttttctcctcaaatatataatgactttaacattcctaagaatataggtatttctgaatgatttaaatttgaggaattttaatacataaaatacaatgtacaaactttctgcccactcagatctcttctccatcatgtacttagtatttcccattaacctacacactgatttttatgctactccttgtagaaacaaaattctggtttgactcaatttttgtgtttataaacttttggaatgtgtaccccgtttatgtga

SEQ ID NO: 192894 - DNA, 944 bp, Homo Sapiens; identical to SEQ ID NO: 180623
  misc_feature (611)..(627): n is a, c, g, or t

SEQ ID NO: 192895 - DNA, 925 bp, Homo Sapiens
  misc_feature (653)..(698): n is a, c, g, or t
ttggcgcgggtcggagctcggtcctgctggaggccacgggtgccacacactcggtcccgacatgatggcgagcatgcgagtggtgaaggagctggaggatcttcagaagaagcctcccccatacctgcggaacctgtccagcgatgatgccaatgtcctggtgtggcacgctctcctcctacccgaccaacctccctaccacctgaaagccttcaacctgcgcatcagcttcccgccggagtatccgttcaagcctcccatgatcaaattcacaaccaagatctaccaccccaacgtggacgagaacggacagatttgcctgcccatcatcagcagtgagaactggaagccttgcaccaagacttgccaagtcctggaggccctcaatgtgctggtgaatagaccgaatatcagggagcccctgcggatggacctcgctgacctgctgacacagaatccggagctgttcagaaagaatgccgaagagttcaccctccgattcggagtggaccggccctcctaactcatgttctgaccctctgtgcactggatcctcggcatagcggacggacacacctcatggactgaggccagagccccctgtggcccattccccattcatttttcccttcttaggttgttagtcattagtnnnnnnnnnnnnnnnnnnnnnnnnnnnnnnnnnnnnnnnnnnnnnntgtgtatggactcactcccaggttcacctggccacaggtgcacccttcccacacccttttacattctccagagccaagggagtttaagtttgcagttacagggccagttctctagctctccatcttaaagagacagggtcaccttgcaggcctgcttgcaggaaatgatccagcaccaactcgaatccccctaaggctcaggcactgaagggcctggggaacagtgg

SEQ ID NO: 192896 - DNA, 1513 bp, Homo Sapiens
tttgtacaaaaaagttggcagcctgtcccttataactgtttgcctactggcaccccatcctgagaaggcatagatacccggcccaccctgccctggaattacaagagtcttagactgtgcctgagtgcccggcctccttgggagaccctcctaggcagcctaagcaccagacccgggagctgggtgctctggtcctgcctgcctgcctctcactggaccctctccttccaggtacggcttcaggtccagagcgtggagaagcctcagtaccgcgggacgttgcactgcttcaagtccatcatcaagcaagagagcgtgctgggcctgtacaagggcctgggctcgccgctcatggggctcaccttcatcaacgcgctggtgttcggggtgcagggcaacaccctccgggccctgggccacgactcgcccctcaaccagttcctggcaggtgcggcggcgggcgccatccagtgcgtcatctgctgccccatggagctggccaagacgcggctgcagctgcaggacgcgggcccagcgcgcacctacaagggctcgctggactgcctcgcgcagatctacgggcacgagggtctgcgtggcgtcaaccggggcatggtgtccacgttgctgcgtgagactcccagcttcggcgtctacttcctcacctatgacgctctcacgcgggcgctgggctgcgagccgggcgaccgcctgctggtgcccaagctgctgttggcgggcggtacgtcaggcatcgtgtcctggctctctacctatcctgtggacgtggtcaagtcgcggctgcaggcggacggactgcggggcgccccgcgctaccgcggcatcctggactgcgtgcaccagagctaccgcgccgagggctggcgcgtcttcacacgggggctggcgtccacgctgctgcgcgccttccccgtcaacgctgccaccttcgccaccgtcacggtggtgctcacctacgcgcgcggcgaggaggccgggcccgagggcgaggctgtgcccgccgcccctgcggggcctgccctggcgcagccctccagcctgtgacgctcaccccgccctccttccccagggctccttctcagaaacctgggacataaattggcccctgagtcgattgccctgcttcctgctgggatgctgcgagctgtggagtctatcagacgtgggctgaattttgctgatcagctgggtagttttggccgagaactgcacttgcctcagtgttctcatctatgaaataaggaccctcatgcccacactgtagagtcacgaagctcagagattattcccagcagcagccagcacctggcctggctgaggccattgcaccgttatcctggaaactgaggcagacactccagcccctttctgggatcctggccacgtcattgtgctcctgccctgcaggctggctcccgggggtctctgatggccaaccaaggggccacccagggacctctaactccacacatcctccacccggggggggtgg

SEQ ID NO: 192897 - DNA, 3102 bp, Homo Sapiens; identical to SEQ ID NO: 185395
  misc_feature (87)..(97): n is a, c, g, or t
  misc_feature (2362)..(2374): n is a, c, g, or t
  misc_feature (2418)..(2431): n is a, c, g, or t
  misc_feature (2453)..(2513): n is a, c, g, or t
  misc_feature (2672)..(2692): n is a, c, g, or t

SEQ ID NO: 192898 - DNA, 1661 bp, Homo Sapiens; identical to SEQ ID NO: 185396
  misc_feature (133)..(144): n is a, c, g, or t
  misc_feature (188)..(201): n is a, c, g, or t
  misc_feature (441)..(461): n is a, c, g, or t
  misc_feature (1454)..(1474): n is a, c, g, or t

SEQ ID NO: 192899 - DNA, 864 bp, Homo Sapiens; identical to SEQ ID NO: 180626

SEQ ID NO: 192900 - DNA, 916 bp, Homo Sapiens
  misc_feature (850)..(859): n is a, c, g, or t
ttgtacaaaaaagttgggtcaccactaccctttataaaagaggagataatgaaaccaatcatggatgctgtttttattgggcatgtcatcctaagagaggagaaatagctgggttttgggtctaattatgaataaggactgattcagaaaacgagtttatggtaggtagactaaagtttcacatcagactgtaccattgtgatttagacctatctaaaattcagagcatatcatctgggctacctcagggtcaccacccatgtattgggcttagtcaggattgacagatacattctcagctggcctgtcatataaaacatactgtcattgagcttaagctccgcttgttctgaggtttcacctccatgtgtttcattggtgcaaaagtggatctcttagttggtcacttaattctttctttttcagaaagatagtatgttcactggtatatttggtcactcttagaaccttccttcacattgttttttatgggacccatgaatggttagcctttcttttctattgtagaaggaaataaataggagtaaaaagaccattgtagtaaataagttcaaggggaacttgggaccagaaaccactgttatgtacaaaaaaatggcaaattcaataaactcaaatttaaaataatttttaaattaacagttatgataaattttatattttatacaaatagattgcttagaatggttctcaagaattataagagaaatgaactcacagtacaaaaattttataattactatacttgtgttttgtttgggggctgggaaatgtatttttacattgtagccaatcattttatatttgtcaatttaaatcttatgggtcnnnnnnnnnnatctctcttgatgtcagattttataatctttttaaataaatccatttaattaaaacg

SEQ ID NO: 192901 - DNA, 1138 bp, Homo Sapiens; identical to SEQ ID NO: 185398
  misc_feature (953)..(964): n is a, c, g, or t

SEQ ID NO: 192902 - DNA, 1601 bp, Homo Sapiens; identical to SEQ ID NO: 185400
  misc_feature (949)..(1087): n is a, c, g, or t

SEQ ID NO: 192903 - DNA, 1491 bp, Homo Sapiens
tttgtacaaaaaagttggcgcctgcctccgtcccgccgcgccacttcgcctgcctccgtcccccgcccgccgcgccatgcctgtggccggctcggagctgccgcgccggcccttgccccccgccgcacaggagcgggacgccgagccgcgtccgccgcacggggagctgcagtacctggggcagatccaacacatcctccgctgcggcgtcaggaaggacgaccgcacgggcaccggcaccctgtcggtattcggcatgcaggcgcgctacagcctgagagatgaattccctctgctgacaaccaaacgtgtgttctggaagggtgttttggaggagttgctgtggtttatcaagggatccacaaatgctaaagagctgtcttccaagggagtgaaaatctgggatgccaatggatcccgagactttttggacagcctgggattctccaccagagaagaaggggacttgggcccagtttatggcttccagtggaggcattttggggcagaatacagagatatggaatcagattattcaggacagggagttgaccaactgcaaagagtgattgacaccatcaaaaccaaccctgacgacagaagaatcatcatgtgcgcttggaatccaagagatcttcctctgatggcgctgcctccatgccatgccctctgccagttctatgtggtgaacagtgagctgtcctgccagctgtaccagagatcgggagacatgggcctcggtgtgcctttcaacatcgccagctacgccctgctcacgtacatgattgcgcacatcacgggcctgaagccaggtgactttatacacactttgggagatgcacatatttacctgaatcacatcgagccactgaaaattcagcttcagcgagaacccagacctttcccaaagctcaggattcttcgaaaagttgagaaaattgatgacttcaaagctgaagactttcagattgaagggtacaatccgcatccaactattaaaatggaaatggctgtttagggtgctttcaaaggagctcgaaggatattgtcagtctttaggggttgggctggatgccgaggtaaaagttctttttgctctaaaagaaaaaggaactaggtcaaaaatctgtccgtgacctatcagttattaatttttaaggatgttgccactggcaaatgtaactgtgccagttctttccataataaaaggctttgagttaactcactgagggtatctgacaatgctgaggttatgaacaaagtgaggagaatgaaatgtatgtgctcttagcaaaaacatgtatgtgcatttcaatcccacgtacttataaagaaattggtgaatttcacaagctatttttggaatatttttagaatattttaagaatttcacaagctattctctcaaatctgaggagctgagtaacaccatcgatcatgatgtagagtgtgggttatgaactttaaagttatagttgttttatatgttgc

SEQ ID NO: 192904 - DNA, 1311 bp, Homo Sapiens; identical to SEQ ID NO: 180630
  misc_feature (234)..(281): n is a, c, g, or t
  misc_feature (292)..(540): n is a, c, g, or t
  misc_feature (1023)..(1093): n is a, c, g, or t

SEQ ID NO: 192905 - DNA, 1038 bp, Homo Sapiens; identical to SEQ ID NO: 180631

SEQ ID NO: 192906 - DNA, 1006 bp, Homo Sapiens
gcaatgcttttttataatagccaactttgtacaaaaaagttgggtcctcatcacccatccctcgaactcaagtcccgctcattacaaattcttcttgccagtgtccacacatcctgccccatcaagatgttctcatcatgtgttacgagtggcgttcaaggatgatgcttcttgaaaattgcttagttgaaaaatggagagatcagcttagtaaaagatccatacagtgggaagagaggctgcaggaacagcggagaacagttcaggacaagaagaaaacagccgggcgcaccagtcgtagtaatccccccaaaccaaagggaaagcctcctgctcccaaaccagccagtcccaagaagaacattaaaactaggagtgcccagaagagaacaaacccgaaaagagtgtgagctaactagtttccaaagcggagacttccgacttccttacaggatgaggctgggcattgcctgggacagcctatgtaaggccatgtgccccttgccctaacaactcactgcagtgctcttcatagacacatcttgcagcatttttcttaaggctatgcttcagtttttctttgtaagccatcacaagccatagtggtaggtttgccctttggtacagaaggtgagttaaagctggtggaaaaggcttattgcattgcattcagagtaacctgtgtgcatactctagaagagtagggaaaataatgcttgttacaattcgacctaatatgtgcattgtaaaataaatgccatatttcaaacaaaacacgtaatttttttacagtatgttttattaccttttgatatctgttgttgcaatgttagtgatgttttaaaatgtgatcgaaaatataatgcttctaagaaggaacagtattggaatgaatgtctaaaagatctttatgtgtttatggtctgcaaaaggatttttgtgatgaaaggggattttttgaaaaatctagaaagtagcatatggaaaattataatgtgtccttttt

SEQ ID NO: 192907 - DNA, 983 bp, Homo Sapiens; identical to SEQ ID NO: 185407

SEQ ID NO: 192908 - DNA, 1554 bp, Homo Sapiens; identical to SEQ ID NO: 180635
  misc_feature (226)..(246): n is a, c, g, or t

SEQ ID NO: 192909 - DNA, 1791 bp, Homo Sapiens; identical to SEQ ID NO: 180636
  misc_feature (223)..(232): n is a, c, g, or t
  misc_feature (725)..(783): n is a, c, g, or t

SEQ ID NO: 192910 - DNA, 2053 bp, Homo Sapiens; identical to SEQ ID NO: 185412
  misc_feature (1723)..(1740): n is a, c, g, or t

SEQ ID NO: 192911 - DNA, 2034 bp, Homo Sapiens; identical to SEQ ID NO: 185414
  misc_feature (1599)..(1613): n is a, c, g, or t

SEQ ID NO: 192912 - DNA, 1036 bp, Homo Sapiens
ttggcaggccacggcatcctgtgctgtgggggctacgaggaaagatctaattatcatggacctgcaacagtttcttatgtgcctgtccctgtgcacagcctttgccttgagcaaacccacagaaaagaaggaccgtgtacatcatgagcctcagctcagtgacaaggttcacaatgatgctcagagttttgattatgaccatgatgccttcttgggtgctgaagaagcaaagacctttgatcagctgacaccagaagagagcaaggaaaggcttggaaagattgtaagtaaaatagatggcgacaaggacgggtttgtcactgtggatgagctcaaagactggattaaatttgcacaaaagcgctggatttacgaggatgtagagcgacagtggaaggggcatgacctcaatgaggacggcctcgtttcctgggaggagtataaaaatgccacctacggctacgttttagatgatccagatcctgatgatggatttaactataaacagatgatggttagagatgagcggaggtttaaaatggcagacaaggatggagacctcattgccaccaaggaggagttcacagctttcctgcaccctgaggagtatgactacatgaaagatatagtagtacaggaaacaatggaagatatagataagaatgctgatggtttcattgatctagaagagtatattggtgacatgtacagccatgatgggaatactgatgagccagaatgggtaaagacagagcgagagcagtttgttgagtttcgggataagaaccgtgatgggaagatggacaaggaagagaccaaagactggatccttccctcagactatgatcatgcagaggcagaagccaggcacctggtctatgaatcagaccaaaacaaggatggcaagcttaccaaggaggagatcgttgacaagtatgacttatttgttggcagccaggccacagattttggggaggctttagtacggcatgatgagttctgagctgctgagaccctcatttcctcaaagtaattt

SEQ ID NO: 192913 - DNA, 1189 bp, Homo Sapiens
  misc_feature (172)..(181): n is a, c, g, or t
  misc_feature (870)..(885): n is a, c, g, or t
ttttatttagaaacagataggtaccgttcgcattgcagaatataaaacttggtttacactctataaaaaataaccaatatccaaattcaagagagctagcattcacagaacacacaatatgggtgtgtagctactgttcaccagcctcaggcttgatttaaacaaacaaacnnnnnnnnnntttcaaagggatcattcaagatgaccgtataatgcttgctgctgtctttgcagattaaggtttgcttttcaagtgcatgattttaacataaggcctgggctctctgcacctagtgaggtgtgaggctctcttgccacacagttcacactctcacttaactaagccagagttggtggcattattaaattatcactggtcttcttaatagtaaaaatggggaacccagagggcaggaaatttccattaccctatattggggctaaacttaaaagagtatatccactatcaagagcttagtacaaaggctggggtgaagttacattatacctggctttttaccataccagggagcccacctcaacatgactgtggaagaccaaaggatatacctaggttcagattataataaatcacccagcaccacctgaatgtattatccacaaagatatagcaataataaaggttatatatacatatatttatcttggtaacctgagggctaaaaacgtggaatacgataattcttctcaagaggtccatctgtaagaaagggacccaaaaggacagtgtttgtgttgcataaaatatgggtaaagtggagttgggaacaaagggtggtttctttagctctttccacatctctctttgataaggactgaaaccctgttgattcatgataaacgtttccnnnnnnnnnnnnnnnnggcagcggggagagggaaagaggaggaaatggggtgtgatgggtcaaaggcaggaaaggtaagccatggtcctcaaaccaaagagccctctctgtaggtcctctgatctttgagtgtgagctcaagctctccagtggacacagaaaaaggcctggtagtaagtggtttgcattgtgaggtatgaggatccctggtaaattcagcagcatgtggtttttggaaatcagcccacaagataagaacactgcaaccaaactcataactaatactgctaatttaactattgtccaaaagagaaagccaa

SEQ ID NO: 192914 - DNA, 833 bp, Homo Sapiens
  misc_feature (117)..(126): n is a, c, g, or t
caactctattaaaaaataaccattatccaaatcaagaggagttagcattcacagaacacacaatatgggtgtgtagctactgttcaccagcctcaggcttgattaaacaaacaaacnnnnnnnnnntttcaaagggatcattcaagatgaccgtataatgcttgctgctgtctttgcagattaaggtttgcttttcaagtgcatgattttaacataaggcctgggctctctgcacctagtgaggtgtgaggctctcttgccacacagttcacactctcacttaactaagccagagttggtggcattattaaattatcactggtcttcttaatagtaaaaatggggaacccagagggcaggaaatttccattaccctatattggggctaaacttaaaagagtatatccactatcaagagcttagtacaaaggctggggtgaagttacattatacctggctttttaccataccagggagcccacctcaacatgactgtggaagaccaaaggatatacctaggttcagattataataaatcacccagcaccacctgaatgtattatccacaaagatatagcaataataaaggttatatatacatatatttatcttggtaacctgagggctaaaaacgtggaatacgataattcttctcaagaggtccatctgtaagaaagggacccaaaaggacagtgtttgtgttgcataaaatatgggtaaagtggagttgggaacaaagggtggtttctttagctctttccacatctctctttgataaggactgaaaccctgttgattcatgggtaaacgtttcccaacttttttgtacaaag

SEQ ID NO: 192915 - DNA, 2775 bp, Homo Sapiens; identical to SEQ ID NO: 185417
  misc_feature (422)..(495): n is a, c, g, or t
  misc_feature (2744)..(2752): n is a, c, g, or t

SEQ ID NO: 192916 - DNA, 721 bp, Homo Sapiens
  misc_feature (438)..(492): n is a, c, g, or t
actttgtacaaaaaagttggcgcttcacatacccagcaagttacccaagggcaagcacagtgtcaaaggtttgggcaaaactacccctgatccttcagctaacattagtctggatggtgtagacgttcctcttgggaccgggatttcatctggtgtgaatgacacctctctactatataacgagtacattgtctatgatattgctcaggtaaatctgaagtatctgctgaaactgaaattcaattttaagacctccctgtggtaattgggagaggtagccgagtcacacccggtggctctggtatgaattcacccgaagcgcttctgcaccaactcacctggccgctaagttgctgatgggtagtacctgtactaaaccacctcagaaaggattttacagaaacgtgttaaaggttttctctaacttctcaagtcccnnnnnnnnnnnnnnnnnnnnnnnnnnnnnnnnnnnnnnnnnnnnnnnnnnnnnnncttgccaggtagataaaactgacatagagaaaaggctggagagagattctgttgcatagactagtcctatggaaaaaaccaagcttcgttagaatgtctgccttactggtttccccagggaaggaaaaatacacttccacccttttttctaagtgttcgtctttagttttgattttggaaagatgttaagcatttatttttagttaaaaataaaaactaatttcatact

SEQ ID NO: 192917 - DNA, 3160 bp, Homo Sapiens; identical to SEQ ID NO: 185418

SEQ ID NO: 192918 - DNA, 1879 bp, Homo Sapiens; identical to SEQ ID NO: 185420
  misc_feature (232)..(244): n is a, c, g, or t
  misc_feature (1150)..(1164): n is a, c, g, or t
  misc_feature (1715)..(1723): n is a, c, g, or t

SEQ ID NO: 192919 - DNA, 1262 bp, Homo Sapiens; identical to SEQ ID NO: 185421
  misc_feature (149)..(161): n is a, c, g, or t
  misc_feature (1068)..(1081): n is a, c, g, or t

SEQ ID NO: 192920 - DNA, 914 bp, Homo Sapiens; identical to SEQ ID NO: 185427
  misc_feature (615)..(660): n is a, c, g, or t

SEQ ID NO: 192921 - DNA, 1929 bp, Homo Sapiens; identical to SEQ ID NO: 185428
  misc_feature (1739)..(1781): n is a, c, g, or t

SEQ ID NO: 192922 - DNA, 2199 bp, Homo Sapiens; identical to SEQ ID NO: 185430
  misc_feature (186)..(226): n is a, c, g, or t

SEQ ID NO: 192923 - DNA, 974 bp, Homo Sapiens
gaaaagagctaacttttaactttcgtcggacaagtgactattttacagaatagggaaggaagattctataggaatatcattcattttaagcattgttatattggggaaatttctctcagtaatcaaaagaaaaattttaaaatatttaagaggcatgtatttaaaaaatattctacatctataagattttgtaatttacttggatttataatatttctacataatgacatttgacaattttttgtttgtttctctaatagtgaatcagaaactattaaagtggccaagatgattttcttaggctctggaagactcaggaatgcatccacttgcactttcccatgcatggggaatcttcagagttttgcagccatgaagttaatatgtggtttcacaaggggaaacagtggcagaccacgcttgaattcggtcatgttctgaatcacttcaggttgtggcaaggctggtgcttgtgacaaatttatgtcattttgacatgggaactctccaacaacaggacaagaatccatttccctggcaagaacatggacggataccttatgtctccttggagcatctactgccaacatttccttgtagaatttgatgatatcttccttggtaagtgtctttaaatatgcaacctcagtgttatctctgtcaaaattatattgctgggagatgatttctccccagtatttagcacactcagcagatagcttctttggtttgtctagtcgacgaattgctaatgcctgaatgtgtttttggaaggcctcttctgtcatgtcctctatggacttttccatggtaattaagaaagcttccactctgctttctaggtagtgaggtggcttttctgactggatgatgaatctcaagccctgtatgccattagctcgacgtggcccgctgaagacgatatagcccaactgctctttaaggggcgcagggtccaacttttttgtacaaag

SEQ ID NO: 192924 - DNA, 1347 bp, Homo Sapiens
  misc_feature (321)..(345): n is a, c, g, or t
tgtcttgcaatgtgctgtaatcacaagaggagaaaataacttgtttccttgatctgtcagaggtcacagtaacctgggccgagctgttattatttattatataatagtagtaggaagttaataactggttctctgtgttccaagcacaatattacaacttcttttgaaccgtaaatatcagaatgaatcctcttcccaggggattgaacagaagcttaatgtttacaagtgtttgaatttgtgatctgaaataacacaaaattaaaaacatgatttctctaattttccaactagaggaagagaaacttgtggaaaagttcnnnnnnnnnnnnnnnnnnnnnnnnncttaaagaagggcagccaaggtagtaacctaaaaatagtgcccaggcatatgagagttgtcctacgaggttaaagaacacactgttccactgtatggctttggccctgagtggccagggaggtcaacttgaccctgccatgttggtttgacttactaagacacaggaatcattgttttccttgaccagggtctcacaccctggaggaatgttaagtaagagaaagaacctctttcctgaatattgacatgtaaaagaccaaagtaatttttctgaacttctgcaattctgagaactctccaaggaatttacagtgattttagtgcttgtcagcatttttccatgaggactttcatacatttgactctttagttcacaggttcccattgattgtgagcaagatatttatctctttagcccttggggatccagctgagagcaatctcttgcatttttttacccgtgtatgtacagatatcatttcttgtgtatgccatgacttgaaaaagtttgggaagctctttagcaatatcagctaaaaggatatgaaatcacaggtgatagcagttgtcattcagtaatttcctacaagcagcaccccaaaggaaatatagtcctaatctttactatccacttctaaatttaatgtgaatttcatacatgttattagttgttttctttataattttataaaaattattcatcgggagtttaacttccacttccatgctatcggatgtgttgggctccatgcaagaacttggaagaaaaacaggcaggaatgcatttgcataatgacccagatcatcattttctgcaactgagaattatatttcatcattgcttctagaagtctgcaattctttacttttctttggtgcattattatctaggtgccatcactggataatgtggagtgactagagaagtcatatatcactgtaaggtacagttagggtaacactttagaggtttattatttttaaaaaacttttcttgaact

SEQ ID NO: 192925 - DNA, 1561 bp, Homo Sapiens
cagggcctttggagagcaggagaggacaggctgtcaccaagcgctgctcggactctgccctgaaagatttgaattggacactgtccagtcacgtgtgtggcaaaccgtactccaagcacttttctcacggcagaggaaggagctgccatggctgtacccctgaacgtttgtggggccagcgatgtgcgctgggcctctgtaatggaggacctccagtgtgcagacaaggcgccggcagtgcccacggagggctgcgtcctgggtcctgggtgaaagtcacagctgctgaggaagcgagagctccatctggataccagagacccctgggccatcagtgcagcaggaaccaccatgtgagagccgcggccaggcagccccacgtcacgcggcctgctccaggcagccccatgtcagggggtcgagtccccccaccgcacaaggcctgctatgggctgccccatgtcagggggtcgagtccccccacatcatgaggcctgctccaggcagctgtgctcttcttcttccgtctgtaaccagctccagtctagggccgtgaaactctggtcttgttccctcacagtgtcctgtatggcattttctagcagggtgcagaggttatgtgcttcagccaccagttcttcactcttcttggctggctcaggtaagctgttggaggccgtggagggctgagacatcagctgcccaggctggctaagtcgagaggcattcatgctatccgggcttccactgacaggaccacggaccttgcttgttttccaggtagaagacagacacacacacaaaggctatgggaattcctgtggcttgcatcctctatgacctggacaagcaatcttcaggagattccagagctccttctgccgcttctcctgcagccggacaacagtcttctcatcctcattcattaagctcaccacctcttccaccttgggcaacagttccagcgccttctgcttgcaaaccacagttttactgagctgcgtatagatcactcgcactttcttctcgaagctctgaattgcctgaagcagcagccgtaccatttcctgactgtcaccctcagttcgctggtctcgaggtttttcccttagtctcctgtacagctcccttgcttgctcctctaggtcgtccagcgttcccccctgcttccggcccatggggctcctctgtaagtccacaatgtcggtctgcagagccatcatccgttctaccaggagtttcacttcgttctcccgcccacagagctccacagcctgctccatttccctccaggccagcagcagtttatctgatgtgatcccaaactcggtttgctcgctgtacttctccaggtcaatctggatgctggttttgaagaaatccaacttggccttgagctgctgagacatggaagccatggaattcttcattttggagaggcagctgttgtttcggaggagattcatcctgcagggaccacaaggaacagtcttggagcatctctgggatccaaattccatttcctgtacaataacaaaaccccctcaaatgtcaaggccaa

SEQ ID NO: 192926 - DNA, 1635 bp, Homo Sapiens; identical to SEQ ID NO: 180641

SEQ ID NO: 192927 - DNA, 1242 bp, Homo Sapiens; identical to SEQ ID NO: 185438

SEQ ID NO: 192928 - DNA, 860 bp, Homo Sapiens; identical to SEQ ID NO: 185441

SEQ ID NO: 192929 - DNA, 2387 bp, Homo Sapiens; identical to SEQ ID NO: 185442

SEQ ID NO: 192930 - DNA, 1048 bp, Homo Sapiens
ctttgtacaaaaaagttggctttattattcaagttatactgcttggcagtgatgaccctgatggctgcagtctataccatagctttaagatacacaaggacatcagacaaagaactctacttttcaaccacagccgtgtgtatcacagaagttataaagttattgctaagtgtgggaattttagctaaagaaactggtagtctgggtagattcaaagcatctttaagagaaaatgtcttggggagccccaaggaactgttgaagttaagtgtgccatcgttagtgtatgctgttcagaacaacatggctttcctagctcttagcaatctggatgcagcagtgtaccaggtgacctaccagttgaagattccgtgtactgctttatgcactgttttaatgttaaaccggacactcagcaaattacagtgggtttcagtttttatgctgtgtgctggagttacgcttgtacagtggaaaccagcccaagctacaaaagtggtggtggaacaaaatccattattagggtttggcgctatagctattgctgtattgtgctcaggatttgcaggagtatattttgaaaaagttttaaagagttcagatacttctctttgggtgagaaacattcaaatgtatctatcagggattattgtgacattagctggcgtctacttgtcagatggagctgaaattaaagaaaaaggatttttctatggttacacatattatgtctggtttgtcatctttcttgcaagtgttggtggcctctacacttctgttgtggttaagtacacagacaacatcatgaaaggcttttctgcagcagcggccattgtcctttccaccattgcttcagtaatgctgtttggattacagataacactcacctttgccctgggtactcttcttgtatgtgtttccatatatctctatggattacccagacaagacactacatccatcccacaagagaaacagcttcaaaggagagagttattggtgtgtgattttagcctcacgtgagacttcttttaagactaaaccattt

SEQ ID NO: 192931 - DNA, 1546 bp, Homo Sapiens; identical to SEQ ID NO: 180643
  misc_feature (440)..(503): n is a, c, g, or t

SEQ ID NO: 192932 - DNA, 1561 bp, Homo Sapiens
taaaagccaactttgtacaaaaaagttggctaaaacaactgattgagaagaggattggcaaagagaatttcatagagaaactaggatttattagcaaacatgagttgtattccagagcatctcagaaaccccagccaaactttcccagtccagaatacatgatatttgatcatgagtttacgaagctggtaaaagaacttgaaggtgttataactaaggctatttataagtccagtgaagaagataaaaaagaagaagaggtgaaaaaaacattagaacagcatgacaatattgtgactcactacaaaaatatgattcgagagcaagatctccaacttgaggaattaaggcagcaggtttctacattaaaatgtcaaaatgaacagctccagacggcagtcacacagcaagtatcacagatccagcagcacaaagaccagtataatcttcttaaaatacagctaggaaaagacaatcagcatcaaggttcttacagtgagggggctcagatgaatggcattcagccagaagaaattggtagattgcgagaagagatagaagaattaaaacgtaatcaggaacttttacaaagccagctgactgaaaaggactctatgattgaaaatatgaaatcttcccaaacatctggcacaaatgaacagtcttcagcaatagtttcagctagagattctgaacaagttgcagaattaaaacaggaactggcaactttaaagtctcagttaaactcacaatctgtggagatcaccaaactacagacagaaaagcaggaactgttacagaaaacagaagcgtttgcaaaatcagttgaggtacaaggagagaccgagactataatagccaccaaaactactgatgtagaaggaagactgtcagcattattacaagagaccaaagagttaaagaatgaaattaaagctctgtctgaggaaagaactgccattaaagagcagctggattcatctaatagtaccattgccattttacaaactgagaaagacaaactagagttggaaattacagattctaaaaaagaacaagatgatctcttggtgctcttggccgatcaagatcagaaaatactgtcattgaagaataaactcaaggatcttggtcatccagttgaagaagaggatgaacttgaatctggagaccaagaggatgaggatgatgaaagtgaagatcctggcaaggatctagatcatatctagttttcaaatctctaggaacaatagagattatatcataactctgaagatggactctaaactttggtttacctccatggaaaataaagatttagaaaccaggtggaaaacattcactattaagactattgatatatttttgtaatgttgccacccatgttgaaaaccttaaaactgaatttatgtagaacacacatcttttatttaaatccatctgaactgtcccaaaatgtaatttgcaaagagctttcaaacaccaaaaaatataccattttaaagcatgcggtgacaatgctatttgccttagttcattcgttgtttactttgcaaatttg

SEQ ID NO: 192933 - DNA, 1249 bp, Homo Sapiens; identical to SEQ ID NO: 185448

SEQ ID NO: 192934 - DNA, 1319 bp, Homo Sapiens
aaagccaactttgtacaaaaaagttggggcggaccctattagataaggcgcttcaggactaccgcaagaagttgcttgaacacaaggagatcgacggccgtcttaaggagttaagggaacaattaaaagaacttaccaagcagtatgaaaagtctgaaaatgatctgaaggccctacagagtgttgggcagatcgtgggtgaagtgcttaaacagttaactgaagaaaaattcattgttaaagctaccaatggaccaagatatgttgtgggttgtcgtcgacagcttgacaaaagtaagctgaagccaggaacaagagttgctttggatatgactacactaactatcatgagatatttgccgagagaggtggatccactggtttataacatgtctcatgaggaccctgggaatgtttcttattctgagattggagggctatcagaacagatccgggaattaagagaggtgatagaattacctcttacaaacccagagttatttcagcgtgtaggaataatacctccaaaaggctgtttgttatatggaccaccaggtacgggaaaaacactcttggcacgagccgttgctagccagctggactgcaatttcttaaaggttgtatctagttctattgtagacaagtacattggtgaaagtgctcgtttgatcagagaaatgtttaattatgctagagatcatcaaccatgcatcatttttatggatgaaatagatgctattggtggtcgtcggttttctgagggtacttcagctgacagagagattcagagaacgttaatggagttactgaatcaaatggatggatttgatactctgcatagagttaaaatgatcatggctacaaacagaccagatacactggatcctgctttgctgcgtccaggaagattagatagaaaaatacatattgatttgccaaatgaacaagcaagattagacatactgaaaatccatgcaggtcccattacaaagcatggtgaaatagaagtcttagtttttggatattaatattgtggaaagttaacagagctgatgtctagctgatcaaactcaaaattatgaagcaattgtgaagctttcggatggctttaatggagcagatctgagaaatgtttgtactgaagcaggtatgttcgcaattcgtgctgatcatgattttgtagtacaggaagacttcatgaaagcagtcagaaaagtggctgattctaagaagctggagtctaaatttggactacaaacctgtgtaatttactgtaagattttgatgggctgcatgacagatgttggcttattgtaaaa

SEQ ID NO: 192935 - DNA, 931 bp, Homo Sapiens
actttgtacaaaaaagttggctcgtttgatcagagaaatgtttaattatgctagagatcatcaaccatgcatcatttttatggatgaaatagatgctattggtggtcgtcggttttctgagggtacttcagctgacagagagattcagagaacgttaatggagttactgaatcaaatggatggatttgatactctgcatagagttaaaatgatcatggctacaaacagaccagatacactggatcctgctttgctgcgtccaggaagattagatagaaaaatacatattgatttgccaaatgaacaagcaagattagacatactgaaaatccatgcaggtcccattacaaagcatggtgaaatagattatgaagcaattgtgaagctttcggatggctttaatggagcagatctgagaaatgtttgtactgaagcaggtatgttcgcaattcgtgctgatcatgattttgtagtacaggaagacttcatgaaagcagtcagaaaagtggctgattctaagaagctggagtctaaattggactacaaacctgtgtaatttactgtaagatttttgatggctgcatgacagatgttggcttattgtaaaaataaagttaaagaaaataatgtatgtattggcaatgatgtcattaaaagtatatgaataaaaatatgagtaacatcataaaaattagtaattcaacttttaagatacagaagaaatttgtatgtttgttaaagttgcatttattgcagcaagttacaaagggaaagtgttgaagcttttcatatttgctgcgtgagcattttgtaaaatattgaaagtggtttgagatagtggtataagaaagcatttcttatgacttattttgtatcatttgttttcctcatctaaaaagttgaataaaatctgtttgattcagttctccta

SEQ ID NO: 192936 - DNA, 1226 bp, Homo Sapiens
aaggccaactttgtacaaaaaagttggctacactaactatcatgagatatttgccgagagaggtggatccactggtttataacatgtctcatgaggaccctgggaatgtttcttattctgagattggagggctatcagaacagatccgggaattaagagaggtgatagaattacctcttacaaacccagagttatttcagcgtgtaggaataatacctccaaaaggctgtttgttatatggaccaccaggtacgggaaaaacactcttggcacgagccgttgctagccagctggactgcaatttcttaaaggttgtatctagttctattgtagacaagtacattggtgaaagtgctcgtttgatcagagaaatgtttaattatgctagagatcatcaaccatgcatcatttttatggatgaaatagatgctattggtggtcgtcggttttctgagggtacttcagctgacagagagattcagagaacgttaatggagttactgaatcaaatggatggatttgatactctgcatagagttaaaatgatcatggctacaaacagaccagatacactggatcctgctttgctgcgtccaggaagattagatagaaaaatacatattgatttgccaaatgaacaagcaagattagacatactgaaaatccatgcaggtcccattacaaagcatggtgaaatagattatgaagcaattgtgaagctttcggatggctttaatggagcagatctgagaaatgtttgtactgaagcaggtatgttcgcaattcgtgctgatcatgattttgtagtacaggaagacttcatgaaagcagtcagaaaagtggctgattctaagaagctggagtctaaattggactacaaacctgtgtaatttactgtaagatttttgatggctgcatgacagatgttggcttattgtaaaaataaagttaaagaaaataatgtatgtattggcaatgatgtcattaaaagtatatgaataaaaatatgagtaacatcataaaaattagtaattcaacttttaagatacagaagaaatttgtatgtttgttaaagttgcatttattgcagccaagttacaaagggaaagtgttgaagcttttcatatttgctgcgtgagcattttgtaaaatattgaaagtggtttgagatagtggtataagaaagcaatttcttatgacttattttggtatcatttgttttcctc

SEQ ID NO: 192937 - DNA, 1901 bp, Homo Sapiens; identical to SEQ ID NO: 185452
  misc_feature (592)..(615): n is a, c, g, or t

SEQ ID NO: 192938 - DNA, 1189 bp, Homo Sapiens; identical to SEQ ID NO: 185454

SEQ ID NO: 192939 - DNA, 1631 bp, Homo Sapiens; identical to SEQ ID NO: 180646

SEQ ID NO: 192940 - DNA, 1726 bp, Homo Sapiens; identical to SEQ ID NO: 185455

SEQ ID NO: 192941 - DNA, 1823 bp, Homo Sapiens; identical to SEQ ID NO: 185456

SEQ ID NO: 192942 - DNA, 2310 bp, Homo Sapiens; identical to SEQ ID NO: 185458

SEQ ID NO: 192943 - DNA, 1353 bp, Homo Sapiens; identical to SEQ ID NO: 185462

SEQ ID NO: 192944 - DNA, 967 bp, Homo Sapiens; identical to SEQ ID NO: 180652

SEQ ID NO: 192945 - DNA, 2067 bp, Homo Sapiens; identical to SEQ ID NO: 180656
  misc_feature (226)..(248): n is a, c, g, or t

SEQ ID NO: 192946 - DNA, 656 bp, Homo Sapiens
ctttgtacaaaaaagttggctcatgatatccggtgggagctgaatgccatgaccaccaacagcaatatcagtcgccccatcgtctcctcccatgggtaggaggaagtttctgccacctcccctcctgagcctgctgtcatcttcactgcccctgcccatctgtcacccacctgctcctttgacccctggacttggtatacctccatgtggagttgttgggcgagaggtgttctctgtgctgtgaattcagtggggagctgtagcggggtgggggctaggttcctccccccttgggccgagggccccttccccttggtgctctgtccccatccacctcctttcagctgctcctgggcctcagctctgcccagggccagccaggttctgctgggaagggaagggaatggggagaagggagaagcaagcagtgtctgagcctcaggagcttccccctccccctttgcctatcccctcccctctgcttgagccttgagccttgactgggagctgaaaggagttgcagctgttggcatgagacctccttctccccgtcttggggaggtggggaccagcagataaatcccacccttccttgagctgtcgctgtactctgaagttcccccagctcacattttataaaaattaattaaaatctc

SEQ ID NO: 192947 - DNA, 628 bp, Homo Sapiens
taaaagccaactttgtacaaaaaagttggctcctgaggaccgaaactgggagatgaatttgaccttatagatcattctgacttacacattttggactttagccctagtctgaagactctgtgcaaactggccgtgattcagtataacctagaccagtcctgtttgcctcatgatatcaggtgggagctgaatgccatgaccaccaacagcaatatcagtcgccccatcgtctcctcccatgggtaggaggaagtttctgccacctcccctcctgagcctgctgtcatcttcactgcccctgcccatctgtcacccacctgctcctttgacccctggacttggtatacctccatgtggagttgttgggcgagaggtgttctctgtgctgtgaattcagtggggagctgtagcggggtgggggctaggttcctccccccttgggccgagggccccttccccttggtgctctgtccccatccacctcctttcagctgctcctgggcctcagctctgcccagggccagccaggttctgctgggaagggaagggaatggggagaagggagaagcaagcagtgtctgagcctcaggagcttccgcctccccctttgcctatcccctcccctctg

SEQ ID NO: 192948 - DNA, 1239 bp, Homo Sapiens
ttggatttcagacaaaatatgattcttcctgtcacccagaaaataacagaatctttttggttttccccttaaaattcttattagttattatgtacttgtgtttgcataatccctggaagggcatccaaactatgtaaaaatagttaaatgtaagcgctgcgatagatgggaaatactgctcaacttatctgtttatatcatttgatttttgatccatctagtttgttatctatttttcaagtaaattttaaaaatcatttctggaaaccgagagcatggttactaccagcaatactcctggaatcacagggctttgcaaactggttttctgtagtcagaagttaattatttgcatgtgctctttgtactcttatagtattacaggtatccccagtgcctaactctgctgtctgctatatttcagcctttcatccgctgtagtttacaatgcagggatctggttgatgaagcaaagaagtttcatctgaggcctgaacttcggagtcagatgcagggacccaggacaagggctcgcctaggagccaatgaagtgcttttggtggttgggggctttggaagccagcagtctcccattgatgtggtagagaaatatgaccccaagactcaggagtggagctttttgccaagcatcactcgtaagagacgttatgtggcctcagtgtcccttcatgaccggatctacgtcattggtggctatgatggccgttcccgccttagttcagtggaatgtctagactacacagcagatgaggatggggtctggtattctgtggcccctatgaatgtccgacgaggtcttgctggagccaccaccctgggagatatgatctatgtctctggaggctttgatggaagcaggcgtcacaccagtatggagcgctatgatccaaacattgaccagtggagcatgctgggagatatgcagacagcccgggaaggtgccggactcgtagtggccagtggagtgatctactgtctaggaggatatgacggcttgaatatcttaaattcagttgagaaatacgaccctcatacaggacattggactaatgttacaccaatggccaccaagcgttctggtgcagagtagccctgctgaatgaccatatttatgtggtggggggatttgatggtacagcccacctttcttccgttgaagcatacaacattcgcactgattcctggacaactgtcaccagtatgaccactccacgatgc

SEQ ID NO: 192949 - DNA, 1114 bp, Homo Sapiens; identical to SEQ ID NO: 185474
  misc_feature (343)..(384): n is a, c, g, or t

SEQ ID NO: 192950 - DNA, 1556 bp, Homo Sapiens; identical to SEQ ID NO: 180659
  misc_feature (797)..(814): n is a, c, g, or t
  misc_feature (940)..(978): n is a, c, g, or t
  misc_feature (981)..(1271): n is a, c, g, or t

SEQ ID NO: 192951 - DNA, 2876 bp, Homo Sapiens; identical to SEQ ID NO: 185480

SEQ ID NO: 192952 - DNA, 926 bp, Homo Sapiens
ctttgtacaaaaaagttggcagggtttcccaatatcgaactgaagaaaggagggaaggatataccagtcactatccacaatttagaggagtatctaagactggttatattctgggcactaaatgaaggcgtttctaggcaatttgattcgttcagagatggatttgaatcagtcttcccactcagtcatcttcagtacttctacccggaggaactggatcagctcctttgtggcagtaaagcagacacttgggatgcaaagacactgatggaatgctgtaggcctgatcatggttatactcatgacagtcgggctgtgaagtttttgtttgagattctcagtagttttgataatgagcagcagaggttatttctccagtttgtgactggtagcccaagattgcctgttggaggattccggagtttgaatccacctttgacaattgtccgaaagacgtttgaatcaacagaaaacccagatgacttcttgccctctgtaatgacttgtgtgaactatcttaagttgccggactattcaagcattgagataatgcgtgaaaaactgttgatagcagcaagagaagggcagcagtcgttccatctttcctgatcatagcaagaaatgcagtgtctgcctgttacagcaaaagaaacaaatcatgatttcttttctaatgttatcacctgagtcaaggaaacatgttacgccttcttgttgtaggaaaaaacggcttgcagattataaagagacatttggttgatattcattaatggccccatggacttaaagtgatcaggccctaaaacgttgttgtgatgaggtttctttagcaagttcttgtttaattatcatttatttgatgagtgaagtttttaacatgctttgctgtgtgaaatttaaaaaagggatgtttttccaggctggaa

SEQ ID NO: 192953 - DNA, 1121 bp, Homo Sapiens; identical to SEQ ID NO: 185482

SEQ ID NO: 192954 - DNA, 1228 bp, Homo Sapiens; identical to SEQ ID NO: 185483

SEQ ID NO: 192955 - DNA, 933 bp, Homo Sapiens; identical to SEQ ID NO: 185486

SEQ ID NO: 192956 - DNA, 774 bp, Homo Sapiens; identical to SEQ ID NO: 185490

SEQ ID NO: 192957 - DNA, 2409 bp, Homo Sapiens; identical to SEQ ID NO: 185494

SEQ ID NO: 192958 - DNA, 1365 bp, Homo Sapiens; identical to SEQ ID NO: 185496
  misc_feature (1256)..(1267): n is a, c, g, or t

SEQ ID NO: 192959 - DNA, 1055 bp, Homo Sapiens
  misc_feature (65)..(85): n is a, c, g, or t
actttgtacaaaaaagttgggcgtgtgcgtgtaatcccaagtaaatgggattacagcacaagccnnnnnnnnnnnnnnnnnnnnnggtaattattgtagaacctgaaaacagcaatgtatggaaaccctcaaagcagaaaagggaggaagatcctgaagattctcttatgaagctccaaaattgataatcctgtctcagctctgcctcctcaggaggagcattagtagaacagcagtgatgaggacacagagggagcagacagtgggtaccacgatctccgtaaccatttgcatgtgacttagcaagggctctgaaatgacaaagagaacgagcaccacaaatgagaacaggatcattttagtaaatacagctttatcccaaaagctttaactgtattgggaaaacttaaaaaatagcatcctcaaattttctgattcttatttgccatgaaatagaacttagtaaattaaatgttatttgaaaatgttataagagctttgtaaatatttcagaaaatatgggataaatgcctgaatttggttcttctacaggtgctataataaagtccatctctcaatacttatactttctaaattcatctcagaatattagcagccatattccacagttcctataatttttactgggggggatttgtgataggaaagtccttgggaaacatttccaatctttcaaaatattattgtgtatcttaagaagtataggaacttgtatgttgaaatgttgtatggtagttcttgtatagttaaataataatctttttaagagttaatgataagcatatgttatgtgcattattaataaaatagtggccacttaggtaatacccacttttatcttgtgtgctgggtactctggttactgagataaataaggcactggacatcctcacgtggagttcacaggctcatcagtgaatttctgtaccacatttcaaccttgtttattttagtttaatggaatatacattcttagtattgccctgattatttaaatttgttgaggggggattgcatgtgctttattgggcctg

SEQ ID NO: 192960 - DNA, 1002 bp, Homo Sapiens
ttggggcaacttccggtgtgggtgacgagtggtggccgaagcagggggacagcaagggacgctcaggcggggaccatggcggacggcggctcggagcgggctgacgggcgcatcgtcaagatggaggtggactacagcgccacggtggatcagcgcctacccgagtgtgcgaagctagccaaggaaggaagacttcaagaagtcattgaaacccttctctctctggaaaagcagactcgtactgcttccgatatggtatcgacatcccgtatcttagttgcagtagtgaagatgtgctatgaggctaaagaatgggatttacttaatgaaaatattatgcttttgtccaaaaggcggagtcagttaaaacaagctgttgccaaaatggttcaacagtgctgtacttatgttgaggaaatcacagaccttcctatcaaacttcgattaattgatactctacgaatggttaccgaaggcaagatttatgttgaaattgagcgtgcgcgactgactaaaacattagcaactataaaagaacaaaatggtgatgtgaaagaggcagcctccattttacaggagttacaggtggaaacctacgggtcaatggaaaagaaagagcgagtggaatttattttggagcaaatgaggctctgcctagctgtgaaggattacattcgaacacaaatcatcagcaagaaaattaacaccaaatttttccaggaagaaaatacagagaaattaaagttgaagtactataatttaatgattcagctggatcaacatgagggatcctatttgtctatttgtaagcactacagagcaatatatgatactccctgtatacaggcagaaagtgaaaaatggcagcaggctctgaagagtgttgtactctatgttatcctggctccttttgacaatgaacagtcagatttgggttcaccgaataagtggtgacaagaagttagaagaattcccaaatacaagatcttttaaagcttttta

SEQ ID NO: 192961 - DNA, 1127 bp, Homo Sapiens; identical to SEQ ID NO: 185499

SEQ ID NO: 192962 - DNA, 2154 bp, Homo Sapiens; identical to SEQ ID NO: 185500

SEQ ID NO: 192963 - DNA, 1400 bp, Homo Sapiens
ttggatagaatgaaacatgcaagtaccacacactgtttgaattttgcacaaaaagtgactgtaggatcaggtgatagccccggaatgtacagtgtcttggtgcaccaagatgccttctaaaggctgacataccttggaccctaatggggcagagagtatagccctagcccagtggtgacatgaccactccctttgggaggcctgaggtagaggggagtggtatgtgttttctcagtggaagcagcacatgagtgggtgacaggatgttagataaaggctctagttagggtgtcattgtcatttgagagactgacacactcctagcagctggtaaaggggtgctggaggccatggaggagctctagaaacattagcatgggctgatctgattacttcctggcatcccgctcacttttatgggaagtcttattagagggatgggacagttttccatatccttgctgtggagctctggaacactctctaaatttccctctattaaaaatcactgccctaactacacttcctccttgagggaatagaaatggacctttctctgacatagttcttggcatgggagccagccacaaatgagattctgacgtgtccaggtttctcctgagctcatctacatagattggtagacccttcctttggattaggaaagatgagttttacctctggtacactgtcttggtaagcctggatgtgacagacacctcggctctccttgaataagaaagccagcagaactcttaaagccagttgtagtacggagttgtcagcactcactgaacctcactttacagggataagagtggtgtggcattttaaatacaatggtatgttattgccagggagtgaggtacaagacgatggctcatgtcacaggcctacctgatacggtgtcagagaaagtggtggggaaaggatctggttcatggaattctgatcttggcccataggtgaaccaccaaaatagtgctcgagtcttaggttactgtcatcaaagacttgggatgactccattatatcctggggttgtgggtattagaactaaatatggaggtcctgagcatggggactggcgtcctcagtaggtgtttgggaatatgggaagggtctcctatttattcaatagagttttctcagttattttcctcctttgcccttgcaatctccagcaaaaggtgggatctaggaagaaagaatccagtgtagaagttgagaagaacttgaacgttttggttctggataaagtcactgtcctagtgctaggtggaccgagcaaaagactcagtggatgaactggtgcaatgcctgacagaataaagaacagtattaatcccttttgagaaagcatagtccagcaggacagtgggccatttggacagaagccc

SEQ ID NO: 192964 - DNA, 834 bp, Homo Sapiens
ttggtccacggtgccgctctgtttgccaaccgtccagtcccgcctaccagtgccgggcgctccccacccctcccccggctcccccggtgtccgccatggccaaagcctacgaccacctcttcaagttgctgctgatcggggactcgggggtgggcaagacttgtctgatcattcgctttgcagaggacaacttcaacaacacttacatctccaccatcggaattgatttcaagatccgcactgtggatatagaggggaagaagatcaaactacaagtctgggacacggctggccaagagcggttcaagacaataactactgcctactaccgtggagccatgggcattatcctagtatacgacatcacggatgagaaatctttcgagaatattcagaactggatgaaaagcatcaaggagaatgcctcggctggggtggagcgcctcttgctggggaacaaatgtgacatggaggccaagaggaaggtgcagaaggagcaggccgataagttggctcgagagcatggaatccgatttttcgaaactagtgctaaatccagtatgaatgtggatgaggcttttagttccctggcccgggacatcttgctcaagtcaggaggccggagatcaggaaacggcaacaagcctcccagtactgacctgaaaacttgtgacaagaagaacaccaacaagtgctccctgggctgaggaccctttcttgcctccccaccccggaagctgaacctgagggagacaacggcagagggagtgagcaggggaaaaatagcagaggggcttggagggtcacataggtagatggtaaagagaatgagga

SEQ ID NO: 192965 - DNA, 835 bp, Homo Sapiens; identical to SEQ ID NO: 185502

SEQ ID NO: 192966 - DNA, 2135 bp, Homo Sapiens; identical to SEQ ID NO: 185503

SEQ ID NO: 192967 - DNA, 1282 bp, Homo Sapiens
aaagccaactttgtacaaaaaggttggcttggaaagatggcgtcccgcaaggaaggtaccggctctactgccacctcttccagctccaccgccggcgcagcagggaaaggcaaaggcaaaggcggctcgggagattcagccgtgaagcaagtgcagatagatggccttgtggtattaaagataatcaaacattatcaagaagaaggacaaggaactgaagttgttcaaggagtgcttttgggtctggttgtagaagatcggcttgaaattaccaactgctttcctttccctcagcacacagaggatgatgctgactttgatgaagtccaatatcagatggaaatgatgcggagccttcgccatgtaaacattgatcatcttcacgtgggctggtatcagtccacatactatggctcattcgttacccgggcactcctggactctcagtttagttaccagcatgccattgaagaatctgtcgttctcatttatgatcccataaaaactgcccaaggatctctctcactaaaggcatacagactgactcctaaactgatggaagtttgtaaagaaaaggatttttcccctgaagcattgaaaaaagcaaatatcacctttgagtacatgtttgaagaagtgccgattgtaattaaaaattcacatctgatcaatgtcctaatgtgggaacttgaaaagaagtcagctgttgcagataaacatgaattgctcagccttgccagcagcaatcatttggggaagaatctacagttgctgatggacagagtggatgaaatgagccaagatatagttaaatacaacacatacatgaggaatactagtaaacaacagcagcagaaacatcagtatcagcagcgtcgccagcaggagaatatgcagcgccagagccgaggagaacccccgctccctgaggaggacctgtccaaactcttcaaaccaccacagccgcctgccaggatggactcgctgctcattgcaggccagataaacacttactgccagaacatcaaggagttcactgcccaaaacttaggcaagctcttcatggcccaggctcttcaagaatacaacaactaagaaaaggaagtttccagaaaagaagttaacatgaactcttgaagtcacaccagggcaactcttggaagaaatatatttgcatattgaaaagcacagaggatttctttagtgtcattgccgattttggctataacagtgtctttctagccataataaaataaacaaaatcttgactgcttgctctttg

SEQ ID NO: 192968 - DNA, 778 bp, Homo Sapiens
actttgtacaaaaaagttggcgtctctcctaaaggcatacagactgactcctaaactgatggaagtttgtaaagaaaaggatttttcccctgaagcattgaaaaaagcaaatatcacctttgagtacatgtttgaagaagtgctgattgtaattaaaaattcacatctgatcaatgtcctaatgtgggaacttgaaaagaagtcagctgttgcagataaacatgaattgctcagccttgccagcagcaatcatttggggaagaatctacagttgctgatggacagagtggatgaaatgagccaagatatagttaaatacaacacatacatgaggaatactagtaaacaacagcagcagaaacatcagtatcagcagcgtcgccagcaggagaatatgcagcgccagagccgaggagaacccccgctccctgaggaggacctgtccaaactcttcaaaccaccacagccgcctgccaggatggactcgctgctcattgcaggccagataaacacttactgccagaacatcaaggagttcactgcccaaaacttaggcaagctcttcatggcccaggctcttcaagaatacaacaactaagaaaaggaagtttccagaaaagaagttaacatgaactcttgaagtcacaccagggcaactcttggaagaaatatatttgcatattgaaaagcacagaggatttctttagtgtcattgccgattttggctataacagtgtctttctagccataataaaataaaacaaaatcttgactgctt

SEQ ID NO: 192969 - DNA, 1248 bp, Homo Sapiens; identical to SEQ ID NO: 180668

SEQ ID NO: 192970 - DNA, 1054 bp, Homo Sapiens
aattgatgagcaatgctttttctataaaaggcgctttgtacaaaaaagttggggtcgttggagtcacttccgcgtcaccagctcctgtgcctgccagtcggtgcccctcccgctccagccatgctctccgccctcgcccggcctgtcagcgctgctctccgccgcagcttcagcacctcggcccagaacaatgctaaagtagctgtgctaggggcctctggaggcatcgggcagccactttcacttctcctgaagaacagccccttggtgagccgcctgaccctctatgatatcgcgcacacacccggagtggccgcagatctgagccacatcgagaccaaagccgctgtgaaaggctacctcggacctgaacagctgcctgactgcctgaaaggttgtgatgtggtagttattccggctggagtccccagaaagccaggcatgacccgggacgacctgttcaacaccaatgccacgattgtggccaccctgaccgctgcctgtgcccagcactgcccggaagccatgatctgcgtcattgccaatccggttaattccaccatccccatcacagcagaagttttcaagaagcatggagtgtacaaccccaacaaaatcttcggcgtgacgaccctggacatcgtcagagccaacacctttgttgcagagctgaagggtttggatccagctcgagtcaacgtccctgtcattggtggccatgctgggaagaccatcatccccctgatctctcagtgcacccccaaggtggactttccccaggaccagctgacagcactcactgggcggatccaggaggccggcacggaggtggtcaaggctaaagccggagcaggctctgccaccctctccatggcgtatgccggcgcccgctttgtcttctcccttgtggatgcaatgaatggaaaggaaggtgttgtggaatgtttccttcgttaagtcacaggaaacggaatgtacctacttctccacaccgctgctgcttgggaaaaagggcatcgagaagaacctgggcatcggcaaagtctcctctttt

SEQ ID NO: 192971 - DNA, 1065 bp, Homo Sapiens
aactttgtaccaaaaaagttgggagaaattaaggaaagaattttctccttttggatcaattaccagtgctaaggtaatgctggaggatggaagaagcaaagggtttggcttcgtctgcttctcatctcctgaagaagcaaccaaagcagtcactgagatgaatggcgcattgtgggctccaagccactatatgttgccctggcccagaggaaggaagagagaaaggctcacctgaccaaccagtatatgcaacgagtggctggaatgagagcacttcctgccaatgccatcttaaatcagttccagcctgcagcgggtggctactttgtgccagcagtcccacaggctcagggaaggcctccatattatacacctaaccagttagcacagatgaggcctaatccacgctggcagcaaggtgggagacctcaaggcttccaaggaatgccaagtgctatacgccagtctgggcctcgtccaactcttcgccatctggctccaactgggtctgagtgcccggaccgcttggctatggactttggtggggctggtgccgcccagcaagggctgactgacagctgccagtctggaggcgttcccacagctgtgcagaacttagcgccacgcgctgctgttgctgctgctgctccccgggctgttgccccctacaaatacgcctccagtgtccgcagccctcatcctgccatacagcctctgcaggcaccccagcctgcggtccatgtgcaggggcaggagccactgactgcctccatgctggctgcagcacccccccaggaacagaagcagatgctgggagaacgcttgttcccactcatccaaacaatgcattcaaatctggctgggaagatcacgggaatgctgctggagatagacaactctgagctgctgcacatgttaaagtcccccgagtctctccgctccaaggtggatgaagctgtagcagttctacaggctcatcatgccaagaaagaagctgcccagaaagtgggcgctgttgctgctgctacctcttagacaaggaaaaaccgattcaaaagccaaata

SEQ ID NO: 192972 - DNA, 1242 bp, Homo Sapiens
cagcagctcagagttgtctatctccagcagcattcccgtgatcttcccagccagatttgaatgcattgttgggatgagtgggaacaagcgttctcccagcatctgctttctgttcctggaggggtgctgcagccagcatggaggcagtcagtggctcctgcccctgcacatggaccgcaggctggggtgcctgcagaggctgtatggcaggatgagggctgcggacactggaggcgtatttgtagggggcaacagcccggggagcagcagcagcaacagcagcgcgtggcgctaagttctgcacagctgtgggaacgcctccagactggcagctgtcagtcagcccttgctgggcggcaccagccccaccaaagtccatagccaagcggtccgggcactcagacccagttggagccagatggcgaagagttggacgaggcccagactggcgtatagcacttggcattccttggaagccttgaggtctcccaccttgctgccagcgtggattaggcctcatctgtgctaactggttaggtgtataatatggaggccttccctgagcctgtgggactgctggcacaaagtagccacccgctgcaggctggaactgatttaagatggcattggcaggaagtgctctcattccagccactcgttgcatatactggttggtcaggtgagcctttctctcttccttcctctgggccagggcaacatatagtggcttggagcccacaatgcgtccattcatctcagtgactgctttggttgcttcttcaggagatgagaagcagacgaagccaaaccctttgcttcttccatcctccagcattaccttagcactggtaattgatccaaaaggagaaaattctttccttaatttctcatcatcaatagtgtcatccaagttcttaatgtagagattcaccccctgatatcgactaattctctcctgtttcaactgttcaaatttccgttttaactctgcctgccgttctactttcttttgtgcacggcctacaaatatgattttaccacttatttcttttccattcatctcttccacagccttattggcatcctcgtgtttttcgtaactcacaaagccaaagcctttggatttcccattgggatctctcatcaccttgacacttagggtcttaccaaactgactgaatagctctttcagactctcatcatccacctcttccccaaagtttttgatataaacattgccaa

SEQ ID NO: 192973 - DNA, 1110 bp, Homo Sapiens; identical to SEQ ID NO: 185507
  misc_feature (179)..(187): n is a, c, g, or t

SEQ ID NO: 192974 - DNA, 1156 bp, Homo Sapiens
  misc_feature (922)..(957): n is a, c, g, or t
ctttaaaagccaactttgtacaaaaaagttggaatgcaccagcggttgtctaacatagaaaggaattggccttactactttgggtttggtttgcccttggcttttctcacagcaatgcagtcctcatatattatcagtggctgccttttctctatcctctttcctttattcattatcagcgccaatgaagcaaagacccctggcaaagcgtatctcttccagttgcgcctcttctccttggtggtcttcttaagcaacagactcttccacaagacagtctacctgcagtcggccctgagcagctctacttctgcagagaagttcccttcaccgcatccgtcgcctgccaaactgaaggctactgcaggtcactgagttgcctgccatccaaaggggatgggcgggattggaagaagctgtggcagctcttttccctgttcacctcccgcctgccagggaaggcaggacccgctctgccaagggccctctgcgtattcccttctctctgaggaattgaaatttttgtctctggtgcacgtaaggcagaatgttccctgacaccagtgtgtggatttttaacatcaccgtgagtctgaaaggaccacaggtttttctgcagctattttctagcatttgccagtccctgtgcctggactgattggaacactttgtttttctccctgtgccatttacccttccacctttccatcctgccttctaccacccttggatgaatggattttgtaattctagctgttgtattttgtgaatttgttaattttgttgtttttctgtgaaacacatacattggatatgggaggtaaaggagtgtcccagttgctcctggtcactccctttatagccattactgtcttgtttcttgtaactcaggttaggttttggtctctcttgctccactgcnnnnnnnnnnnnnnnnnnnnnnnnnnnnnnnnnnnngtctgaagagatgagataggaggaaagacctcacagccagatctgctgggttttgaggagtgattttctttcttccctttgaaaggggaaaaagctattttcattgggtacatttaaagtcccccaactatggggaggtacaattctgggacaagtgccactacaacaacactaaacctggatcttttcaactcgttgg

SEQ ID NO: 192975 - DNA, 1233 bp, Homo Sapiens
gagcaatgctttcttataaaagccaactttgtacaaaaaagttggcgcgctcgcccgacttcccagcggccccgtgcggcccgggcatgcccagtgcgggcgcagcggccccggccctggaagcgccccggcggagctggcccgcggtgggctaggggcagggccggagccgcggcggcggagctgtggatccttcatgatgagagatttggggacacttctctctcctgtgtgtagttgatagtttggtggtgaagagatggctgacagtgtcaaaacctttctccaggaccttgccagaggaatcaaagactccatctggggtatttgtaccatctcaaagctagatgctcgaatccagcaaaagagagaggagcagcgtcgaagaagggcaagtagtgtcttggcacagagaagagcccagagtatagagcggaagcaagagagtgagccacgtattgttagtagaattttccagtgttgtgcttggaatggtggagtgttctggttcagtctcctcttgttttatcgagtatttattcctgtgcttcagtcggtaacagcccgaattatcggtgacccatcactacatggagatgtttggtcgtggctggaattcttcctcacgtcaattttcagtgctctttgggtgctccccttgtttgtgcttagcaaagtggtgaatgccatttggtttcaggatatagctgacctggcatttgaggtatcagggaggaagcctcacccattccctagtgtcagcaaaataattgctgacatgctcttcaaccttttgctgcaggctcttttcctcattcagggaatgtttgtgagtctctttcccatccatcttgtcggtcagctggttagtctcctgcatatgtcccttctctactcactgtactgctttgaatatcgttggttcaataaaggaattgaaatgcaccagcggttgtctaacatagaaaggaattggccttactactttgggtttggtttgcccttggcttttctcacagcaatgcagtcctcatatattatcagtggctgccttttctctatcctctttcctttattcattatcagcgccaatgaagcaaagacccctggcaaagcgtatctcttccagttgcgcctcttctccttggtggtcttcttaagcaacagactcttccacaagacagtctacctgcagtcggccctgagcagctctacttctgcagagaagttccc

SEQ ID NO: 192976 - DNA, 1209 bp, Homo Sapiens
  misc_feature (1092)..(1136): n is a, c, g, or t
ctttgtacaaaaaagttggcaattccatgatgggagttctacagctgctgcatatcttctgggcctacctcattttgcgcatggcccacaagttcataactggaaagctggtagaagatgaacgcagtgaccgggaagaaacagagagctcagagggggaggaggctgcagctgggggaggagcaaagagccggcccctagccaatggccaccccatcctcaataacaaccatcgtaagaatgactgaaccattattccagctgcctcccagattaatgcataaagccaaggaactaccccgctccctgcgctatagggtcactttaagctctggggaaaaaggagaaagtgagaggagagttctctgcatcctccctccttgcttgtcacccagttgcctttaaaccaaattctaaccagcctatccccaggtagggggacgttggttatattctgttagagggggacggtcgtattttcctccctacccgccaagtcatcctttctactgcttttgaggccctccctcagctctctgtgggtaggggttacaattcacattccttattctgagaatttggccccagctgtttgcctttgactccctgacctccagagccagggttgtgccttattgtcccatctgtgggcctcattctgccaaagctggaccaaggctaacctttctaagctccctaacttgggccagaaaccaaagctgagcttttaactttctccctctatgacacaaatgaattgagggtaggaggagggtgcacataacccttaccctacctctgccaaaaagtgggggctgtactggggactgctcggatgatctttcttagtgctacttctttcagctgtccctgtagcgacaggtctaagatctgactgcccctcctttctctggcctcttcccccttccctcttctcttcagctaggctagctggtttggagtagaatggcaactaattctaatttttatttattaaatatttggggttttggttttaaagccagaattacggctagcacctagcatttcagcagagggaccattttagaccaaaatgtactgttaatgggnnnnnnnnnnnnnnnnnnnnnnnnnnnnnnnnnnnnnnnnnnnnncatggcaataagtgtcagactattaggaattgagaagggggatcaactaaataaacgaagagagtctttctta

SEQ ID NO: 192977 - DNA, 1390 bp, Homo Sapiens
tttgtacaaaaaagttggacttctttgagctgtacgtggctacaccactggctgccctcttgaacataaaggagaaaactcggctgcgggcacctcccaacgccaccttggaacatttctacctgaccagtggcaagcagcccaagcaggtggaagtagagcttttgtcccggcagagcgggctctctggccgccaggtagagcgttggttccgtcgccgccgcaaccaggaccggcccagtctcctcaagaagttccgagaagccagctggagattcacattttacctgattgccttcattgccggcatggccgtcattgtggataaaccctggttctatgacatgaagaaagtttgggagggatatcccatacagagcactatcccttcccagtattggtactacatgattgaactttccttctactggtccctgctcttcagcattgcctctgatgtcaagcgaaaggatttcaaggaacagatcatccaccatgtggccaccatcattctcatcagcttttcctggtttgccaattacatccgagctgggactctaatcatggctctgcatgactcttccgattacctgctggagtcagccaagatgtttaactacgcgggatggaagaacacctgcaacaacatcttcatcgtcttcgccattgtttttatcatcacccgactggtcatcctgcccttctggatcctgcattgcaccctggtgtacccactggagctctatcctgccttctttggctattacttcttcaattccatgatgggagttctacagctgctgcatatcttctgggcctacctcattttgcgcatggcccacaagttcataactggaaagctggtagaagatgaacgcagtgaccgggaagaaacagagagctcagagggggaggaggctgcagctgggggaggagcaaagagccggcccctagccaatggccaccccatcctcaataacaaccatcgtaagaatgactgaaccattattccagctgcctcccagattaatgcataaagccaaggaactaccccgctccctgcgctatagggtcactttaagctctggggaaaaaggagaaagtgagaggagagttctctgcatcctccctccttgcttgtcacccagttgcctttaaaccaaattctaaccagcctatccccaggtagggggacgttggttatattctgttagagggggacggtcgtattttcctccctacccgccaagtcatcctttctactgcttttgacgccctccctcagctctctgtgggtagggggttacaattcacattccttattctgagaatttgggccccagctgtttgcctttgactcccctgacctcagagccagggttgtgcctta

SEQ ID NO: 192978 - DNA, 1331 bp, Homo Sapiens; identical to SEQ ID NO: 185509

SEQ ID NO: 192979 - DNA, 2645 bp, Homo Sapiens; identical to SEQ ID NO: 185510
  misc_feature (2412)..(2447): n is a, c, g, or t

SEQ ID NO: 192980 - DNA, 1436 bp, Homo Sapiens
  misc_feature (198)..(229): n is a, c, g, or t
  misc_feature (231)..(254): n is a, c, g, or t
  misc_feature (294)..(343): n is a, c, g, or t
ttggcgagtgtggagtcgggactggagctgctgccgcggcgacgccggggatctttgtcgctagctcccggcccttctgccccgccgccttccctcagtcagcgttgcccactcctctccggccgggcgcccctgcctccatttctcgctctctgtccaccacacacacggcccccccgatcatggatccgggcagtnnnnnnnnnnnnnnnnnnnnnnnnnnnnnnnngnnnnnnnnnnnnnnnnnnnnnnnngactcggcgcctgactgctgggaccaggcggacatggaannnnnnnnnnnnnnnnnnnnnnnnnnnnnnnnnnnnnnnnnnnnnnnnnncgaggcccagcgggagaacctcagcgcggccttcagccggcaactcaacgtcaacgccaagcccttcgtgcccaacgtccacgccgccgagttcgtgccgtccttcctgcggtgcccggcagcgccgccacccccagctggcggcgccgccaataaccacggagccggcagcggcgcgggaggccgtgcggcacctgtggaatcctctcaagaggaacagtcattgtgtgaaggttcaaattcagctgttagcatggaactttcagaacctattgaaaatggagagacagaaatgtctccagaagaatcatgggagcacaaagaagaaataagtgaagcagagccagggggtggttccttgggagatggaaggccgccagaggaaagtgcccatgaaatgatggaggaggaagaggaaatcccaaaacctaagtctgtggttgcaccgccaggtgctcctaagaaagagcatgtaaatgtagtattcattgggcacgtagatgctggcaagtcaaccattggaggacaaataatgtatttgactggaatggttgacaaaaggacgcttgaaaagtatgaaagagaagctaaagagaaaaacagagaaacttggtacttgtcttgggccttagacacaaatcaggaagaacgagacaagggtaaaacagtagaagtgggtcgtgcctattttgaaaccgaaaagaagcatttcacaattctagatgcccctggtcacaagagttttgtcccaaatatgattggtggtgcctctcaagctgatttggctgtgctggtaatctcagccaggaaaggagagtttgaaactggatttgaaaaaggaggacagacaagagaacatgcaatgttggcaaagacagcaggtgtaaaacacctaattgtgctaattaataagatggatgatccaacagtaaattgggagcaatgagagatatgaagaatgtaaggagaaactagtgccatttttgaaaaaagttggcttcaatcccaaaaaggacattcactttatgccctgctcagacttactggagcaaatctcaaagagcagtcggatttctgtccttggtacattgga

SEQ ID NO: 192981 - DNA, 2217 bp, Homo Sapiens; identical to SEQ ID NO: 185513
  misc_feature (90)..(123): n is a, c, g, or t

SEQ ID NO: 192982 - DNA, 1874 bp, Homo Sapiens; identical to SEQ ID NO: 185516
  misc_feature (1378)..(1386): n is a, c, g, or t

SEQ ID NO: 192983 - DNA, 4125 bp, Homo Sapiens; identical to SEQ ID NO: 185517

SEQ ID NO: 192984 - DNA, 2902 bp, Homo Sapiens; identical to SEQ ID NO: 180670
  misc_feature (2574)..(2597): n is a, c, g, or t

SEQ ID NO: 192985 - DNA, 916 bp, Homo Sapiens; identical to SEQ ID NO: 180671
  misc_feature (275)..(298): n is a, c, g, or t

SEQ ID NO: 192986 - DNA, 940 bp, Homo Sapiens
ttggctgtgctcttctttgccagcaacagctatcattcaggttgaagaccagaatacaggtgcaattgagaacattatagttgaagtaaaaaaagagccagatgctgagcccgcagagggagaggaagaggaggcccagccagctgccacagatgcccccaacggagacctcacgcccgagatgatcctcagcatgatggaccggtgatggcggagccttgtgcgtcgccaggacttctctgggctgtgtttaaacggcccgcatcttaatttttctcccttctttctttttttggctttgggaaaagcatcattttaccaaacataccgagaacgaaaacttcaaggatgatgttagaaaaaaatgtgatttaactagaacttgctgtctgatgttagcaaatcatggaatgttctgagtccctgagggtttactgtgaagtgctgaggacagtgttgacaactaactcgttttcctagatggaaacggagacattgacccctccctccatgtggtaaaccactccagaatggccaccaggcttcccagagttctatggtcttcttcccaagagagtttttaattgtaaatgcatacttgggaaggacttagagttttaaactgttttttgcctttgcttttccctgactccctttgcttggagtcagctgcacaccagtagtatggcatgctacgatcaggttctgtcctgaaagctttgcctctttcttggcaaagtttctggtatggtcaagcttgtaaataactttttttacattttaatcttttccattaattaagaggttgaaaaaaagtgcagtgtaagaaaacccagcattttattacttgcaaattaagttaccacagactctgtagtgtgtaaatgttgacaaggaatttggatcacaatcatgtagcaaaatggcacccagaccactg

SEQ ID NO: 192987 - DNA, 1033 bp, Homo Sapiens; identical to SEQ ID NO: 185524

SEQ ID NO: 192988 - DNA, 3748 bp, Homo Sapiens; identical to SEQ ID NO: 185526
  misc_feature (3072)..(3093): n is a, c, g, or t

SEQ ID NO: 192989 - DNA, 1635 bp, Homo Sapiens; identical to SEQ ID NO: 185529
  misc_feature (410)..(419): n is a, c, g, or t
  misc_feature (1115)..(1138): n is a, c, g, or t

SEQ ID NO: 192990 - DNA, 1106 bp, Homo Sapiens
ataaagtctctgccatcctctcccccgactcaggtcaaactcatagcagcaatgcacaaagtcctctgtgaagccagtgttctctgctccccgggtcagaggtcacaggtcaagttcagtcagtccgaagaatcatgggcgggtgctcgctgtcctcatccaggcgcagggcgctggcctcgtcctccaggcaggcgccacccacagcacccaggtcgtctgtgtaggcttttcctgcagctgcgccgtatgtctgagtgactaaggggcagtcgtgagaggcagagtccaagatctcattggtcgtttccagactgccgtccagccggtgctgcttcatcagggcacactcgccgccctcctgggggtccaggttgtacatgtacaggtacccgtcggcggcacccaccaacaaccgcgggatcttctgaattgtggctagcgagcagatgtttttgtggccgcagaatggcaggcggaccgtggcgaaggctctgccctggttgaacatttctgtcacttgggaaggcaggtagctggtggaggccatgagcactttcccgaagtacccggtccaggtggtgggctcctctgggggtttttctttcacagtctcgagtttgaagatgtgcacggtctcagtgttgctggaggcggagaggaacatgccgtccatgctgaaggccagggagcagatgctcacgcacctctttactcctctccgaaactcaaagagtttttgtccttctggaatggaaaataccctaatcacggtccccttctccgaagccgtggcaagtttagttccacttgcgtcaaaggccagtgccgctaaaggactgtcgtgagccggaatcatgtttgcagctctcaaattaatggtatcgaagacctgcacctctccgatggtcgcgctccctgggtacgccaagtagcagttgtcgttgttgattgacagcgcacacaggcctgcagggtttggaggcgtctccctgatcgtatgcagcaccttcatgtcccgaatgttgtggatgtacagggactcctccaggcatactatcagcctctgcctgttgagcttcacagccaacttttttgtacaaagt

SEQ ID NO: 192991 - DNA, 2051 bp, Homo Sapiens; identical to SEQ ID NO: 185534

SEQ ID NO: 192992 - DNA, 586 bp, Homo Sapiens
gccaactttgtacaaaaaagttggcaacagcctcatcaaattcaacgcggtcctcaccaacccgcagggagattatgacacgagcactggcaagttcacctgcaaagtccccggcctctactactttgtctaccacgcgtcgcatacagccaacctgtgcgtgctgctgtaccgcagcggcgtcaaagtggtcaccttctgtggccacacgtccaaaaccaatcaggtcaactcgggcggtgtgctgctgaggttgcaggtgggcgaggaggtgtggctggctgtcaatgactactacgacatggtgggcatccagggctctgacagcgtcttctccggcttcctgctcttccccgactagggcgggcagatgcgctcgagccccacgggccttccacctccctcagcttcctgcatggacccaccttactggccagtctgcatccttgcctagaccattctccccaccagatggacttctcctccagggagcccaccctgacccacccccactgcaccccctccccatgggttctctccttcctctgaacttctttaggagtcactgcttgtgtggttcctggga

SEQ ID NO: 192993 - DNA, 643 bp, Homo Sapiens
  misc_feature (129)..(154): n is a, c, g, or t
ttggctcttgcctggcagaggggaagcagatctgaggacatctctgtgccaggccagaaaccgcccacctgcagttccttctccgggatggacgtggggcccagctccctgccccaccttgggctgaannnnnnnnnnnnnnnnnnnnnnnnnnccctcaggggccaagccaacacaggctgctacgggatcccagggatgcccggcctgcctggggcaccagggaaggatgggtacgacggactgccggggcccaagggggagccaggaatcccagccattcccgggatccgaggacccaaagggcagaagggagaacccggcttacccggccatcctgggaaaaatggccccatgggaccccctgggatgccaggggtgcccggccccatgggcatccctggagagccaggtgaggagggcagatacaagcagaaattccagtcagtgttcacggtcactcggcagacccaccagccccctgcacccaacagcctgatcagattcaacgcggtcctcaccaacccgcagggagattatgacacgagcactggcaagttcacctgcaaagtccacggcctctactactttgtctaccacgcgtcgcatacagcaaacctgtgcgtgctgctgtaccgcaagc

SEQ ID NO: 192994 - DNA, 970 bp, Homo Sapiens
ttggcatcgtgtacggtcccgcgtggctgcgcgcggcgctctgggagtacgacatggcgcgcgagctgcgggcgctgctgctgtggggccgccgcctgcggcctttgctgcgggcgccggcgctggcggccgtgccgggaggaaaaccaattctgtgtcctcggaggaccacagcccagttgggccccaggcgaaacccagcctggagcttgcaggcaggacgactgttcagcacgcagaccgccgaggacaaggaggaacccctgcactcgattatcagcagcacagagagcgtgcagggttccacttccaaacatgagttccaggccgagacaaagaagcttttggacattgttgcccggtccctgtactcagaaaaagaggtgtttatacgggagctgatctccaatgccagcgatgccttggaaaaactgcgtcacaaactggtgtctgacggccaagcactgccagaaatggagattcacttgcagaccaatgccgagaaaggcaccatcaccatccaggatactggtatcgggatgacacaggaagagctggtgtccaacctggggacgattgccagatcggggtcaaaggccttcctggatgctctgcagaaccaggctgaggccagcagcaagatcatcggccagtttggagtgggtttctactcagctttcatggtggctgacagagtggaggtctattcccgctcggcagccccggggagcctgggttaccagtggctttcagatggttctggagtgtttgaaatcgccgaagcttcgggagttagaaccgggacaaaaatcatcatccacctgaaatccgactgcaaggagttttccagcgaggcccgggtgcgagatgtggtaacgaagtacagcaacttcgtcagcttccccttgtacttgaatggaagcggatgaacaccttgcaggccatctgggatgaatggaccccaaggatg

SEQ ID NO: 192995 - DNA, 947 bp, Homo Sapiens; identical to SEQ ID NO: 185538
  misc_feature (651)..(660): n is a, c, g, or t

SEQ ID NO: 192996 - DNA, 1711 bp, Homo Sapiens; identical to SEQ ID NO: 180675

SEQ ID NO: 192997 - DNA, 2038 bp, Homo Sapiens; identical to SEQ ID NO: 185541

SEQ ID NO: 192998 - DNA, 1320 bp, Homo Sapiens; identical to SEQ ID NO: 185542
  misc_feature (806)..(848): n is a, c, g, or t

SEQ ID NO: 192999 - DNA, 951 bp, Homo Sapiens
ccaactttgtacaaaaaagttgggttgggctgtgacgctgctgctggggtcagaatgtcatacccaggctatcccccaacaggctacccacctttccctggatatcctcctgcaggtcaggagtcatcttttcccccttctggtcagtatccttatcctagtggctttcctccaatgggaggaggtgcctacccacaagtgccaagtagtggctacccaggagctggaggctaccctgcgcctggaggttatccagcccctggaggctatcctggtgccccacagccagggggagctccatcctatcccggagttcctccaggccaaggatttggagtcccaccaggtggagcaggcttttctgggtatccacagccaccttcacagtcttatggaggtggtccagcacaggttccactacctggtggctttcctggaggacagatgccttctcagtatcctggaggacaacctacttaccctagtcagcctgccacagtgactcaggtcactcaaggaactatccgaccagctgccaacttcgatgctataagagatgcagaaattcttcgtaaggcaatgaagggttttgggacagatgagcaggcaattgtggatgtggtggccaaccgttccaatgatcagaggcaaaaaattaaagcagcatttaagacctcctatggcaaggatttaatcaaagatctcaaatcagagttaagtggaaatatggaagaactgatcctggccctcttcatgcctcctacgtattacgatgcctggagcttacggaaagcaatgcagggagcaggaactcaggaacgtgtattgattgagattttgtgcacaagaacaaatcaggaaatccgagaaattgtcagatgttatcagtcagaatttggacgaaaccttgaaaaggacattaggtcagatacatcagacattttgaacgtt

SEQ ID NO: 193000 - DNA, 812 bp, Homo Sapiens
  misc_feature (301)..(313): n is a, c, g, or t
caggagattgctgtgatttttattcaattggacatcttggattaggaatgaaactagtaagaatgaaggtttacaaaacattgcaatattactgtatcattgtgatatggctttacattgattgtatgtagagaaacaaaataaaattagaattaaggcaataacaacatgtgcaaaccaagcacattacccctgatacggtccttgacagaaagctctttcggttagctgatgtttgatattgctgcatgcaggtcattgctctgaaggataagctatgaatagaaattttttttcattnnnnnnnnnnnnntccctcctactggcccacaatagccagaagaagtcttcggtaatctccactcgtgtcacctgcaatcattgtgcccagagtcttctgatacatctgagcgaacatctgttttatttgtacaaggtcaatctcacttcgagtgaccacaatccggaccagggtggagtcatctgtgccagcacctttcatagcatagtagagcctctcagcaaagaaggcagggcggttcagggcacactgcaagatggtcttcaaaccactttctacatatccggaaaactcacggctcacactgcttaacaagtctcgattagccatcctagaataagcctccatggtagctctcagctgaggaaagcttcttgtggcaaggatcatgttaaagcaagattcatcggtccctagtctcccctcaccagcttgatagagacgctgagcatcttcctgagccatttggtggtttatactcggggttctcatcacccaacttttttgtaca

SEQ ID NO: 193001 - DNA, 398 bp, Homo Sapiens
ttgtacaaaaaagttggatccttcagagcacccgacctagcatgcagcaatatcaaacatcagctaaccgaaagagctttctgtcaaggaccgtatcagggtaatgtgcttggtttgcacatgttgttattgccttaattctaattttattttgttctctacatacaatcaatgtaaagccatatcacaatgatacagtaatattgcaatgtttgtaaaccttcattcttactagtttcattctaatcaagatgtcaaattgaataaaaatcacagcaatctctgattctgtgtaataatattgaataattttttagaaggttactgaaagctctgccttccggaatccctctaagtctgcttgatagagtggatagtatgttaaaactgtgtacttt

SEQ ID NO: 193002 - DNA, 880 bp, Homo Sapiens; identical to SEQ ID NO: 185544

SEQ ID NO: 193003 - DNA, 1085 bp, Homo Sapiens; identical to SEQ ID NO: 185547
  misc_feature (475)..(490): n is a, c, g, or t
  misc_feature (776)..(820): n is a, c, g, or t

SEQ ID NO: 193004 - DNA, 1692 bp, Homo Sapiens; identical to SEQ ID NO: 185550

SEQ ID NO: 193005 - DNA, 2531 bp, Homo Sapiens; identical to SEQ ID NO: 185551
  misc_feature (63)..(71): n is a, c, g, or t

SEQ ID NO: 193006 - DNA, 1040 bp, Homo Sapiens; identical to SEQ ID NO: 185552

SEQ ID NO: 193007 - DNA, 1724 bp, Homo Sapiens; identical to SEQ ID NO: 185554

SEQ ID NO: 193008 - DNA, 977 bp, Homo Sapiens; identical to SEQ ID NO: 180677
  misc_feature (809)..(818): n is a, c, g, or t

SEQ ID NO: 193009 - DNA, 967 bp, Homo Sapiens; identical to SEQ ID NO: 185556

SEQ ID NO: 193010 - DNA, 1223 bp, Homo Sapiens; identical to SEQ ID NO: 185558

SEQ ID NO: 193011 - DNA, 855 bp, Homo Sapiens; identical to SEQ ID NO: 180678
  misc_feature (255)..(473): n is a, c, g, or t
  misc_feature (726)..(742): n is a, c, g, or t

SEQ ID NO: 193012 - DNA, 893 bp, Homo Sapiens; identical to SEQ ID NO: 185559

SEQ ID NO: 193013 - DNA, 951 bp, Homo Sapiens
  misc_feature (153)..(161): n is a, c, g, or t
ccatgtaaatgggtcactgcgaaatgcagcaatttaatttttctccaatcaaaataagaaacaaacccagtatgatctcacttctattaacttttgaaggtttacagcagttaaagtatttttgcttctatgtatgaaggttaaaaaaatcannnnnnnnncataaaatacaagagcaaccaatttcaccatccagtaaaagtaaaaactgggattcttttttaaattagtccaaagtggcgtttaggaacttagttgtaggctgctgcgctgacaccatgacaaaccaaagtgtagggctgggtctggttttgtttcggttttcttttcaatatccaatgctcatggattaagttctggaaatgttccaattgtaaggcagggatctgtttggattccaccatgggtatgctccttgggttggatgctggagggtgaggcacgttttgccggacccatgtcgactacctagtagtcatcaaggtcaaaaaattcatcgtctcctccttggtattccattccctggaaatctactcggtaccgcaagatacctccaattccaccaaatcctttcacaaactgagacccttcttgtgatttatctgtgacaatttccaacgtagctccaaattttttatagttgttagcaaaccattccaacaggggcatgctctcgataagctcatgttcctgtccggtctctttgtctgtgaaatgagatttatccttttcttgctctggagttagatagagaattttctcctcttctgtgccttggcaatgaagaacatatctcattatatccagattttcatagactattagaatttctacagctcccatttccaaagcctttagtgtatcttcaacgccaaaacagtacttgcccgtgtcctggctgatttcatcaaagtatcgtcctacgattagggatcagtcaacaggatccaa

SEQ ID NO: 193014 - DNA, 1661 bp, Homo Sapiens; identical to SEQ ID NO: 185564

SEQ ID NO: 193015 - DNA, 1159 bp, Homo Sapiens; identical to SEQ ID NO: 185566

SEQ ID NO: 193016 - DNA, 1217 bp, Homo Sapiens; identical to SEQ ID NO: 185569
  misc_feature (240)..(249): n is a, c, g, or t

SEQ ID NO: 193017 - DNA, 1363 bp, Homo Sapiens; identical to SEQ ID NO: 185570

SEQ ID NO: 193018 - DNA, 1238 bp, Homo Sapiens; identical to SEQ ID NO: 185572

SEQ ID NO: 193019 - DNA, 1660 bp, Homo Sapiens; identical to SEQ ID NO: 185573

SEQ ID NO: 193020 - DNA, 1866 bp, Homo Sapiens; identical to SEQ ID NO: 185574
  misc_feature (1573)..(1588): n is a, c, g, or t

SEQ ID NO: 193021 - DNA, 609 bp, Homo Sapiens; identical to SEQ ID NO: 185575

SEQ ID NO: 193022 - DNA, 799 bp, Homo Sapiens
aaattgatgagcaatgctttgacattatagacaactttgtacaaaaaagttggctctgcagtaatagcaatgttttgctatgcagttcttggatccatcatgggacaattactagttatttactttcctccgcttcagaaggtttttcagactgagagcctaagcatactggatctgttgtttcttttgggtctcacctcatcagtgtgcatagtggcagaaattataaagaaggttgaaaggagcagggaaaagatccagaagcatgtctggctctgggagaggagtggacagcagctggttgagatacatccccatctggagacaggactgccactgacagaagatgtgagctgtgtctaagtccagtcttgtgcccagccgtgtctgcgccttcactctttggaactctgcatacaacatcttagcaccatcttcctgcagctcttccttacctaaataaagaaacagcccaagggcagtatttctaaaagcactgtaacagcttttcattttctccacatatactacaaattctataaagaaagaaattaatttaaaaaaactaagatgtttttctcttctggcttcataaatgccttgctgtataaattgaaatattgatactgaactgtctttttaatgatgacctaactttattcaacccatcggaatttactttttccctgaaataagatcttttccactggtctactacctgaccataaacatgtctgcatttgaattctctaaaccctaaatctgtgtctatgaaaaatacaaatgactattaaatatt

SEQ ID NO: 193023 - DNA, 1601 bp, Homo Sapiens; identical to SEQ ID NO: 185576

SEQ ID NO: 193024 - DNA, 1423 bp, Homo Sapiens; identical to SEQ ID NO: 185578
  misc_feature (1069)..(1081): n is a, c, g, or t

SEQ ID NO: 193025 - DNA, 1452 bp, Homo Sapiens; identical to SEQ ID NO: 185580
  misc_feature (140)..(169): n is a, c, g, or t
  misc_feature (1393)..(1401): n is a, c, g, or t

SEQ ID NO: 193026 - DNA, 985 bp, Homo Sapiens; identical to SEQ ID NO: 185584

SEQ ID NO: 193027 - DNA, 858 bp, Homo Sapiens; identical to SEQ ID NO: 185585

SEQ ID NO: 193028 - DNA, 1060 bp, Homo Sapiens; identical to SEQ ID NO: 185587
  misc_feature (845)..(867): n is a, c, g, or t

SEQ ID NO: 193029 - DNA, 4240 bp, Homo Sapiens; identical to SEQ ID NO: 185588
  misc_feature (2190)..(2211): n is a, c, g, or t
  misc_feature (2466)..(2494): n is a, c, g, or t
  misc_feature (2511)..(2560): n is a, c, g, or t
  misc_feature (2660)..(2670): n is a, c, g, or t

SEQ ID NO: 193030 - DNA, 920 bp, Homo Sapiens; identical to SEQ ID NO: 185591

SEQ ID NO: 193031 - DNA, 1381 bp, Homo Sapiens; identical to SEQ ID NO: 185593

SEQ ID NO: 193032 - DNA, 769 bp, Homo Sapiens
ctttgtacaaaaaagttgggcctctttaaagactagctggtgtatcctcttttggcttttacccgacaagcactgaacctaccagatgtatttgggttggtcgtcctcccattggaactgaaactacggatcttccgacttctggatgttcgttccgtcttgtctttgtctgcggtttgtcgtgacctctttactgcttcaaatgacccactcctgtggaggtttttatatctgcgtgattttcgagacaatactgtcagagttcaagacacagattggaaagaactgtacaggaagaggcacatacaaagaaaagaatccccgaaagggcggtttgtgatgctcctgccatcgtcaactcacaccattccattctatcccaaccccttgcaccctaggccatttcctagctcccgccttcctccaggaattatcgggggtgaatatgaccaaagaccaacacttccctatgttggagacccaatcagttcactcattcctggtcctggggagacgcccagccagtttcctccactgagaccacgctttgatccagttggcccacttccaggacctaaccccatcttgccagggcgaggcggccccaatgacagatttccctttagacccagcaagggtcggccaactgatggccggctgtcattcatgtgattgatttgtaatttcatttctggagctccatttgtttttgtttctaaactacagatgtcaactcctttgggggtgccgatctcgagtgttattttct

SEQ ID NO: 193033 - DNA, 1216 bp, Homo Sapiens
aaactggcctggcgtctccccaggaaccaggaatgagtgaactgattgggtctccaacatagggaagtgttggtctttggtcatattcacccccgataattcctggaggaaggcgggagctaggaaatggcctagggtgcaaggggttgggatagaatggaatggtgtgagttgacgatggcaggagcatcacaaaccgccctttcggggattcttttctttgtatgtgcctcttcctgtacagttctttccaatctgtgtcttgaactctgacagtattgtctcgaaaatcacgcagatataaaaacctccacaggagtgggtcatttgaagcagtaaagaggtcacgacaaaccgcagacaaagacaagacggaacgaacatccagaagtcggaagatccgtagtttcagttccaatgggaggacgaccaacccaaatacatctggtaggttcagtgcttgtcgggtaaaagccagaagaggatacaccagctggtctttaaagaggcgagagagtttctgaagatctttgtatatgttggctacattttcccctagtttctctttgcaaataaaagattctggtagcagctgcaatcttttcacacttctaatctcattgttgatttttagtgtagcatttacaacaatcaggtttcccaaaggcacacaggtgagagtagcggagctgccctcgcagagaggatgcatgtactgcagcttatacaccccgctcaacttccacttctccggcatggacagtgctttggcttcggtgccctgaggtatgtaacctgactccaacatgagaagatgtatcaacactatcaaggcatcattggcatcagaacagtcagctgattgatacaaggtctctaatgaatgtggcacttgcccttccaccgattcactacagagcatgggttctgagggatagaaacctgtgccctctgccatatgcgcattatcttgaattgactcagcttcaaaattttgactaggccctaacatactgtcgtcattccaaacaccagactgggctgcctgtccttggaatgaatcacttggttgttcatcctgcatgctagtctgattggagctggtggccaaagagggttgctcattattctggagtgaagaatgctctgaatcgaggaggggaccagagcccccgggaggccgggccatgttctccaggagccggaccccagccaa

SEQ ID NO: 193034 - DNA, 1444 bp, Homo Sapiens; identical to SEQ ID NO: 180684

SEQ ID NO: 193035 - DNA, 1246 bp, Homo Sapiens; identical to SEQ ID NO: 185595

SEQ ID NO: 193036 - DNA, 1092 bp, Homo Sapiens
ataaaagccaactttgtacaaaaaagttggcggagctcatataacttggttccaagatacattcctcagaaacagtctgaggacatgcatgcctttgtcactgaagttgcctacaaaatggagcttctgcaaattgaaaacatggttttgagcccctggaccctaatagttgctgttctgcttcagaaccggccatccatggactttgatgctctggtggaaaagactttatggctaaaaggcttaacccaggcatttggagggtttctcatttggcctgataataaacctgctgaagaagttgtcccggccagcattcttctgcattccaacattgccagccttgtcaaagaccaggtgattctgaaagtggactccggagactcggaagtggtcgatgggcttatgctccagcacatcactctcctcatgtgctcagcttataggaaccagctgctcaacatttttgtgcgcccatccttagtagcagtagcattgcagatgacaccagggttcaggaaagaggatgtctacagttgctttcgcttcctacgtgatgtttttgcagatgagttcatcttccttccaggaaacacactaaaggactttgaagaaggctgttacctgctttgtaaaagtgaagccatacaagtgactacgaaagacatcctagttacagagaaaggaaatactgtgttagaatttttagtaggactctttaaaaccttttgtggaaagctatcagataatttgcaagtaccttttgagtgaagaagaggaccacttcagtgaggaacagtacttggctgcagtcagaaaattcacaagtcagcttctcgatcaaggtacctctcaatgttatgatgtattatcctctgatgtgcagaaaaacgccttatgcagcctgtgtgaggctcggagtagtggataagaagaagataaataataactgtatatttaatgtgaatgaacctgccacaaccaaattataagaaatgcttggttgtaagacaccaataggaaaaccagccactgcaaaactttaataatcaaccaatagttatggaaaaatcccgtcacgtaattactctc

SEQ ID NO: 193037 - DNA, 1027 bp, Homo Sapiens; identical to SEQ ID NO: 180686
  misc_feature (242)..(266): n is a, c, g, or t

SEQ ID NO: 193038 - DNA, 2856 bp, Homo Sapiens; identical to SEQ ID NO: 185597
  misc_feature (1257)..(1269): n is a, c, g, or t
  misc_feature (1271)..(1517): n is a, c, g, or t
  misc_feature (1666)..(1695): n is a, c, g, or t
  misc_feature (1870)..(1930): n is a, c, g, or t
  misc_feature (2364)..(2424): n is a, c, g, or t

SEQ ID NO: 193039 - DNA, 568 bp, Homo Sapiens; identical to SEQ ID NO: 185598

SEQ ID NO: 193040 - DNA, 885 bp, Homo Sapiens; identical to SEQ ID NO: 185599
  misc_feature (643)..(653): n is a, c, g, or t

SEQ ID NO: 193041 - DNA, 1750 bp, Homo Sapiens; identical to SEQ ID NO: 185601
  misc_feature (1085)..(1095): n is a, c, g, or t

SEQ ID NO: 193042 - DNA, 1115 bp, Homo Sapiens; identical to SEQ ID NO: 185603

SEQ ID NO: 193043 - DNA, 940 bp, Homo Sapiens
ttggcataagacggcgtcggtgttgcagtctgtgtccttggaggtgaccagggccactgcaggcatggtgctagcagagctgtacgtctctgaccgagagggaagcgatgccacgggagatggaaccaaggagaaaccatttaaaacaggtctaaaggctttgatgacagtagggaaagaaccatttcctaccatttacgtagattcacaaaaagaaaatgagaggtggaatgttatttctaaatcacagttgaagaacattaaaaagatgtggcatagggaacaaatgaagagtgaatcccgggaaaagaaagaggcagaagatagtttacgaagagaaaagaacctggaagaagcaaagaagattaccattaaaaatgatccaagtctcccagagccaaaatgtgtgaagattggtgcgttagaaggatatagaggccaaagagtaaaggtgtttggctgggtccacaggctgcgcaggcaaggaaagaatttaatgtttctggtgttgcgagatggtacaggttatcttcagtgtgtcttggcggatgagttgtgtcagtgctacaatggagttctcttgtccacggagagcagtgttgcagtgtatggaatgctaaatcttaccccaaagggcaagcaggctccaggtggccatgagctgagttgtgacttctgggaactaattgggttggcccctgctggaggagctgacaacctgatcaatgaggagtctgacgttgatgtccagctcaacaacagacacatgatgatccgaggagaaaacatgtccaaaatcctaaaagcacgatccatggtcaccaggtgctttagagatcacttctttgatagggggtactatgaagttactcctccaacattagtgcaaacacaagtagaaggtggtgccacactcttcaagcttgactattttggggaa

SEQ ID NO: 193044 - DNA, 925 bp, Homo Sapiens
ttggggtgccacactcttcaagcttgactattttggggaagaggcatttttgactcaatcctctcagttgtacttggagacctgcctcccagccctgggagatgttttttgtattgctcagtcataccgggcagagcagtccagaacacgaaggcacctggctgagtacactcacgtggaagctgagtgtcctttcctgacttttgacgacctcctgaaccggttggaggacttggtttgtgatgtggtagatcgaatattgaagtcacctgcagggagcatagtgcatgagctcaacccgaactttcagccccccaaacggcctttcaaacggatgaactattcagatgctatcgtttggctaaaagaacatgatgtaaagaaagaagatggaactttctatgaatttggagaagatatcccagaagctcctgagagactgatgacagacaccattaatgaaccaatcttgctgtgtcgatttcctgtggagatcaagtccttctacatgcagcgatgtcctgaggattcccgtcttactgaatctgtcgacgtgttgatgcccaatgttggtgagattgtgggaggctcaatgcgtatctttgatagtgaagaaatactggcaggttataaaagggaagggattgaccccactccctattactggtatacggatcagagaaaatacggtacatgtccccatggaggatatggcttgggcttggaacgattcttaacgtggattctgaatagtatcacatccgagacgtgtgcttataccctcgatttgtccagcgttgcacgccataaccattttctccagaagcgtggaggaaagattatgaaaggaacagctctttaaaaaagaaacaaaagccagaatcttccttttttgtttcattggggttctctttctgttttcttc

SEQ ID NO: 193045 - DNA, 1426 bp, Homo Sapiens; identical to SEQ ID NO: 185605
  misc_feature (215)..(241): n is a, c, g, or t

SEQ ID NO: 193046 - DNA, 1492 bp, Homo Sapiens
  misc_feature (739)..(748): n is a, c, g, or t
  misc_feature (1078)..(1089): n is a, c, g, or t
ttggcgccgcccgcccgctcagcgtccgccgccgccatgggagtgcaggtggaaaccatctccccaggagacgggcgcaccttccccaagcgcggccagacctgcgtggtgcactacaccgggatgcttgaagatggaaagaaatttgattcctcccgggacagaaacaagccctttaagtttatgctaggcaagcaggaggtgatccgaggctgggaagaaggggttgcccagatgagtgtgggtcagagagccaaactgactatatctccagattatgcctatggtgccactgggcacccaggcatcatcccaccacatgccactctcgtcttcgatgtggagcttctaaaactggaatgacaggaatggcctcctcccttagctccctgttcttggatctgccgtggagggatctggtgcctccagacatgtgcacatgagtccatatggagcttttcctgatgttccactccactttgtatagacatctgccctgactgaatgtgttctgtcactcagctttgcttccgacacctctgtttcctcttcccctttctcctcgtatgtgtgtttacctaaactatatgccataaacctcaagttactcattttattttgttttcattttggggtgaagattcagtttcagtcttttggatataggtttccaattaagtacatggtcaagtattaacagcacaagtggtaggttaacattagaatagaattggtgttnnnnnnnnnntttgcaagaatattttattttaattttttggatgaaatttttatctattatatattaaacattcttgctgctgcgctgcaaagccatagcagatttgaggcgctgttgaggactgaattactctccaagttgagagatgtctttgggttaaattaaaagccctacctaaaactgaggtggggatggggagagcctttgcctccaccattcccacccaccctccccttaaaccctctgcctttgaaagtagatcatgttcactgcaatgctggacactacaggtatctgtccctgggccagcagggacctctgaagccttctttgtggccnnnnnnnnnnnncatcctgtggtttttctaatggactttcaggaattttgtaatctcataactttccaagctccaccacttcctaaatcttaaaaactttaattgacagtttcaattgaaggtgctgtttgtagacttaacacccagtgaaagcccagccatcatgacaaatccttgaatgttctcttaaaaaaatgatgctggtcatcgcagcttcagcatctcctgttttttgatgcttggctccctctgctgatctcagtttcctggcttttcctccctcagccccttctcacccctttgctgtcctgtgtagtgatttggtgagaaatcgttgctgcacccttcccccagcaccatttatgagtctcaagttttattattgcaataaaagtgctttatgccggcttttctc

SEQ ID NO: 193047 - DNA, 1536 bp, Homo Sapiens; identical to SEQ ID NO: 185607

SEQ ID NO: 193048 - DNA, 1569 bp, Homo Sapiens; identical to SEQ ID NO: 180689
  misc_feature (421)..(434): n is a, c, g, or t
  misc_feature (763)..(783): n is a, c, g, or t
  misc_feature (1338)..(1373): n is a, c, g, or t

SEQ ID NO: 193049 - DNA, 3102 bp, Homo Sapiens; identical to SEQ ID NO: 180690

SEQ ID NO: 193050 - DNA, 755 bp, Homo Sapiens
cttttgtacaaaaaagttggcctcagagggctttcacgccaaacaaacggccttttcgtgtgaaacatcttcagggcgggaaaggggccacttctggctttgttagcaataactgaccttcagtttacccttctgaaggagcagggactcagcacagaattcactttagacggggctgaaggagtgtccctcctctatgtgaaaagaaaattgttttattcttcattctgactttttaactgtttggctcacttccagttagtttgaatgaaaataataattttctacttggagttgaagagggcagaatccgcagctctcatcattgtgatgtgtagcatgtctgccctctgactggacatcattgccattaactttcttctgggcatcacggcagtgtcacgatgcccagacttggagcaaggcaaccttggagtcagtccactcataaaatatggtaacacccattttaaaatttaagttttgtccttaaagacaacttcagtggttaattataaaagttgtgttacttcgtcctaaattaaattgatagaaagatttaaaaatgtgttttgtttctactattcagaaactgcgaactagggaaaggttggtatgaaaaaatgtctttccttttttcaatgtacatagttcaactctttctttgttacatttaaactatatccatggatatcagtctgctttggactcctctgctagtgttacagatggaaataaaaccattaatttgaacc

SEQ ID NO: 193051 - DNA, 1588 bp, Homo Sapiens; identical to SEQ ID NO: 185621

SEQ ID NO: 193052 - DNA, 1761 bp, Homo Sapiens; identical to SEQ ID NO: 185622

SEQ ID NO: 193053 - DNA, 926 bp, Homo Sapiens
actttgtacaaaaaagttgggatctatgtttctgtgtagagctcttagaacaacacacagaagaattggtccagttaagtgcatgcaaaaagccaccaaatgaagggattctatccagcaagatcctgtccaagagtagcctgtggaatctgatcagttactttaaaaaatgactccttattttttaaatgtttccacatttttgcttgtggaaagactgttttcatatgttatactcagataaagattttaaatggtattacgtataaattaatataaaatgattacctctggtgttgacaggtttgaacttgcacttcttaaggaacagccataatcctctgaatgatgcattaattactgactgtcctagtacattggaagcttttgtttataggaacttgtagggctcattttggtttcattgaaacagtatctaattataaattagctgtagatatcaggtgcttctgatgaagtgaaaatgtatatctgactagtgggaaacttcatgggtttcctcatctgtcatgtcgatgattatatatggatacatttacaaaaataaaaagcgggaattttcccttcgcttgaatattatccctgtatattgcatgaatgagagatttcccatatttccatcagagtaataaatatacttgctttaattcttaagcataagtaaacatgatataaaaatatatgctgaattacttgtgaagaatgcatttaaagctattttaaatgtgtttttatttgtaagacattacttattaagaaattggttattatgcttactgttctaatctggtggtaaaggtattcttaagaatttgcaggtactacagattttcaaaactgaatgagagaaaattgtataaccatcctgctgttcctttagtgcaatacaataaaactctgaaatt

SEQ ID NO: 193054 - DNA, 2837 bp, Homo Sapiens; identical to SEQ ID NO: 185624
  misc_feature (1248)..(1281): n is a, c, g, or t
  misc_feature (1836)..(1847): n is a, c, g, or t

SEQ ID NO: 193055 - DNA, 672 bp, Homo Sapiens; identical to SEQ ID NO: 185625

SEQ ID NO: 193056 - DNA, 1418 bp, Homo Sapiens
ttggagctctacgagcggcatcctgcctgcgttagcggcggtggaggaggaggcagagaggagtggagggcggagtagacggaggaggctgctgcagagaagaaagtgtcagagccggttcggctttagagtgtggtgaagggtacttttcatggtgcatggaaggaaagccaatgcgcaggtgtaccaacattcgaccaggagagactggaatggatgtaacaagccgctgcacccttggagaccccaacaaactgccagaaggggttccccaacctgcccgcatgccctatatctcagacaagcaccctcgacaaaccttggaagtgattaaccttctgagaaagcaccgggagctatgtgatgtggtgctagttgtgggcgccaagaagatatatgcccatcgagtcattttgtcagcctgtagtccctacttccgagctatgtttacaggagaattggcagagagccgtcagacagaagtagtgatccgagacattgacgagagggctatggaattactgattgactttgcgtatacctcccagataacagtagaagagggcaatgttcagactcttctgccagctgcttgcctcctccagctggcagaaatacaggaagcctgctgtgaattcttaaagagacaattagatccttctaactgcctgggcattcgggcttttgctgacacacattcatgtcgtgagttgctaaggatagcagacaagttcacccaacataactttcaagaggtaatggagagtgaagagttcatgttgcttccagccaatcaactcattgatataatatccagtgatgagctaaacgttcgcagtgaagaacaagtgttcaatgcagtgatggcctgggtcaaatacagtattcaggaaagacgtcctcaattaccccaggtgctgcagcatgttcgtttgcctttgcttagtcccaagttcctggtcggcacagtaggctctgatcccctcatcaaaagtgatgaagaatgcagagacttggtagatgaggctaaaaactacctcctattgccgcaagaacgaccactaatgcaaggaccaaggacgagaccacggaaacctatccgatgtggggaagtactctttgcagttggtggttggtgcagtggagatgccatttccagtgttgaacgatatgatccacagaccaatgaatggagaatggtggcttcaatgagcaaaaggagatgcggagttggggtcagtgttcttgatgatctgttatatgcagtaggaggccatgatggatcctcttatctcaatagtgttgaaaggtatgatccgaaacgagaacaagtggactcggggtagcttctatgagtaccagaagactaggtgtggctgtggctgtgttaggaggttcttatatgctgtaggtggctc

SEQ ID NO: 193057 - DNA, 784 bp, Homo Sapiens
ttgggaaaggcagcggtggccacagaggcggcggagagatggccttcagcggttcccaggctccctacctgagtccagctgtccccttttctgggactattcaaggaggtctccaggacggacttcagatcactgtcaatgggaccgttctcagctccagtggaaccaggtttgctgtgaactttcagactggcttcagtggaaatgacattgccttccacttcaaccctcggtttgaagatggagggtacgtggtgtgcaacacgaggcagaacggaagctgggggcccgaggagaggaagacacacatgcctttccagaaggggatgccctttgacctctgcttcctggtgcagagctcagatttcaaggtgatggtgaacgggatcctcttcgtgcagtacttccaccgcgtgcccttccaccgtgtggacaccatctccgtcaatggctctgtgcagctgtcctacatcagcttccagcctcccggcgtgtggcctgccaacccggctcccattacccagacagtcatccacacagtgcagagcgcccctggacagatgttctctactcccgccatcccacctatgatgtacccccaccccgcctatccgatgcctttcatcaccaccattctgggagggctgtacccatccaagtccatcctcctgtcaggcactgtcctgcccagtgctcagaggttccacatcaacctgtgctctgggaacacatcgccttccacctgaacccccgttttgatgagaatgctgtggtgcgcaacacc

SEQ ID NO: 193058 - DNA, 728 bp, Homo Sapiens
tttgtacaaaaaagttggcacatttcaaatacagttgtggttacggcagcccagtacttttggccctccttgctgttcggttctcctcccttctcccaacctcctcactggtgttgctgggtgtggtcctcaatacagaatagagacccttgggcctgtgtcaccagacttctgaccccttgggcaacagccagatggagactggtcgccttttgagcctcagctctcttcctcttgttctcctagggtgggagtacagcagccaaacgctgaacttagtcccatccacttccatcttatcctttgtgcccttcatccccctgcatcttgtcctttttgccctctggtacctcccagtgccccatcatctctacccccagggactcggagatcatgcagcagaagcagaaaaaggcaaacgagaagaaggaggaacccaagtagctttgtggcttcgtgtccaaccctcttgcccttcgcctgtgtgcctggagccagtcccaccacgctcgcgtttcctcctgtagtgctcacaggtcccagcaccgatggcattccctttgccctgagtctgcagcgggtcccttttgtgcttccttcccctcaggtagcctctctccccctgggccactcccgggggtgagggggttaccccttcccagtgttttttattcctgtggggctcaccccaaagtattaaaaagtagctttgtaattcacaaaaaaga

SEQ ID NO: 193059 - DNA, 956 bp, Homo Sapiens; identical to SEQ ID NO: 180697

SEQ ID NO: 193060 - DNA, 340 bp, Homo Sapiens
tgggacctgcaaccccccttaaagaacgaggggacgtaacggaggcaggttggagccgctgccgtcgccatgacccgcggtaaccagcgtgagctcgcccgccagaagaatatgaaaaagcagagcgactcggttaagggaaagcgccgagatgacgggctttctgctgccgcccgcaagcagagggactcggagatcatgcagcagaagcagaaaaaggcaaacgagaagaaggaggaacccaagtagctttgtggcttcgtgtccaaccctcttgcccttctcttgtgtgcctggagccagtcccaccacgctcgcgtttcctcctgtaatgctcaca

SEQ ID NO: 193061 - DNA, 1082 bp, Homo Sapiens; identical to SEQ ID NO: 180699

SEQ ID NO: 193062 - DNA, 937 bp, Homo Sapiens; identical to SEQ ID NO: 185628

SEQ ID NO: 193063 - DNA, 1464 bp, Homo Sapiens
ctttgtacaaaaaagttggctccttggccaccacagtagcttagagaaacgagatcgaatgcacccggaaggtggccaatttgtgcctcaactccttggccatctcctggctaccaaactcaagcgtttcctccttagcaaaggcggacgtagggctcaaatccccgacgtttccagggccaccccccatacgattgacgagatgcctgaggctgccgtgaaatcaacagccaacaaataccaagtcttttttttcgggacccacgagacggcattcctgggccccaaagacctcttcccttacgaggaatccaaggagaagtttggcaagcccaacaagaggaaagggttcagcgaggggctgtgggagatcgagaacaaccctactgtcaaggcttccggctatcagtcctcccagaaaaagagctgtgtggaagagcctgaaccagagcccgaagctgcagagggtgacggtgataagaaggggaatgcagagggcagcagcgacgaggaagggaagctggtcattgatgagccagccaaggagaagaacgagaaaggagcgttgaagaggagagcaggggacttgctggaggactctcctaaacgtcccaaggaggcagaaaaccctgaaggagaggagaaggaggcagccaccttggaggttgagaggccccttcctatggaggtggaaaagaatagcaccctctctgagcccggctctggccgggggcctccccaagaggaagaagaagaggaggatgaagaggaagaggctaccaaggaagatgctgaggccccaggcatcagagatcatgagagcctgtagccaccaatgtttcaagaggagcccccaccctgttcctgctgctgtctgggtgctactggggaaactggccatggcctgcaaactgggaacccctttcccaccccaacctgctctcctcttctactcacttttcccactccaagcccagcccatggagattgacctggatggggcaggccacctggctctcacctctaggtccccatactcctatgatctgagtcagagccatgtcttctccctggaatgagttgaggccactgtgttccttccgcttggagctattttccaggcttctgctggggcctgggacaactgctcccacctcctgacacccttctcccactctcctaggcattctggacctctgggttgggatcaggggtaggaatggaaaggatggagcatcaacagcagggtgggcttgtggggcctgggaggggcaatcctcaatgcggggtgggggcagcacaggagggcggcctccttctgagctcctgtcccctgctacacctattatcccagctgcctagattcaggaaagtgggacagcttgtaggggaggggctcctttccataaatccttgatgattgacaacacccatttttcctttgccgacccaagagttttggga

SEQ ID NO: 193064 - DNA, 686 bp, Homo Sapiens
aatgcttttcctataaaagcccactttgtacaaaaaagttggcacaaacaaccgcacgagcgcgcacccaccgcgccggagccttgccccgatccgcgcccgccccgtccgtgcggcgcgcgggcggagacgccgtggccgcgccggagctcgggccgggggccaccatcgaggcgggggccgcgcgagggccggagcggagcggcgccgccaccgccgcacgcgcaaacttgggctcgcgcttcccggcccggcgcggagcccggggcgcccggagccccgccatgtcgcgatccaaccggcagaaggagtacaaatgcggggacctggtgttcgccaagatgaagggctacccacactggccggcccggattgacgagatgcctgaggctgccgtgaaatcaacagccaacaaataccaagtcttttttttcgggacccacgagacggcattcctgggccccaaagacctcttcccttacgaggaatccaaggagaagtttggcaagcccaacaagaggaaagggttcagcgaggggctgtgggagatcgagaacaaccctactgtcaaggcttccggctatcagccctcccccctcctgcacagagccctgcctgcccggccagtgggtttaccccggggctaatccgacagagtcctcccagaaaaagagctgtgtggaaga

SEQ ID NO: 193065 - DNA, 1339 bp, Homo Sapiens
ttggctcaacattccccatggggtatcccacaggagcagggctttgcctcaggggtgcccagtctgagaggtcgatccagcccctagtcttggggagtccccagctgaccagatgggacacagaaggcatttcagctagtagggttggggaaggactgtgggtgtcagcctgggaaggagccccggaggagaggagtgggtggctggtggcctccctctccagcctcagcccacttcctctgttgatcctgcctaggactctcctaaacgtcccaaggaggcagaaaaccctgaaggagaggagaaggaggcagccaccttggaggttgagaggccccttcctatggaggtggaaaagaatagcaccctctctgagcccggctctggccgggggcctccccaagaggaagaagaagaggagggtgaagaggaagaggctaccaaggaagatgctgaggccccaggcatcagagatcatgagaggtgagtgagccccctgaccccttggcagctggactaggggggaccggccactctcggagaagaggatgaaaagggcctgcagtggtcagcctctcgggaggcagggtgggctctcctaggagaccggcactggctggggcaaggccaggccaaggccacaccattaacccttctcccctccaaccctccctcacagcctgtagccaccaatgtttcaagaggagcccccaccctgttcctgctgctgtctgggtgctactggggaaactggccatggcctgcaaactgggaacccctttcccaccccaacctgctctcctcttctactcacttttcccactccaagcccagcccatggagattgacctggatggggcaggccacctggctctcacctctaggtccccatactcctatgatctgagtcagagccatgtcttctccctggaatgagttgaggccactgtgttccttccgcttggagctattttccaggcttctgctggggcctgggacaactgctcccacctcctgacacccttctcccactctcctaggcattctggacctctgggttgggatcaggggtaggaatggaaaggatggagcatcaacagcagggtgggcttgtggggcctgggaggggcaatcctcaaatgcggggtgggggcagcacaggagggcggcctccttctgagctcctgtcccttgctacacctattatcccagctgcctagattcaggaaagtgggacagcttgtaaggaggggctccttttccataaatccttgatgattgacaacacccatttttccttttgccgaccccagagttttgggagttgtagttaatcatc

SEQ ID NO: 193066 - DNA, 1822 bp, Homo Sapiens; identical to SEQ ID NO: 180701
  misc_feature (1612)..(1667): n is a, c, g, or t

SEQ ID NO: 193067 - DNA, 1410 bp, Homo Sapiens; identical to SEQ ID NO: 185634
  misc_feature (403)..(466): n is a, c, g, or t
  misc_feature (500)..(508): n is a, c, g, or t

SEQ ID NO: 193068 - DNA, 702 bp, Homo Sapiens
tttgtacaaaaaagttggattccataaccctgctaagaatattatgatatagccatttaataacattgatttcattctgtttaatgaatttggaaatatgcactgaaagaaatgtaaaacatttagcaatagctcgtgttatggaaaaaagtgcactgaatttattagacaaacttacgaatgcttaacttctttacacagcataggtgaaaatcatatttgggctattgtatactatgaacaatttgtaaatgtcttaatttgatgtaaataactctgaaacaagagaaaaggtttttaacttagagtagccctaaaatatggatgtgcttatataatcgcttagttttggaactgtatctgagtaacagaggacagctgttttttaaccctcttctgcaagtttgttgacctacatgggctaatatggatactaaaaatactacattgatctaagaagaaactacccttgtggagtatatagatgcttttcattatacacacaaaaatccctgagggacattttgaggcatgaatataaaacatttttatttcagtaacttttccccctgtgtaagttactatggtttgtggtacaacttcattctatagaatattaagtggaagtgggtgaattctactttttatgttggagtggaccaatgtctatcaagagtgacaaataaagttaatgatgattcc

SEQ ID NO: 193069 - DNA, 293 bp, Homo Sapiens
ctttgtacaaaaaagttggggatactaaaaatattacattgatctaagaagaaactagccttgtggagtatatagatgcttttcattatacacacaaaaatccctgagggacattttgaggcatgaatataaaacatttttatttcagtaacttttccccctgtgtaagttactatggtttgtggtacaacttcattctatagaatattaagtggaagtgggtgaattctactttttatgttggagtggaccaatgtctatcaagagtgacaaataaagttaatgatgattcc

SEQ ID NO: 193070 - DNA, 1575 bp, Homo Sapiens; identical to SEQ ID NO: 185637
  misc_feature (201)..(310): n is a, c, g, or t
  misc_feature (1409)..(1431): n is a, c, g, or t

SEQ ID NO: 193071 - DNA, 1270 bp, Homo Sapiens; identical to SEQ ID NO: 185639
  misc_feature (787)..(807): n is a, c, g, or t
  misc_feature (938)..(1025): n is a, c, g, or t

SEQ ID NO: 193072 - DNA, 1668 bp, Homo Sapiens; identical to SEQ ID NO: 185640
  misc_feature (1518)..(1538): n is a, c, g, or t

SEQ ID NO: 193073 - DNA, 1023 bp, Homo Sapiens; identical to SEQ ID NO: 185643
  misc_feature (631)..(642): n is a, c, g, or t
  misc_feature (687)..(705): n is a, c, g, or t

SEQ ID NO: 193074 - DNA, 1044 bp, Homo Sapiens
aaaaatatattccatcataattggagtgtgacctgcatcggagagtggctctgagtaaagagttgataaaaatccacaaagagttgggtttttgtcttttaaaaacattcctttacacactacaaagaaataattagtattttggctttttaaattcctacatgatatttagaatggcggtccccaagggtcctcccttcacgtaattgtgaacacagaccctcttccaagggcacatcccggagggtgcggactctgaagacttcgacctccacgtgtttatactggtttgagaacaaagacagcgtcatccagaacgtagtagtcattatacatgtcgccttcacacaggtatggtagtctggtgaaagcttcgataacaaaaccagcttttctgaaaacttcaggcagactattcacttgttcttcccagttctgtcctttgatttccaaaatttctgatggtttctcccacttgccacctacgttttccacatagggatgaaaggggaggacaagggcaaggatgaccctgcctctagttggctccaagacacttctgatatcttttaacaaagtcaggggctgatcacagcggtccagcaagttcaggcagctgatgacatcatactggaaccccgtattctgccattcatttataccaaggactctgtatttctttttctgaagctgccatatcatagtttcagaaagctcagtggcatagatttcttcaaaatgagggctcatgatttttgtgacttctccatctccagcacctaaatcaagaagtctgtgggttttccagtctggattaattttaagcagtctctgaaactgatctggtgaaaacacaaacattgagcctcttcctagcaacccattgatagatgttctagacataaacaggctaaaaacagatgacacaaaagaatgatataattggataaatagccagcccgatttctcaatgctgttgtttaagaagatctgtgttccttgatcaaggtagactctgaacccaacttttttgtacaaagttgg

SEQ ID NO: 193075 - DNA, 1438 bp, Homo Sapiens
  misc_feature (457)..(480): n is a, c, g, or t
  misc_feature (1372)..(1380): n is a, c, g, or t
ttggggcgctgcttgggcccgtggcggattgtaagctgctggttttgcggctgggaagagcggcgagagggttcggcatttttcgtcgggatccccgcaaggatgagtgctgccagagagtctcacccgcatggggtgaagcgttcagcctccccagacgacgatctgggatctagcaattgggaggcagcagacttgggtaatgaagagagaaaacaaaagttcttgagacttatgggtgcaggaaagaaagaacatactggtcgtcttgttataggagatcacaaatcaacatctcacttccgaaccggggaagaagacaagaaaattaatgaagaactggagtctcaatatcagcaaagtatggacagtaaattatcaggaagatatcggcgacattgtggacttggcttcagtgaggtagaagaccatgatggagaaggtgatgtggctggannnnnnnnnnnnnnnnnnnnnnnntcacctgatcctgaaagtccagatgattctgaaagcgattcagagtcagagaaagaagaatctgctgaagaactccaagctgctgagcaccctgatgaagtggaggatcccaaaaacaaaaaagatgcaaaaagcaattataaaatgatgtttgttaaatccagtggttcataactcccaaacgcttagtctttgtattaaaagtaagccttattgttacaatgcacagtggaggactgcttatagagcacagacctttgtattataatttttaaaaaggcccttttaaataattacaaagagtgtttgctttcaaatgccatgggttacacttttatgggcatgactataaccatttttgtaaagagtaagagttgtataaaataagaaataaatacagtactcaacttcctttcatattagcatcatcaaccctctaattcaccttatgggggaaatgcttctttttgtttgtgatagctattttatcatttccttcatatttttctcttataaaaatgtatttgatactgtgatatgttcacgaaaagtattctttaattattctttgttatattatagctgttcattatggatatttctgctgccagtcacaatctaaattaattttggcaaaagattgggtacttagttgcctgttactgagttagctctactcttttggaccaaagcaacatgagagcaagtacttttcacacttgttaagatggagttataactgtcatacatttggaatattatgatcccaagtagtctttttataatttggattgtatcgtatgttagatttttgataaaatttggccaatttttacagaagaaattctctgatcatttagttctatctatttagaaatatgtaaaactggannnnnnnnnaagtaatatgtgaccaaagttaattttgtcccaaaagtctaaataagagcagtttccc

SEQ ID NO: 193076 - DNA, 1415 bp, Homo Sapiens; identical to SEQ ID NO: 185645

SEQ ID NO: 193077 - DNA, 1337 bp, Homo Sapiens
ttgggtacttggcttggagactggcgcggcgttcgtgtccgaggtcactagtttcccggtagttcagctgcacatgaatagaacagcaatgagagccagtcagaaggactttgaaaattcaataaatcaagtgaaactcttgaaaaaggatccaggaaacgaagtgaagctaaaactctacgcgctatataagcaggccactgaaggaccttgtaacatgcccaaaccaggtgtatttgacttgatcaacaaggccaaatgggacgcatggaatgcccttggcagcctgcccaaggaagctgccaggcagaactatgtggatttggtgtccagtttgagtccttcattggaatcctctagtcaggtggagcctggaacagacaggaaatcaactgggtttgaaactctggtggtgacctccgaagatggcatcacaaagatcatgttcaaccggcccaaaaagaaaaatgccataaacactgagatgtatcatgaaattatgcgtgcacttaaagctgccagcaaggatgactcaatcatcactgttttaacaggaaatggtgactattacagtagtgggaatgatctgactaacttcactgatattccccctggtggagtagaggagaaagctaaaaataatgccgttttactgagggaatttgtgggctgttttatagattttcctaagcctctgattgcagtggtcaatggtccagctgtgggcatctccgtcaccctccttgggctattcgatgccgtgtatgcatctgacagggcaacatttcatacaccatttagtcacctaggccaaagtccggaaggatgctcctcttacacttttccgaagataatgagcccagccaaggcaacagagatgcttatttttggaaagaagttaacagcgggagaggcatgtgctcaaggacttgttactgaagttttccctgatagcacttttcagaaagaagtctggaccaggctgaaggcatttgcaaagcttcccccaaatgtcttgagaatttcaaaagaggtaatcaggaaaagagagagagaaaaactacacgctgttaatgctgaagaatgcaatgtccttcagggaagatggctatcagatgaatgcacaaatgctgtggtgaacttcttatccagaaaatcaaaactgtgatgaccactacagcagagtaaagcatgtccaaggaaggatgtgctgttacctctgatttccagtactggaactaaataagcttcattgtgccttttgtagtgctagaatatcaattacaatgatgatatttcactacagctctgatgaataaaaagttttgtaaaacaag

SEQ ID NO: 193078 - DNA, 911 bp, Homo Sapiens
ttggcagagccgtaaaggcgcgcgggaacatggggctgtatgctgcagctgcaggcgtgttggccggcgtggagagccgccagggctctatcaaggggttggtgtactccagcaacttccagaacgtgaagcagctgtacgcgctggtgtgcgaaacgcagcgctactccgccgtgctggatgctgtgatcgccagcgccggcctcctccgtgcggagaagaagctgcggccgcacctggccaaggtgctagtgtatgagttgttgttgggaaagggctttcgagggggtgggggccgatggaaggctctgttgggccggcaccaggcgaggctcaaggctgagttggctcggctcaaggttcatcggggtgtgagccggaatgaggacctgttggaagtgggatccaggcctggtccagcctcccagctgcctcgatttgtgcgtgtgaacactctcaagacctgctccgatgatgtagttgattatttcaagagacaaggtttctcctatcagggtcgggcttccagcctcgatgacttacgagccctcaaggggaagcattttctcctggaccccttgatgccggagctgctggtgtttcccgcccagacagatctgcatgaacacccactgtaccgggccggacacctcattctgcaggacagggccagctgtctcccagccatgctgctggaccccccgccaggctcccatgtcatcgatgcctgtgccgccccaggcaataagaccagtcacttggctgctcttctgaagaaccaagggaagatctttgcctttgacctggatgccaagcggctggcatccatggccacgctgctggcccgggctggcgtctcttgctgtgaactggctgaggaggacttcctgggcggtctccccctcggatcc

SEQ ID NO: 193079 - DNA, 619 bp, Homo Sapiens; identical to SEQ ID NO: 180710

SEQ ID NO: 193080 - DNA, 1526 bp, Homo Sapiens; identical to SEQ ID NO: 185650
  misc_feature (185)..(270): n is a, c, g, or t

SEQ ID NO: 193081 - DNA, 1069 bp, Homo Sapiens
actcattctagctagttcaactttcattgccatttcagccagcataaatgatattgcttggtgctctacaagtagctttccgaaagttttcctttccagggcatacttggtagcttcatccaaagctctttgtgctaatccaacagcaccagcagctactacaggtctggttttatcaaaagctcccattgcaactttgaaaccagctccgtcaccaattaaaacattttctttaggcactttcacatcttcgaagacaattcctctagtatctgaacatcgctggcccatgtttaattcctttctcccaatctgaattcctggggtatctgcttccacaatgaatccagtaaaggctttattagcaggagctttaggatctggatcagaacgtgccaataaaaaataccaattagcttttcctccgttggttatccacatcttctgaccattaataatatactcatctcctttcttttctgctttggtctttataccagctacatcagagcctgctccaggttctgttacacaataagcacacatcaatggctcctcagtcattctccccaaatacttcttcttttgttgatcatttccagcaataataataggcatttgccccaaagaatttccttcaatagcagtctgaacccctgtacatccataagccaattcttcactaattaaacaagcatcaaaagttccaagtccaagacctccacagttctctggaatgtgtgtgttcattaaaccaagttcccaggctcttctaattagggggactggatattcaccagttttatcatattctgcagccactgggatgatttcctctctggcaaatttacgagcagtagcttgaaattctttctgctgttcggtgaactcaaaactaaatcctaatcctggttcacgttgtcgattggcttttgtatgctgtgatctccaatgaaaacgagaaatacttctcaggaccctgcagcatcgcccgaaccccgctgccatgttggctcccgttccggccactcggacaataatacacgggtcacggccttgacatacccaa

SEQ ID NO: 193082 - DNA, 1161 bp, Homo Sapiens
  misc_feature (130)..(148): n is a, c, g, or t
aaaaattctgagtcttgggcaactgttctcttgtaactactttacagtttctaaaagcagttattgtccaaagctggaagaacttaagtcttctcagatgagcatgtgaatgaatggagggaggtaaacnnnnnnnnnnnnnnnnnnngatgaggtctgataggggagcagccggataagaaaatcaaaaaaggaacagtaatttaaagtttattccagctataatgcaggttattctgactttaaggtagcatcacatggcatacttctgagtccattcccgagatattctgttgtacttatctctgtctgttttatagatccgtgcaatctctggcactagggggtcatctgggtttggatcacatagcagtgaacaaatggataaaagaactttagaaattgttaaagcaggcgaccactgtgatcttagaatatcgagacaaatgctgccattactgttaatatttggatgataaattcttgttgtaaatgcaaccttaggtggtttgaaggggtagtctgtaggaaaatgaattgtcaaaaagaatacaccgccttgatatgggctgtcattaggtcccataattgtggcttgccaatgaaacatatcatccccaactggacctgcagaacattgtgctggagggtcacgggccaaatcactaagttccttattaatccgtttcagcgccatagtgtgtgcttgtcgtctggctcctcactctctcggtgtatgctcaaaggtccggccaaaactcttgattatcccggcggcggggcaggattgtctcgtctcacaccagctctgccagacacaggcgccttttgcaaaaacggagcagatcagcactcgcacaggccccgaagagcccctgatgaatccaggtcccttaagacagccgcgatccggggtgggtggggtggcgtggcaaagccaccaacagcctctgtaccgtgctttcggcccgaagtgggggcgagggtgacgggaagagcggaggtggtggctacaagtttaacttcccggcctctagaaaggaagagacccgggtgggagaggaagaggcgtaggagaaaggggtgggtgcggggcagggtccggagcccagcagaggaggagccggggcctagtcggcgctataccggcgtcactagggc

SEQ ID NO: 193083 - DNA, 1443 bp, Homo Sapiens; identical to SEQ ID NO: 185653
  misc_feature (475)..(538): n is a, c, g, or t
  misc_feature (893)..(911): n is a, c, g, or t
  misc_feature (1041)..(1051): n is a, c, g, or t

SEQ ID NO: 193084 - DNA, 955 bp, Homo Sapiens
  misc_feature (130)..(148): n is a, c, g, or t
aaaaattctgagtcttgggcaactgttctcttgtaactactttacagtttctaaaagcagttattgtccaaagctggaagaacttaagtcttctcagatgagcatgtgaatgaatggagggaggtaaacnnnnnnnnnnnnnnnnnnngatgaggtctgataggggagcagccggataagaaaatcaaaaaaggaacagtaatttaaagtttattccagctataatgcaggttattctgactttaaggtagcatcacatggcatacttctgagtccattcccgagatattctgttgtacttatctctgtctgttttatagatccgtgcaatctctggcactagggggtcatctgggtttggatcacatagcagtgaacaaatggataaaagaactttagaaattgttaaagcaggcgaccactgtgatcttagaatatcgagacaaatgctgccattactgttaatatttggatgataaattcttgttgtaaatgcaaccttaggtggtttgaaggggtagtctgtaggaaaatgaattgtcaaaaagaatacaccgccttgatatgggctgtcattaggtcccataattgtggcttgccaatgaaacatatcatccccaactggacctgcagaacattgtgctggagggtcacgggccaaatcactaagttccttattaatccgtttcagcgccatagtgtgtgcttgtcgtctggctcctcactctctcggtgtatgctcaaaggtccggccaaaactcttgattatcccggcggcggggcaggattgtctcgtctcacaccagctctgccagacacaggcgcagaggggccggggcctccctcaagctgcggcctcggcctcctccccgcgcggcagctggtgcctccccggccctacggggctcacgcgcacgacacagccacaagatgtcgccaacttttttgtacaaag

SEQ ID NO: 193085 - DNA, 1320 bp, Homo Sapiens; identical to SEQ ID NO: 180712

SEQ ID NO: 193086 - DNA, 1292 bp, Homo Sapiens; identical to SEQ ID NO: 185654

SEQ ID NO: 193087 - DNA, 1515 bp, Homo Sapiens
  misc_feature (182)..(200): n is a, c, g, or t
  misc_feature (330)..(340): n is a, c, g, or t
ttggcggatctataaaacagacagagataagtacaacagaatatctcgggaatggactcagaagtatgccatgtgatgctaccttaaagtcagaataacctgcattatagctggaataaactttaaattactgttccttttttgattttcttatccggctgctcccctatcagacctcatcnnnnnnnnnnnnnnnnnnngtttacctccctccattcattcacatgctcatctgagaagacttaagttcttccagctttggacaataactgcttttagaaactgtaaagtagttacaagagaacagttgcccatgactcagaatttttnnnnnnnnnnntggagcatgtgtattatgtggccaatgtcttcactctaacttggttatgagactaaaaccattcctcactgctctaacatgctgaagaaatcatctgagggggagggagatggatgctcagttgtcacatcaaaggatacagcattattctagcagcatccattcttgtttaagccttccactgttagagatttgaggttacatgatatgctttatgctcataactgatgtggctggagaattggtattgaatttatagcatcagcagaacagaaaatgtgatgtattttatgcatgtcaataaaggaatgacctgttcttgttctacagagaatggaaattggaagtcaaacaccctttgtattccaaaatagggtctcaaacattttgtaattttcatttaaattgttaggaggcttggagctattagttaatctatcttccaatacactgtttaatatagcactgaataaatgatgcaagttgtcaatggatgagtgatcaactaatagctctgctagtaattgatttatttttcttcaataaagttgcataaaccaatgagttagctgcctggattaatcagtatgggaaacaatcttttgtaaatgcaaagctgttttttgtatatactgttgggatttgcttcattgtttgacatcaaatgatgatgtaaagttcgaaagagtgaatattttgccatgttcagttaaagtgcacagtctgttacaggttgacacattgcttgacctgatttatgcagaattaataagctatttggatagtgtagctttaatgtgctgcacatgatactggcagccctagagttcatagatggacttttgggacccagcagttttgaaatgtgtttatggagtttaagaaatttattttccaggtgcagcccctgtctaactgaaatttctcttcaccttgtacacttgacagctgaaaaaaaacaacatgggagtaataatgggtcaaaatttgcaaaataaagtactgttttggtgtgggagttgtcatgaggctgtgttgaagtgacttatctatgtgggatattgagtatccattgaaatggatttgttcagccatttacattaatgagcatttaaatgcaacagatatcatttcaggtgacttaacatgaatgaataaaagtcaatgctattgga

SEQ ID NO: 193088 - DNA, 1070 bp, Homo Sapiens
  misc_feature (127)..(137): n is a, c, g, or t
  misc_feature (267)..(285): n is a, c, g, or t
gacaactgagcatccatctccctccccctcagatgatttcttcagcatgttagagcagtgaggaatggttttagtctcataaccaagttagagtgaagacattggccacataatacacatgctccannnnnnnnnnnaaaaattctgagtcttgggcaactgttctcttgtaactactttacagtttctaaaagcagttattgtccaaagctggaagaacttaagtcttctcagatgagcatgtgaatgaatggagggaggtaaacnnnnnnnnnnnnnnnnnnngatgaggtctgataggggagcagccggataagaaaatcaaaaaaggaacagtaatttaaagtttattccagctataatgcaggttattctgactttaaggtagcatcacatggcatacttctgagtccattcccgagatattctgttgtacttatctctgtctgttttatagatccgtgcaatctctggcactagggggtcatctgggtttggatcacatagcagtgaacaaatggataaaagaactttagaaattgttaaagcaggcgaccactgtgatcttagaatatcgagacaaatgctgccattactgttaatatttggatgataaattcttgttgtaaatgcaaccttaggtggtttgaaggggtagtctgtaggaaaatgaattgtcaaaaagaatacaccgccttgatatgggctgtcattaggtcccataattgtggcttgccaatgaaacatatcatccccaactggacctgcagaacattgtgctggagggtcacgggccaaatcactaagttccttattaatccgtttcagcgccatagtgtgtgcttgtcgtctggctcctcactctctcggtgtatgctcaaaggtccggccaaaactcttgattatcccggcggcggggcaggattgtctcgtctcacaccagctctgccagacacaggcgcttggtatcgaggagacgactctcgcgagaacttcgtggctggctaaccgaagcggtagctctgcaatgacttaagagcagttttgtgcgcccaacttttttgtacaaa

SEQ ID NO: 193089 - DNA, 912 bp, Homo Sapiens
  misc_feature (500)..(518): n is a, c, g, or t
  misc_feature (648)..(658): n is a, c, g, or t
cccataaagccaactttgtacaaaaaagttgggggatatgtttcattggcaagccacaattatgggacctaatgacagcccatatcaaggcggtgtattctttttgacaattcattttcctacagactaccccttcaaaccacctaaggttgcatttacaacaagaatttatcatccaaatattaacagtaatggcagcatttgtctcgatattctaagatcacagtggtcgcctgctttaacaatttctaaagttcttttatccatttgttcactgctatgtgatccaaacccagatgaccccctagtgccagagattgcacggatctataaaacagacagagataagtacaacagaatatctcgggaatggactcagaagtatgccatgtgatgctaccttaaagtcagaataacctgcattatagctggaataaactttaaattactgttccttttttgattttcttatccggctgctcccctatcagacctcatcnnnnnnnnnnnnnnnnnnngtttacctccctccattcattcacatgctcatctgagaagacttaagttcttccagctttggacaataactgcttttagaaactgtaaagtagttacaagagaacagttgcccaagactcagaatttttnnnnnnnnnnntggagcatgtgtattatgtggccaatgtcttcactctaacttggttatgagactaaaaccattcctcactgctctaacatgctgaagaaatcatctgagggggagggagatggatgctcagttgtcacatcaaaggatacagcattattctagcagcatccattcttgtttaagccttccactgttagagatttgagttacatgatatgctttatgctcataactgatgtggctggagaattggtattgaattt

SEQ ID NO: 193090 - DNA, 1117 bp, Homo Sapiens
  misc_feature (866)..(884): n is a, c, g, or t
  misc_feature (1014)..(1025): n is a, c, g, or t
ttggcccgccctcctggtccaatctccgatctgtttagtaagaaggtgctgttccgagaagaaggaaaagggcttgacacgtattcactcggccccggacgtgggaagcaagccgtctggcttcggcctcacatcggtcttgtgctcgggacggcggcgttggcggactgatccgcggcggtgaagaggcgcctgtgtctggcagagctggtgtgagacgagacaatcctgccccgccgccgggataatcaagagttttggccggacctttgagcatacaccgagagagtgaggagccagacgacaagcacacactatggcgctgaaacggattaataaggaacttagtgatttggcccgtgaccctccagcacaatgttctgcaggtccagttggggatgatatgtttcattggcaagccacaattatgggacctaatgacagcccatatcaaggcggtgtattctttttgacaattcattttcctacagactaccccttcaaaccacctaaggttgcatttacaacaagaatttatcatccaaatattaacagtaatggcagcatttgtctcgatattctaagatcacagtggtcgcctgctttaacaatttctaaagttcttttatccatttgttcactgctatgtgatccaaacccagatgaccccctagtgccagagattgcacggatctataaaacagacagagataagtacaacagaatatctcgggaatggactcagaagtatgccatgtgatgctaccttaaagtcagaataacctgcattatagctggaataaactttaaattactgttccttttttgattttcttatccggctgctcccctatcagacctcatcnnnnnnnnnnnnnnnnnnngtttacctccctccattcattcacatgctcatctgagaagacttaagttcttccagctttggacaataactgcttttagaaactgtaaagtagttacaagagaacagttgcccaagactcagaatttttnnnnnnnnnnnntggagcatgtgtattatgtggccaatgtcttcactctaacttggttatgagactaaaaccattcctcactgctctaacatgctgaagaaatc

SEQ ID NO: 193091 - DNA, 929 bp, Homo Sapiens
ccttataaaagccaactttgtacaaaaaagttgggtctgagttcacaggaccacagaatactggccatggtgcaacttctggttttggcagtgcttttacaggacaacaaggatatgaaaattcaggaccagggttctggacaggcttgggaactggtggaatactaggatatttgtttggcagcaatagagcggcaacacccttctcagactcgtggtactacccgtcctatcctccctcctaccctggcacgtggaatagggcttactcaccccttcatggaggctcgggcagctattcggtatgttcaaactcagacacgaaaaccagaactgcatcaggatatggtggtaccaggagacgataaagtagaaagttggagtcaaacactggatgcagaaattttggatttttcatcactttctctttagaaaaaaagtactacctgttaacaattgggaaaaggggatattcaaaagttctgtggtgttatgtccagtgtagctttttgtattctattatttgaggctaaaagttgatgtgtgacaaaatacttatgtgttgtatgtcagtgtaacatgcagatgtatattgcagtttttgaaagtgatcattactgtggaatgctaaaaatacattaatttctaaaacctgtgatgccctaagaagcattaagaatgaaggtgttgtactaatagaaactaagtacagaaaatttcagttttaggtggttgtagctgatgagttattacctcatagagactataatattctatttggtattatattatttgatgtttgctgttcttcaaacattttaaatcaagctttggactaattatgctaatttgtgagttctgatcacttttgagctctgaagctttgaatcattcagtggtggaagatgggccttcctggtaactgaata

SEQ ID NO: 193092 - DNA, 608 bp, Homo Sapiens
ctttgtacaaaaaagttgggtgtaacatgcctatgtaaattgcagtttttgaaagtgatcattactgtggaatgctaaaaatacattaatttctaaaacctgtgatgccctaagaagcattaagaatgaaggtgttgtactaatagaaactaagtacagaaaatttcagttttaggtggttgtagctgatgagttattacctcatagagactataatattctatttggtattatattatttgatgtttgctgttcttcaaacatttaaatcaagctttggactaattatgctaatttgtgagttctgatcacttttgagctctgaatctttgaatcattcagtggtggagatggccttctggtaactgaatattaccttctgtaggaaaaggtggaaaataagcatctagaaggttgttgtgaatgactctgtgctggcaaaaatgcttgaaacctctatatttctttcgttcataagaggtaaaggtcaaatttttcaacaaaagtcttttaataacaaaaacatgcagttctctgtgaaatctcaaatattgttgtaatagtctgtttcaatcttaaaaagaatcaataagaacaaacaaggggaa

SEQ ID NO: 193093 - DNA, 850 bp, Homo Sapiens
ttgggtccggtctcaaaatggaggtaaaaccgccgcccggtcgcccccagcccgactccggccgtcgccgtcgccgccggggggaggagggccatgatccaaaggaaccagagcagttgagaaaactgtttattggtggtctgagctttgaaactacagatgatagtttacgagaacattttgagaaatggggcacactcacagattgtgtggtaatgagagacccccaaacaaaacgttccaggggctttggttttgtgacttattcttgtgttgaagaggtggatgcagcaatgtgtgctcgaccacacaaggttgatgggcgtgtagtggaaccaaagagagctgtttctagagaggattctgtaaagcctggtgcccatctaacagtgaagaaaatttttgttggtggtattaaagaagatacagaagaatataatttgagagactactttgaaaagtatggcaagattgaaaccatagaagttatggaagacaggcagagtggaaaaaagagaggatttgcttttgtaacttttgatgatcatgatacagttgataaaattgttgttcagaaataccacactattaatgggcataattgtgaagtgaaaaaggccctttctaaacaagagatgcagtctgctggatcacagagaggtcgtggaggtggatctggcaattttatgggtcgcggagggaactttggaggtggtggaggtaattttggccgtggtggaaactttggtggaagaggaggctatggtggtggaggtggttggcagcagagtagttatggaagaggtgatggtggatataatggatttggaggtgatggtggcaactatgg

SEQ ID NO: 193094 - DNA, 1540 bp, Homo Sapiens; identical to SEQ ID NO: 180715
  misc_feature (1035)..(1043): n is a, c, g, or t

SEQ ID NO: 193095 - DNA, 1370 bp, Homo Sapiens; identical to SEQ ID NO: 180716
  misc_feature (487)..(743): n is a, c, g, or t
  misc_feature (1039)..(1049): n is a, c, g, or t
  misc_feature (1248)..(1257): n is a, c, g, or t

SEQ ID NO: 193096 - DNA, 1403 bp, Homo Sapiens; identical to SEQ ID NO: 185658

SEQ ID NO: 193097 - DNA, 633 bp, Homo Sapiens; identical to SEQ ID NO: 180717
  misc_feature (296)..(306): n is a, c, g, or t
  misc_feature (506)..(516): n is a, c, g, or t

SEQ ID NO: 193098 - DNA, 1461 bp, Homo Sapiens; identical to SEQ ID NO: 180718
  misc_feature (877)..(897): n is a, c, g, or t
  misc_feature (1003)..(1011): n is a, c, g, or t

SEQ ID NO: 193099 - DNA, 935 bp, Homo Sapiens; identical to SEQ ID NO: 180719
  misc_feature (591)..(599): n is a, c, g, or t
  misc_feature (705)..(725): n is a, c, g, or t

SEQ ID NO: 193100 - DNA, 1424 bp, Homo Sapiens; identical to SEQ ID NO: 185664

SEQ ID NO: 193101 - DNA, 1513 bp, Homo Sapiens
ggattcctctgtatgacaggcaggtctgaccttgaggaagactggtagcccacatcctctgcttttatgggcttaatgatatggcctggcttggtgacgacttgggagtagtcagcttttggaaagccctctgggtgttccatgtggatcctataggggtctggatggtcctttcaaattgccgatggtgggtaaatggatatggaagcacttgtacctgatgagctgctgcgtggatgttgcgcttctcactgataatcacatttggcaaattcttatcttttcttggaggaccctcaggggctttaatgagaaactggcgtcttttcttggcactgggctttaggcccacaccaccccactcgccccagccaggtagtgtcaggtccacgtcctttggcttactcgcctccacagcttccctcttctctttcaagaaatctctgatgacatcatccccagcaaaagcttcctttatcatctgcctttggtctctctcctcttcatcttccagctcctctattattgtgggaactgccaaagacctcacggaaggagactgtgtggtcaggaagttctgtaggttgatcagttgctccttctctttcttctccttaggggcatcaggccgattatttggggtcctctctgactgctgtccttctaacacaggtctgggaagctccttattttgaaaacaatcttcttttcccagctcttctagctcttccagagtttgtactctctctgacctctgtagcaataggggttccgcttcttctggggcaggttcctctctctggacctggggaacagtcccctctgaacttgctttttgcttcctggactgatgtttttccttcaatttctgagatagtactctcaattcagacagcacctcctggctgccagaatcttttgtttcttgactgcctgctggctcagcatcttggctgagctcagatctttttctaagggatcgcctttcctcaaattctctcaacaaaatttcttcttctgccactggtctttcttctccctcactttcagaaactccatgggcctcaagctctggcagttgctcagggtcctcctgggttgcagcctctttggtgtcactggtgcagctcctgagcatccagggattcggcccatctgcattcatctgcacttcattcactacatcagggacaaggagttcttccacatcttctgtgcctccctcctcttcctcactctcagaggctacctggagtttctgtgtcagttctttgttcttagacaactgttcctgcatagcttggcgagcctccaggtcatatttggccataattgcctttgacttggcccatttcccactgttttggtgcttaaggctcattctttccatcattctggccttttcaattttttccagttcttctagtgctgcagctggattaaccttccgcagctgctcaaactcttttagggctttctaaggcctttcctttccaacttttttgtacaaagt

SEQ ID NO: 193102 - DNA, 905 bp, Homo Sapiens; identical to SEQ ID NO: 185666

SEQ ID NO: 193103 - DNA, 1433 bp, Homo Sapiens; identical to SEQ ID NO: 180722

SEQ ID NO: 193104 - DNA, 975 bp, Homo Sapiens; identical to SEQ ID NO: 180723

SEQ ID NO: 193105 - DNA, 683 bp, Homo Sapiens
  misc_feature (615)..(627): n is a, c, g, or t
actttgtacaaaaaagttgggccttagccccctaacaaaaaccagaatgaatctttgaaggcacaagactctgcttttgccactcttcctctttcctggtatagaagatggatgtaggagagcttcttttctaactaccatctgatcagacaaggaatgaagcaatgactgtgggctgggaaactgtacctacctctcttcccactgcaaatttctgggatagaccaaaagtgaatttgattatgtgttggctgaagttcttcattctgactgttgaggggaggttttcctttgaagagttttcatcccagactcagctgtcttttcacatggatgaaataattcctgctaccaacaacagagcttcaccaggaagttgagttttcaagatgccttgttgctttgaagaagggagtgatgtcaattctcttgttacattctccctttagcaacctgagtaagagactctctgccactgggctgcaaaaaaataaattacttgaatctccccttggcccaggctgaggtactatcttgtcctatacacttctacttggtcactttgctttcttcgttaatggaacatacagtagcatgttaagagggatttcatgnnnnnnnnnnnnnaaagttaaaaaattacatgatgcagagattcaggttttcctttaaataaacaaaac

SEQ ID NO: 193106 - DNA, 2752 bp, Homo Sapiens; identical to SEQ ID NO: 185669
  misc_feature (84)..(120): n is a, c, g, or t

SEQ ID NO: 193107 - DNA, 1338 bp, Homo Sapiens; identical to SEQ ID NO: 185676
  misc_feature (245)..(296): n is a, c, g, or t
  misc_feature (926)..(934): n is a, c, g, or t

SEQ ID NO: 193108 - DNA, 1159 bp, Homo Sapiens; identical to SEQ ID NO: 185677
  misc_feature (101)..(109): n is a, c, g, or t
  misc_feature (705)..(705): n is a, c, g, or t
  misc_feature (725)..(812): n is a, c, g, or t
  misc_feature (970)..(982): n is a, c, g, or t
  misc_feature (1010)..(1018): n is a, c, g, or t

SEQ ID NO: 193109 - DNA, 1560 bp, Homo Sapiens; identical to SEQ ID NO: 185678
  misc_feature (279)..(327): n is a, c, g, or t
  misc_feature (958)..(966): n is a, c, g, or t

SEQ ID NO: 193110 - DNA, 1161 bp, Homo Sapiens; identical to SEQ ID NO: 185679
  misc_feature (101)..(109): n is a, c, g, or t
  misc_feature (696)..(813): n is a, c, g, or t
  misc_feature (972)..(984): n is a, c, g, or t
  misc_feature (1012)..(1020): n is a, c, g, or t

SEQ ID NO: 193111 - DNA, 1361 bp, Homo Sapiens
ttggatttctctccctggcaaggtctgaagacgggtaggagaataacctgtgtcagcgtgttatgatgccgtcccgtaccaacctggctactggaatccccagtagtaaagtgaaatattcaaggctctccagcacagacgatggctacattgaccttcagtttaagaaaacccctcctaagatcccttataaggccattgcacttgccactgtgctgtttttgattggcgcctttctcattattataggctccctcctgctgtcaggctacatcagcaaagggggggcagaccgggccgttccagtgctgatcattggcattctggtgttcctacccggattttaccacctgcgcatcgcttactatgcatccaaaggctaccgtggttactcctatgatgacattccagactttgatgactagcacccaccccatagctgaggaggagtcacagtggaactgtcccagctttaagatatctagcagaaactatagctgaggactaaggaattctgcagcttgcagatgtttaagaaaataatggccagattttttgggtccttcccaaagatgttaagtgaacctacagttagctaattaggacaagctctatttttcatccctgggccctgacaagtttttccacaggaatatgtatcatggaagaatagaggttattctgtaatggaaaagtgttgcctgccaccaccctctgtagagctgagcatttcttttaaatagtcttcattgccaatttgttcttgtagcaaatggaacaatgtggtatggctaatttcttattattaagtaatttattttaaaaatatctgagtatattatcctgtacacttatccctaccttcatgttccagtggaagaccttagtaaaatcaaagatcagtgagttcatctgtaatattttttttacttgctttcttactgacagcaaccaggaatttttttatcctgcagagcaagttttcaaaatgtaaatacttcctctgtttaacagtccttggaccattctgatccagttcaccagtaggttggacagcatataatttgcatcattttgtcccttgtaaatcaagatgttctgcagattattcctttaacggccggacttttggctgtttcctaatgaaacatgtagtggttattatttagagtttatagccgtattgctagcaccttgtagtatgtcatcattctgctcatgattccaaggatcagcctggatgcctagaggactagatcaccttagtttgattctattttttagcttgcaaaaagtgacttatattccaaagaaattaaaatgttgaaatccaaatcctaaaaataaaatgatttaacttc

SEQ ID NO: 193112 - DNA, 1012 bp, Homo Sapiens
gagcaatgctttttccataatagccaactttgtacaaaaaagttggggcacttaagcgggccatgccatgcaaccttgggcgctgccaaccgtgggcgagctctgggtgtgcgggcggcctggcgcggcgctccgctgtgtcagcgtgttatgatgccgtcccgtaccaacctggctactggaatccccagtagtaaagtgaaatattcaaggctctccagcacagacgatggctacattgaccttcagtttaagaaaacccctcctaagatcccttataaggccatcgcacttgccactgtgctgtttttgattggcgcctttctcattattataggctccctcctgctgtcaggctacatcagcaaagggggggcagaccgggccgttccagtgctgatcattggcattctggtgttcctacccggattttaccacctgcgcatcgcttactatgcatccaaaggctaccgtggttactcctatgatgacattccagactttgatgactagcacccaccccatagctgaggaggagtcacagtggaactgtcccagctttaagatatctagcagaaactatagctgaggactaaggaattctgcagcttgcagatgtttaagaaaataatggccagattttttgggtccttcccaaagatgttaagtgaacctacagttagctaattaggacaagctctatttttcatccctgggccctgacaagtttttccacaggaatatgtatcatggaagaatagaggttattctgtaatggaaaagtgttgcctgccaccaccctctgtagagctgagcatttcttttaaatagtcttcattgccaatttgttcttgtagcaaatggaacaatgtggtatggctaatttcttattattaagtaatttattttaaaatatctgagtatattatcctgtacacttatcccttacctttcatgtttccagtggaagacctttagttaaaatcaaagatcagttgagttcatctggtaa

SEQ ID NO: 193113 - DNA, 1046 bp, Homo Sapiens; identical to SEQ ID NO: 180727

SEQ ID NO: 193114 - DNA, 933 bp, Homo Sapiens
atgatgggaggggatgttcacgaaggatagtgggtagctgaggcttcaaagggcctgcatgggacaggggtttagggggagtgaagagggacaatgaagtcttgggagtaaagatgggaataaacaggagaaaggaacgaggaggcaggtgctgggatgcagagtccagctgcgctgcacagcctgggcagcaggctgagtatgggctcctcactcccacctcctggccttcaaggccctacttgttgccccagacagccatctttgagaacacaggtcttgggaggaagcggctggacttcatgtaggcagagatcttctccaagccctcaaagcgggagatgaagtccttcagatttgggaaggcgtccaagcacttgggctcaaatatacggtggaggtcaaggacatcatagacgagaaaatctacaaaagtgatcttgtttcctgcaaaccatggccgcttccccagaaactctgagtagagctttagcttttcagggagttcctccaagtactttggcttcagtttctcaaattctggattgtagcagatcatgcccagctgcatatggttgtccatggtctggttctccaaaatgtccacacgaatcttctcctcttctgtctccccacacaggttgtgcttgcgggcaatgtagcacaagatggcgttgctctgggtgatcttgtgagccccatcaatcaagtagggcagattgggaaagtccaggcccagcttgaatttttcattcagccactggcttctgtcataatcaggagcgtcccccatcgtgtacttcttttcctcatagcttgagtctgtgtattccaggagcaggcggatggcgtgggccagcccgcggatgtcccagtaccccagtatcatgggcatggtgctggttggtgcggatccaacttttttgtacaaag

SEQ ID NO: 193115 - DNA, 820 bp, Homo Sapiens; identical to SEQ ID NO: 185683

SEQ ID NO: 193116 - DNA, 652 bp, Homo Sapiens
tgagccactgcgcccggccctgtctggcttcttgaaggcagacacaagtctgcaggctgttcacgcccccatctcattatcttttctcacgggtacctcttctgatacaatcacagcaaccctggcctcggccccgccctgtccctgccatgcaacttcacaactcagctggcctagacccctgggaggcctccaagtccctagggttagacacctcctggggtgctatggactgtcggggctccaaggagccgagtgtgggggaaactcactgtgggaggcgctcctgacctgcagggagctggaatgctgtgggagggccctgaccccggggcccatggagctccctaggctcctctggccacacctcaccacccaccccctcccctctccagcagttccagtttgtggaagtcccaggcaatcactgtgtccacatgagcgaaccccagcacgtggccagtatcatcagctccttcttacagtgcacacacatgctcccagcccagctgtagctctgggcctggaactatgaagacctagtgctcccagactcaacactgggactctgagttcctgagcccccacaacaaggccaggggatggtgggggacaggcctcactagtcttgaggcccagccttaggatggta

SEQ ID NO: 193117 - DNA, 945 bp, Homo Sapiens; identical to SEQ ID NO: 185686

SEQ ID NO: 193118 - DNA, 1055 bp, Homo Sapiens; identical to SEQ ID NO: 180731

SEQ ID NO: 193119 - DNA, 628 bp, Homo Sapiens; identical to SEQ ID NO: 185692
  misc_feature (161)..(189): n is a, c, g, or t

SEQ ID NO: 193120 - DNA, 864 bp, Homo Sapiens; identical to SEQ ID NO: 185694
  misc_feature (190)..(222): n is a, c, g, or t
  misc_feature (668)..(685): n is a, c, g, or t

SEQ ID NO: 193121 - DNA, 1344 bp, Homo Sapiens; identical to SEQ ID NO: 185695
  misc_feature (972)..(1004): n is a, c, g, or t

SEQ ID NO: 193122 - DNA, 2353 bp, Homo Sapiens; identical to SEQ ID NO: 185698
  misc_feature (372)..(411): n is a, c, g, or t

SEQ ID NO: 193123 - DNA, 973 bp, Homo Sapiens
ccaactttgtacaattggattgtcgtcttctgtccaagttggtcgcttccctgcgccaaagtgagcagtagccaacatgtcagggtgggagtcatattacaaaaccgagggcgatgaagaagcagaggaagaacaagaagagaaccttgaagcaagtggagactataaatattcaggaagagatagtttgatttttttggttgatgcctccaaggctatgtttgaatctcagagtgaagatgagttgacaccttttgacatgagcatccagtgtatccaaagtgtgtacatcagtaagatcataagcagtgatcgagatctcttggctgtggtgttctatggtaccgagaaagacaaaaattcagtgaattttaaaaatatttacgtcttacaggagctggataatccaggtgcaaaacgaattctagagcttgaccagtttaaggggcagcagggacaaaaacgtttccaagacatgatgggccacggatctgactactcactcagtgaagtgctgtgggtctgtgccaacctctttagtgatgtccaattcaagatgagtcataagaggatcatgctgttcaccaatgaagacaacccccatggcaatgacagtgccaaagccagccgggccaggaccaaagccggtgatctccgagatacaggcatcttccttgacttgatgcacctgaagaaacctgggggctttgacatatccttgttctacagagatatcatcagcatagcagaggatgaggacctcagggttcactttgaggaatccagcaagctagaagacctgttgcggaaggttcgcgccaaggagaccaggaagcgagcactcagcaggttaaagctgaagctcaacaaagatatagtgatctctgtgggcatttataatctggtccagaagctctcaagcctcctccaataaagctctatcgggaaacaaatgaaccagtgaaaaccaaga

SEQ ID NO: 193124 - DNA, 1267 bp, Homo Sapiens
actttgtacaaaaaagttgggtgagcagtagccaacatgtcagggtgggagtcatattacaaaaccgagggcgatgaagaagcagaggaagaacaagaagagaaccttgaagcaagtggagactataaatattcaggaagagatagtttgatttttttggttgatgcctccaaggctatgtttgaatctcagagtgaagatgagttgacaccttttgacatgagcatccagtgtatccaaagtgtgtacatcagtaagatcataagcagtgatcgagatctcttggctgtggtgttctatggtaccgagaaagacaaaaattcagtgaattttaaaaatatttacgtcttacaggagctggataatccaggtgcaaaacgaattctagagcttgaccagtttaaggggcagcagggacaaaaacgtttccaagacatgatgggccacggatctgactactcactcagtgaagtgctgtgggtctgtgccaacctctttagtgatgtccaattcaagatgagtcataagaggatcatgctgttcaccaatgaagacaacccccatggcaatgacagtgccaaagccagccgggccaggaccaaagccggtgatctccgagatacaggcatcttccttgacttgatgcacctgaagaaacctgggggctttgacatatccttgttctacagagatatcatcagcatagcagaggatgaggacctcagggttcactttgaggaatccagcaagctagaagacctgttgcggaaggttcgcgccaaggagaccaggaagcgagcactcagcaggttaaagctgaagctcaacaaagatatagtgatctctgtgggcatttataatctggtccagaaggctctcaagcctcctccaataaagctctatcgggaaacaaatgaaccagtgaaaaccaagacccggacctttaatacaagtacaggcggtttgcttctgcctagcgataccaagaggtctcagatctatgggagtcgtcagattatactggagaaagaggaaacagaagagctaaaacggtttgatgatccaggtttgatgctcatgggtttcaagccgttggtactgctgaaaaacaccattacctgaggccctccctgttcgtgtacccagaggagtcgctggtgattgggagctcaaccctgttcagtgctctgctcatcaagtgtctggagaaggaggttgcagcattgtgcagatacacaccccgcaaaacatcccctcctttattttg

SEQ ID NO: 193125 - DNA, 840 bp, Homo Sapiens; identical to SEQ ID NO: 180732
  misc_feature (350)..(369): n is a, c, g, or t
  misc_feature (372)..(651): n is a, c, g, or t

SEQ ID NO: 193126 - DNA, 936 bp, Homo Sapiens; identical to SEQ ID NO: 180733

SEQ ID NO: 193127 - DNA, 2594 bp, Homo Sapiens; identical to SEQ ID NO: 185700
  misc_feature (955)..(986): n is a, c, g, or t
  misc_feature (1350)..(1365): n is a, c, g, or t

SEQ ID NO: 193128 - DNA, 1489 bp, Homo Sapiens; identical to SEQ ID NO: 185702
  misc_feature (1146)..(1207): n is a, c, g, or t

SEQ ID NO: 193129 - DNA, 1592 bp, Homo Sapiens; identical to SEQ ID NO: 180734

SEQ ID NO: 193130 - DNA, 1381 bp, Homo Sapiens; identical to SEQ ID NO: 180735
  misc_feature (1159)..(1172): n is a, c, g, or t

SEQ ID NO: 193131 - DNA, 1277 bp, Homo Sapiens
ttggagaaaagcaagagacacaaagaagaactggacggggctggaagagaagagtatcccatggatatttggctattgctggcctcctatatccgtcctgaggacattgtgaatttttccctgatttgtaagaatgcctggactgtcacttgcactgctgccttttggaccaggttgtaccgaaggcactacacgctggatgcttccctgcctttgcgtctgcgaccagagtcaatggagaagctgcgctgtctccgggcttgtgtgatccgatctctgtaccatatgtatgagccatttgctgctcgaatctccaagaatccagccattccagaaagcacccccagcacattaaagaattccaaatgcttacttttctggtgcagaaagattgttgggaacagacaggaaccaatgtgggaattcaacttcaagttcaaaaaacagtcccctaggttaaagagcaagtgtacaggaggattgcagcctcccgttcagtacgaagatgttcataccaatccagaccaggactgctgcctactgcaggtcaccaccctcaatttcatctttattccgattgtcatgggaatgatatttactctgtttactatcaatgtgagcacggacatgcggcatcatcgagtgagactggtgttccaagattcccctgtccatggtggtcggaaactgcgcagtgaacagggtgtgcaagtcatcctggacccagtgcacagcgttcggctctttgactggtggcatcctcagtacccattctccctgagagcgtagttactgcttcccatcccttgggggcagcctcgagtgtagtccattagtaatcagattccagtttggacagggtggctggattgtatatctcgttagtaatgtacatgctcttcaggttctagggctcctgttaggggagggagaaatgttgaatcgagggaaaacaactactatgatttataaacatattttaatgtaaaaatttgcatttaaaaggagtggccctgttttctgtgttaaaaccccatttggtgctattgagtttgttctttattcttttatcccagtgaaaattgttgatcttgctgtaggaaaaattaactctttgaatctccaaacaagggagtttcagcattcccttatggatcagaggaacctttaaaggcctgaaattgttgcttccagtttagctgcccctcaaattcaagtgaatattttcctttctccctttacccttctccagaaataaagcaggtgacagggttttc

SEQ ID NO: 193132 - DNA, 1048 bp, Homo Sapiens
  misc_feature (263)..(300): n is a, c, g, or t
  misc_feature (577)..(605): n is a, c, g, or t
ctttgtacaaaaaagttgggggaaaaattaacctctttgaatctccaaacaaggaagtttcagcattcccttatggatcagaggaaccttagaggcctgaaattgttgcttccagtttagctgcccctcaaattcaagtgaatattttcccttctccctttacccttctccagaaataaagcaggtgacagggttttcagaatcttaccatattgacttgtgtatcttttttaaaaaataatttgtgatatttattgcatacnnnnnnnnnnnnnnnnnnnnnnnnnnnnnnnnnnnnnngcatgaggctgataatggtgatgatgactttatacccttggtactatactaggaactttacatagtatctctacttctcacagtcttgcaaagtaggtgatattattcccattttatagttgagaaaacggaattagtgactgtacctataacaccagtaaatgcagagccaagattctgacccaggtctttttgttgtaccataagtttaaaagatgagtctcatttttcttgtggtagatggtggtaaaaaggagtaggcagagtgtacatagannnnnnnnnnnnnnnnnnnnnnnnnnnnnttgattgtggtatatgttattctaatcagccaaaaaaagtttagaagattgatgaaatgatcttttaaatatgtatttctgaataaaatgtaaaaccaagaaagttatttcaggaaggatagtgaccctttccttgaactgttagaagggcatttattaggctaaaacgtcattaacaaaatgcattgcatgttgaaaccagcctcttgaaccataagcacttagcgactttgctctgccctgtactgtgctgcttctgctgtcatcctgtgtgcctacagaagcctggtcttccgtccatgcagaaatgcttatgtcctcctgttgtttagatgactcctattgttcaggtgtactctgaggaagagaatcacgttttttctgttttgctaagagaaaaccttgctgcttgtctctcctcccacccctccaccatcccaaaa

SEQ ID NO: 193133 - DNA, 1226 bp, Homo Sapiens; identical to SEQ ID NO: 185707

SEQ ID NO: 193134 - DNA, 885 bp, Homo Sapiens; identical to SEQ ID NO: 185708

SEQ ID NO: 193135 - DNA, 1048 bp, Homo Sapiens; identical to SEQ ID NO: 185709

SEQ ID NO: 193136 - DNA, 1373 bp, Homo Sapiens; identical to SEQ ID NO: 180737

SEQ ID NO: 193137 - DNA, 566 bp, Homo Sapiens
ttggcctgcccagaaccctccaagcagacacaatggtaagaatggtgcctgtcctgctgtctctgctgctgcttctgggtcctgctgtcccccaggagaaccaagatggtcgttactctctgacctatatctacactgggctgtccaagcatgttgaaaacgtccccgcgtttcaggcccttggctcactcaatgacctccagttctttagatacaacagtaaagacaggaagtctcagcccatgggactctggagacaggtggaaggaatggaggattggaagcaggacagccaacttcagaaggccagggaggacatctttatggagaccctgaaagacattgtggagtattacaacgacagtaacgatcctccctctgtggtggtcaccagccaccaggccccaggagaaaagaataaactgaagtgcctggcctacgacttctacccagggaaaattgatgtgcactggactcgggccggcgaggtgcaggagcctgagttacggggagatgttcttcacaatggaaatggcacttaccagtcctgggtggtggtggcagtg

SEQ ID NO: 193138 - DNA, 1577 bp, Homo Sapiens; identical to SEQ ID NO: 185711
  misc_feature (229)..(247): n is a, c, g, or t
  misc_feature (323)..(345): n is a, c, g, or t

SEQ ID NO: 193139 - DNA, 1733 bp, Homo Sapiens; identical to SEQ ID NO: 185712
  misc_feature (1505)..(1524): n is a, c, g, or t
  misc_feature (1600)..(1622): n is a, c, g, or t

SEQ ID NO: 193140 - DNA, 1368 bp, Homo Sapiens; identical to SEQ ID NO: 185713
  misc_feature (214)..(236): n is a, c, g, or t
  misc_feature (312)..(330): n is a, c, g, or t
  misc_feature (1041)..(1096): n is a, c, g, or t

SEQ ID NO: 193141 - DNA, 1167 bp, Homo Sapiens; identical to SEQ ID NO: 180739

SEQ ID NO: 193142 - DNA, 874 bp, Homo Sapiens
tgcagctacgaacgggaccggaggaagcagcgggatggaggtggatgcagcagtagtccccagcgtgatggcctgcggagtgactgggagtgtttccgtcgctctccatccccttgtcattctcaacatctcagaccactggatccgcatgcgctcccaggaggggcggcctgtgcaggtgattggggctctgattggcaagcaggagggccgaaatatcgaggtgatgaactcctttgagctgctgtcccacaccgtggaagagaagattatcattgacaaggaatattattacaccaaggaggagcagtttaaacaggtgttcaaggagctggagtttctgggttggtataccacaggggggccacctgacccctcggacatccacgtccataagcaggtgtgtgagatcatcgagagccccctctttctgaagttgaaccctatgaccaagcacacagatcttcctgtcagcgtttttgagtctgtcattgatataatcaatggagaggccacaatgctgtttgctgagctgacctacactctggccacagaggaagcggaacgcattggtgtagaccacgtagcccgaatgacagcaacaggcagtggagagaactcccctgtggctgaacacctgatagcacagcacagcgccatcaagatgctgcacagccgcgtcaagctcatcttggaatacgtcaaggcctctgaagcgggagaggtcccctttaatcatgagatcctgcgggaggcctatgctctgtgtcactgtctcccggtgctcagcacagacaagttcaagacagatttttatgatcaatgcaacgacgtggggctcatggcctacctcggcaccatcaccaaaacgtgc

SEQ ID NO: 193143 - DNA, 1545 bp, Homo Sapiens; identical to SEQ ID NO: 180742

SEQ ID NO: 193144 - DNA, 1343 bp, Homo Sapiens; identical to SEQ ID NO: 180743
  misc_feature (1170)..(1178): n is a, c, g, or t

SEQ ID NO: 193145 - DNA, 984 bp, Homo Sapiens; identical to SEQ ID NO: 185714
  misc_feature (797)..(821): n is a, c, g, or t

SEQ ID NO: 193146 - DNA, 1308 bp, Homo Sapiens; identical to SEQ ID NO: 185715
  misc_feature (462)..(486): n is a, c, g, or t

SEQ ID NO: 193147 - DNA, 1932 bp, Homo Sapiens; identical to SEQ ID NO: 185716
  misc_feature (590)..(614): n is a, c, g, or t
  misc_feature (1601)..(1648): n is a, c, g, or t

SEQ ID NO: 193148 - DNA, 1382 bp, Homo Sapiens; identical to SEQ ID NO: 185717
  misc_feature (1119)..(1150): n is a, c, g, or t

SEQ ID NO: 193149 - DNA, 1489 bp, Homo Sapiens; identical to SEQ ID NO: 185718
  misc_feature (500)..(524): n is a, c, g, or t

SEQ ID NO: 193150 - DNA, 894 bp, Homo Sapiens
ttgtacaaaaaagttggctccaacaacctgccttcaatatagagtgccatcaacattgaaaacggcaaggccaactccgtgcgcaatgccgtcactcaggagtttggccccgtccctgacactgcccgctactacaagaaacatggcatcaggtgggtggtgatcggagacgagaactacggcgagggctcgagccgggagcatgcagctctggagcctcgccaccttgggggccgggccatcatcaccaagagctttgccaggatccacgagaccaacctgaagaaacagggcctgctgcctctgaccttcgctgacccggctgactacaacaagattcaccctgtggacaagctgaccattcagggcctgaaggacttcacccctggcaagcccctgaagtgcatcatcaagcaccccaacgggacccaggagaccatcctcctgaaccacaccttcaacgagacgcagattgagtggttccgcgctggcagtgccctcaacagaatgaaggaactgcaacagtgagggcagtgcctccccgccccgccgctggcgtcaagttcagctccacgtgtgccatcagtggatccgatccgtccagccatggcttcctattccaagatggtgtgaccagacatgcttcctgctccccgcttagcccacggagtgactgtggttgtggtgggggggttcttaaaataactttttagcccccgtcttcctattttgagtttggttcagatcttaagcagctccatgcaactgtatttatttttgatgacaagactcccatctaaaagtttttctcctgcctgatcatttcattggtggctgaaaggattctagagaaaccttttgttcttgccagggaaaacaagaatccaaaaaccc

SEQ ID NO: 193151 - DNA, 2129 bp, Homo Sapiens; identical to SEQ ID NO: 185721
  misc_feature (1015)..(1023): n is a, c, g, or t
  misc_feature (1220)..(1371): n is a, c, g, or t

SEQ ID NO: 193152 - DNA, 1970 bp, Homo Sapiens; identical to SEQ ID NO: 185722

SEQ ID NO: 193153 - DNA, 981 bp, Homo Sapiens
ctttgtacaaaaaagttgggttttcccagcaacagatgctcctgagcaatttattagtcaagtgacggtgctgaaatacttttctcattacatggaggagaacctcatggatggtggagatctgcctagtgttactgatattcgaagacctcggctctacctccttcagtggctaaaatctgataaggccctaatgatgctctttaatgatggcacctttcaggtgaatttctaccatgatcatacaaaaatcatcatctgtagccaaaatgaagaataccttctcacctacatcaatgaggataggatatctacaactttcaggctgacaactctgctgatgtctggctgttcatcagaattaaaaaatcgaatggaatatgccctgaacatgctcttacaaagatgtaactgaaagacttttcgaatggaccctatgggactcctcttttccactgtgagatctacagggaagccaaaagaatgatctagagtatgttgaagaagatggacatgtggtggtacgaaaacaattcccctgtggcctgctggactgggtggaaccagaacaggctaaggcatacagttcttgactttggacaatccaagagtgaaccagaatgcagttttccttgagatacctgttttaaaaggtttttcagacaattttgcagaaaggtgcattgattcttaaattctctctgttgagagcatttcagccagaggactttggaactgtgaatatacttcctgaaggggagggagaagggaggaagctcccatgttgtttaaaggctgtaattggagcagcttttggctgcgtaactgtgaactatggccatatataattttttttcattaatttttgaagatacttgtggctggaaaagtgcattccttgttaataaactttttattattacagcccaaagagcagtatttattatcaaatgtcttttttttatgttgacattttaaacc

SEQ ID NO: 193154 - DNA, 944 bp, Homo Sapiens; identical to SEQ ID NO: 185723

SEQ ID NO: 193155 - DNA, 835 bp, Homo Sapiens; identical to SEQ ID NO: 185727

SEQ ID NO: 193156 - DNA, 1404 bp, Homo Sapiens
  misc_feature (900)..(991): n is a, c, g, or t
  misc_feature (1130)..(1152): n is a, c, g, or t
gtagaggtcactgggagccttgcgcaactcgtaccactcggtaaccccgcctgtgaagtcctcaaagccctctgaggtgctgcccttgacagggcgtcgtagctgccatttaccttggcataggccttctcaagcagggcgctccagaactcgttgccttcggcagagtgcacgaacactagcttcccgtccttgatgggcagcaggtcatccacgaccacgtccacccactccccaaattgccacagctggaaatggaagatgccggcatagccattctggaagctctggccgtgcggaaccactcggtgcaggagggtgtcgttgagagtgagggaggcgatggccgccaagagccagcagtcccccagtgctccctggcagatgtctgtgcgggtagctccatccacaatgaactgggggtttgacagcagttccgtgggacgcttccacttgatgccataggtcttggaggaattgggacccaggtccttgtaacccaggctctggggtaccggggggaaggcctcatcacggaagagggtcccactctgcaggcatcgcacccgcagctgctcataatcctggcccaggtacttgatggcattctcatggcggcccaggcccagctccctggcccgctgcttctgcacttgggctgacaccccagtgcagtacaccggcgtgatgatctcctccgacatcctctcctttcccggatcccattgtcaggggcttgcagctctgtagtgagccagcaggtcaggtggggcagggcggagcctccagacagcacaaggaactgggggaggggtgtttgggggtcgctgcagtccctgaggctggcttcccggtggcagctcagggcagggcccaaccaggaagagcgctcctccccgnnnnnnnnnnnnnnnnnnnnnnnnnnnnnnnnnnnnnnnnnnnnnnnnnnnnnnnnnnnnnnnnnnnnnnnnnnnnnnnnnnnnnnnnnnnncccttatctctccggcacggtctctgactatctcttactcacggtgtctccccgcccctccctccgcaggccgggggccaattccgcgagaggacaaattagtaaaaggcagagcagtccccggggaggggccagcgcnnnnnnnnnnnnnnnnnnnnnnncgcggcggaagggcaccgcggggaacggagggggagggccgggcagggggtatttttaaccaggggcagcagctcgagttgcagggccggacggccgcaccccacgcgcgccctggcgggcattccggggcgattgtgcggcggcgccgcctcccgcagccccgggcccgcccggtccccagctcccctcgctccgcgcgaccgcagctgctcccgccgttcccagccagccccggcgcggggccgagccaa

SEQ ID NO: 193157 - DNA, 1397 bp, Homo Sapiens
ttggctcctagcctacagcaagccctgccctgccccatctttctacccaatttctcgctcttctgtttcacactcatttctttttactttggactaattgtggctgttgggactttggcttgattgctaaaatactttacttgtacttcctgatgatacaaacaatcctgcccacttcctctgccagatattgcacccactcgtcaggatttgtgcgtccttgactctgccccacccagtgctcccagcaggggcaggtgcaggaagctcactaggtggagatgttggaattggtttttcttgcagacaaagacctgcggaccaagggcttcagcctagagtcgtgccgcagcatggtgaacctcatggatcgtgatggcaatgggaagctgggcctggtggagttcaacatcctgtggaaccgcatccggaattacctgtccatcttccggaagtttgacctggacaagtcgggcagcatgagtgcctacgagatgcggatggccattgagtcggcaggcttcaagctcaacaagaagctgtacgagctcatcatcacccgctactcggagcccgacctggcggtcgactttgacaatttcgtttgctgcctggtgcggctagagaccatgttccgatttttcaaaactctggacacagatctggatggagttgtgacctttgacttgtttaagtggttgcagctgaccatgtttgcatgaggcagggactcggtcccccttgccgtgctcccctccctcctcgtctgccaagcctcgcctcctaccacaccacaccaggccaccccagctgcaagtgccttccttggagcagagaggcagcctcgtcctcctgtcccctctcctcccagccaccatcgttcatctgctccgggcagaactgtgtggcccctgcctgtgccagccatgggctcgggatggactccctgggccccacccattgccaagccaggaaggcagctttcgcttgttcctgcctcgggacagccccgggtttccccagcatcctgatgtgtcccctctccccacttcagaggccacccactcagcaccaccggcctggccttgcctgcagactataaactataaccactagctcgacacagtctgcagtccaggcgtgtggagccgcctcccggctcggggaggccccggggctgggaacgcctgtgccttcctgcgccgaaaccaacgccccctctgtccttccctggccctgctgccgaccaggagctgcccagcctgtgggcggtcggccttccctccttcgctccttttttatattagtgattttaaaggggactcttcatggacttgtgtactggttatgggggtgccagaggccactacgcttggggtggggaggtcccgtgttcc

SEQ ID NO: 193158 - DNA, 1489 bp, Homo Sapiens; identical to SEQ ID NO: 180750
  misc_feature (252)..(599): n is a, c, g, or t

SEQ ID NO: 193159 - DNA, 812 bp, Homo Sapiens
ccttaagaccctgagagtgctgtgaacagggaacagtctgatatcttgaaccaaaagggcagggtaaggtcctggggctgagggggggacaagggggcaccaaaaagccagtgggggcaggtggtgctggccaaggtcagaggctgatgcaacaggccctcttctccccagggccaggctcctgtccagcctgggcactgcccagagtgatggcattggtccggatgctgttctgtctctgcttggacaccttcgcaaagatttctttcaggacagtctcaaaggctagctcaacattggtagagtccagggctgaggtctccaggaagagcagtccattgttttcagcgaacattcgggcctcctcagtgggcacttcccgggcctggctgaggtcacttttgttacccacgagcatgacgacgatcgtggcttcagcatggtcatagagctccttcagccatcgctccaccacagcataggtctggtgcttggttaggtcaaacaccaggagggcccccactgcaccacgatagtacccttgaagacaaagttataatcttcctcagttccattccccatcttggctccgcatggagggtgcaggtgtcttcggggacagaggcgacaaatctgtgtgttggctcaatgccctcaaccctcagctctcaaaagatctggtcctgcccctcctctcattgggggtaaggggacttctgcagccagagggattgggggccaactcaaggttaggcagggcctagggaggatcagctctggcaggtgggggtgctgtaaggaagcagagccaa

SEQ ID NO: 193160 - DNA, 745 bp, Homo Sapiens
ctttgtacaaaaaagttggagcgcgtccaggtgggaggttagtgtggcccgggcgtccgctcctcagcggatgtggcagccccgagccatggctctcgccgtccgagtcgtttattgtggcgcttgaggctacaagtccaagtatcttcagctcaagaagaagttagaagatgagttccccggccgcctggacatctgcggcgagggaactccccaggccaccgggttctttgaagtgatggtagccgggaagttgattcactctaagaagaaaggcgatggctacgtggacacagaaagcaagtttctgaagttggtggccgccatcaaagccgccttggctcagggctaatgcgccctgaaggcagagtccagggaccttgacccagcccctctcagcagacgcttcatgataggaaggactgaaaagtcttgtggacacctggtctttccctgatgttctcgtggctgctgttgggggcagagattgacgcccccggtctttgcctctgagcgggagagtctgtgtgtatgtgtcttccccggaatccacaccaccccaccctcctcctgtcccgtggtttcatcatatctctttgcataccccatgtcttccccagttgtcccctggagtttggggggacatcccgcctcaggcatccttctcaaggggaagccaagagaggcatcaggatgggtgggtttctgattgtggcaacgtttgcaaccgttcacgattcaataa

SEQ ID NO: 193161 - DNA, 936 bp, Homo Sapiens
ttggctcctgggcacccggggaagtggaagcgccgggccctgctgcgggggggagagccactgacgccgggaccgggaccgccgccgccgccgccaccatgagtgatcagcagctggactgtgccttggacctaatgaggcgcctgcctccccagcaaatcgagaaaaacctcagcgacctgatcgacctggtccccagtctatgtgaggatctcctgtcttctgttgaccagccactgaaaattgccagagacaaggtggtgggaaaggattaccttttgtgtgactacaacagagatggggactcctataggtcaccatggagtaacaagtatgaccctcccttggaggatggggccatgccgtcagctcggctgagaaagctggaggtggaagccaacaatgcctttgaccagtatcgagacctgtattttgaaggtggcgtctcatctgtctacctctgggatctggatcatggctttgctggagtgatcctcataaagaaggctggagatggatcaaagaagatcaaaggctgctgggattccatccacgtggtagaagtgcaggagaaatccagcggtcgcaccgcccattacaagttgacctccacggtgatgctgtggctgcagaccaacaaatctggctctggcaccatgaacctcggaggcagccttaccagacagatggagaaggatgaaactgtgagtgactgctccccacacatagccaacatcgggcgcctggtagaggacatggaaaataaaatcagaagtacgctgaacgagatctactttggaaaaacaaaggatatcgtcaatgggctgaggtctgtgcagacttttgcagacaaatcaaacaagaagctctgaaaatgacctggtggaggctttgatgagaaagcagcaatgctttctctgtttcatgctaaccaga

SEQ ID NO: 193162 - DNA, 673 bp, Homo Sapiens; identical to SEQ ID NO: 185733
  misc_feature (241)..(296): n is a, c, g, or t

SEQ ID NO: 193163 - DNA, 938 bp, Homo Sapiens
  misc_feature (770)..(825): n is a, c, g, or t
attgatgagcaatgcttttcttataaagaggcaactttgtacaaaaaagttggcctaatgaggcgcctgcctccccagcaaatcgagaaaaacctcagcgacctgatcgacctggtccccagtctatgtgaggatctcctgtcttctgttgaccagccactgaaaattgccagagacaaggtggtgggaaaggattaccttttgtgtgactacaacagagatggggactcctataggtcaccatggagtaacaagtatgaccctcccttggaggatggggccatgccgtcagctcggctgagaaagctggaggtggaagccaacaatgcctttgaccagtatcgagacctgtattttgaaggtggcgtctcatctgtctacctctgggatctggatcatggctttgctggagtgatcctcataaagaaggctggagatggatcaaagaagatcaaaggctgctgggattccatccacgtggtagaagtgcaggagaaatccagcggtcgcaccgcccattacaagttgacctccacggtgatgctgtggctgcagaccaacaaatctggctctggcaccatgaacctcggaggcagccttaccagacagatggagaaggatgaaactgtgagtgactgctccccacacatagccaacatcgggcgcctggtagaggacatggaaaataaaatcagaagtacgctgaacgagatctactttggaaaaacaaaggatatcgtcaatgggctgaggtctgtgcagacttttgnnnnnnnnnnnnnnnnnnnnnnnnnnnnnnnnnnnnnnnnnnnnnnnnnnnnnnnnaagcagcaatgctaaacctctgtttcatgctaaacagacacgccgtgcactcgttagattcctttcttagaaaactcgtttctgctcccttccctcgtcccttccctccccga

SEQ ID NO: 193164 - DNA, 963 bp, Homo Sapiens
ccaactttgtacaaaaaagttgggtgggagcaacccccaacgcctggctcggagcagcagcctctgaggtgtccctggccagtgtccttccacctgtccacaagcatggggaacatcttcgccaacctcttcaagggcctttttggcaaaaaagaaatgcgcatcctcatggtgggcctggatgctgcagggaagaccacgatcctctacaagcttaagctgggtgagatcgtgaccaccattcccaccataggcttcaacgtggaaaccgtggagtacaagaacatcagcttcactgtgtgggacgtgggtggccaggacaagatccggcccctgtggcgccactacttccagaacacacaaggcctgatcttcgtggtggacagcaatgacagagagcgtgtgaacgaggcccgtgaggagctcatgaggatgctggccgaggacgagctccgggatgctgtcctcctggtgttcgccaacaagcaggacctccccaacgccatgaatgcggccgagatcacagacaagctggggctgcactcactacgccacaggaactggtacattcaggccacctgcgccaccagcggcgacgggctctatgaaggactggactggctgtccaatcagctccggaaccagaagtgaacgcgacccccctccctctcactcctcttgccctctgctttactctcatgtggcaaacgtgcggctcgtggtgtgagtgccagaagctgcctccgtggtttggtcaccgtgtgcatcgcaccgtgctgtaaatgtggcagacgcagcctgcggccaggctttttatttaatgtaaatagtttttgtttccaatgaggcagtttctggtactcctatgcaatattactcagctttttttattgtaaaaaaaaaatcaactcactgttcagtgctgagaggggatgtaggcccatggggcacctggcctccaga

SEQ ID NO: 193165 - DNA, 1018 bp, Homo Sapiens
actttgtacaaaaaagttggtcttgtgggagcaaaaccaacgcctggctcggagcagcagcctctgaggtgtccctggccagtgtccttccacctgtccacaagcatggggaacatcttcgccaacctcttcaagggcctttttggcaaaaaagaaatgcgcatcctcatggtgggcctggatgctgcagggaagaccacgatcctctacaagcttaagctgggtgagatcgtgaccaccattcccaccataggcttcaacgtggaaaccgtggagtacaagaacatcagcttcactgtgtgggacgtgggtggccaggacaagatccggcccctgtggcgccactacttccagaacacacaaggcctgatcttcgtggtggacagcaatgacagagagcgtgtgaacgaggcccgtgaggagctcatgaggatgctggccgaggacgagctccgggatgctgtcctcctggtgttcgccaacaagcaggacctccccaacgccatgaatgcggccgagatcacagacaagctggggctgcactcactacgccacaggaactggtacattcaggccacctgcgccaccagcggcgacgggctctatgaaggactggactggctgtccaatcagctccggaaccagaagtgaacgcgacccccctccctctcactcctcttgccctctgctttactctcatgtggcaaacgtgcggctcgtggtgtgagtgccagaagctgcctccgtggtttggtcaccgtgtgcatcgcaccgtgctgtaaatgtggcagacgcagcctgcggccaggctttttatttaatgtaaatagtttttgtttccaatgaggcagtttctggtactcctatgcaatattactcagctttttttattgtaaaaagaaaaatcaactcactgttcagtgctgagaggggatgtaggcccatgggcacctgggcctccaggagtcgctgtgttgggagagccggccacgcccttggctttagagctgtgttgaaa

SEQ ID NO: 193166 - DNA, 1503 bp, Homo Sapiens
gagcaatgctttccttaaaatagccaactttgtacaaaaaagttggcaagaacatccgcttcactgtgtgggacgtgggtggccaggacaagatccggcccctgtggcgccactacttccagaacacacaaggcctgatcttcgtggtggacagcaatgacagagagcgtgtgaacgaggcccgtgaggagctcatgaggatgctggccgaggacgagctccgggatgctgtcctcctggtgttcgccaacaagcaggacctccccaacgccatgaatgcggccgagatcacagacaagctggggctgcactcactacgccacaggaactggtacattcaggccacctgcgccaccagcggcgacgggctctatgaaggactggactggctgtccaatcagctccggaaccagaagtgaacgcgacccccctccctctcactcctcttgccctctgctttactctcatgtggcaaacgtgcggctcgtggtgtgagtgccagaagctgcctccgtggtttggtcaccgtgtgcatcgcaccgtgctgtaaatgtggcagacgcagcctgcggccaggctttttatttaatgtaaatagtttttgtttccaatgaggcagtttctggtactcctatgcaatattactcagctttttttattgtaaaaagaaaaatcaactcactgttcagtgctgagaggggatggaggccaggtgcccatgggcctacaggagtcgctgtgttgggagagccggccacgcccttggctttagagctgtgttgaaatccattttggtggttggtttttaacccaaactcagtgcattttttaaaatagttaagaatccaagtcgagaacacttgaacacacagaagggagaccccgcctagcatagatttgcagttacggcctggatgccagtcgccagcccagctgttcccctcgggaacatgaggtggtggtggcgcagcagactgcgatcaattctgcatggtcacagtagagatccccgcaactcgcttgtccttgggtcaccctgcattccatagccatgtgcttgtccctgtgctcccacggttcccaggggccaggctgggagcccacagccaccccactatgccgcaggccgccctacccaccttcaggcagcctatgggacgcagggccccatctgtccctcggtcgccgtgtggccagagtgggtccgtcgtccccaacactcgtgctcgctcagacactttggcaggatgtctggggcctcaccagcaggagcgcgtgcaagccgggcaggcggtccacctagacccacagcccctcgggagcaccccacctctgtgtgtgatgtagctttctctccctcagcctgcaaggggtcccgatttgccatcgaaaaagacaccctctacttttttcttttgtattttgataaacactgaagctggagctgttaaaattatcttgggggaaaccccaaaactggtcaatttggtgtcgtggaacctc

SEQ ID NO: 193167 - DNA, 1609 bp, Homo Sapiens
ccaactttgtacaaaaaagttgggtggaaaccgtggagtacaagaacatcagcttcactgtgtgggacgtgggtggccaggacaagatccggcccctgtggcgccactacttccagaacacacaaggcctgatcttcgtggtggacagcaatgacagagagcgtgtgaacgaggcccgtgaggagctcatgaggatgctggccgaggacgagctccgggatgctgtcctcctggtgttcgccaacaagcaggacctccccaacgccatgaatgcggccgagatcacagacaagctggggctgcactcactacgccacaggaactggtacattcaggccacctgcgccaccagcggcgacgggctctatgaaggactggactggctgtccaatcagctccggaaccagaagtgaacgcgacccccctccctctcactcctcttgccctctgctttactctcatgtggcaaacgtgcggctcgtggtgtgagtgccagaagctgcctccgtggtttggtcaccgtgtgcatcgcaccgtgctgtaaatgtggcagacgcagcctgcggccaggctttttatttaatgtaaatagtttttgtttccaatgaggcagtttctggtactcctatgcaatattactcagctttttttattgtaaaaagaaaaatcaactcactgttcagtgctgagaggggatgtaggcccatgggcacctggcctccaggagtcgctgtgttgggagagccggccacgcccttggctttagagctgtgttgaaatccattttggtggttggtttttaacccaaactcagtgcattttttaaaatagttaagaatccaagtcgagaacacttgaacacacagaagggagaccccgcctagcatagatttgcagttacggcctggatgccagtcgccagcccagctgttcccctcgggaacatgaggtggtggtggcgcagcagactgcgatcaattctgcatggtcacagtagagatccccgcaactcgcttgtccttgggtcaccctgcattccatagccatgtgcttgtccctgtgctcccacggttcccaggggccaggctgggagcccacagccaccccactatgccgcaggccgccctacccaccttcaggcagcctatgggacgcagggccccatctgtccctcggtcgccgtgtggccagagtgggtccgtcgtccccaacactcgtgctcgctcagacactttggcaggatgtctggggcctcaccagcaggagcgcgtgcaagccgggcaggcggtccacctagacccacagcccctcgggagcaccccacctctgtgtgtgatgtagctttctctccctcagcctgcaagggtccgatttgccatcgaaaaagacaacctctacttttttcttttgtattttgataaacactgaagctggagctgttaaatttatcttggggaaacctcagaactggtctatttggtgtcgtggaacctcttactgctttcaatacacgattagtaatcaactgttttgtatacttgttttcagttttcatttcgacaaacaagcactgtaattatagctattagaataaaatctcttaactatt

SEQ ID NO: 193168 - DNA, 409 bp, Homo Sapiens
actttgtacaaaaaagttgggtccctgtgctcccacggttcccaggggccaggctgggagcccacagccaccccactatgccgcaggccgccctacccaccttcaggcagcctatgggacgcagggccccatctgtccctcggtcgccgtgtggccagagtgggtccgtcgtccccaacactcgtgctcgctcagacactttggcaggatgtctggggcctcaccagcaggagcgcgtgcaagccgggcaggcggtccacctagacccacagcccctcgggagcaccccacctctgtgtgtgatgtacctttctctccctcaacctgcaagggtctgatttgccatcgaaaaagacaacctctacttttttcttcccctattttgataaacactgaagctggagctgtt

SEQ ID NO: 193169 - DNA, 1712 bp, Homo Sapiens; identical to SEQ ID NO: 185736
  misc_feature (1496)..(1505): n is a, c, g, or t

SEQ ID NO: 193170 - DNA, 672 bp, Homo Sapiens
tgtacaaaaaagttgggatgaatgaggcctctaaagagaaccatcaatttcaccatgttcctgaccatgtttggtgagaagttaaatggcacagatcctgaagatgtcatcagaaacgcctttgcttgctttgatgaagaagcaacaggcaccattcaggaagattacctaagagagctgctgacaaccatgggggatcggtttacagatgaggaagtggatgagctgtacagagaagcacctattgacaaaaaggggaatttcaattacatcgagttcacacgcatcctgaaacatggagccaaagacaaagatgactgaaagaactttagctaaaatcttccagttacattgtcttactctcttttacttctcagacacttcccccaccctcatagaacctgttgcatgcaacttagtttcacagctttgcctcttctttttgatgtatttattccagacctttctgccacttagcacttgtataatcagactggaaatggggatgagggtgtaaattgtattgaaaaagatcgcgaataaaaatcaacaaatgtgaaagcccagaaaaatatattcgtatttctggttttgctggatttttacatttttatataataaaaatgttattttgaaataaagattatgctgactcaaatgcaatgtaaaaaa

SEQ ID NO: 193171 - DNA, 927 bp, Homo Sapiens
ctttgtacaaaaaagttggggtctcgcgcacgttagacaagaagacaacccggttctggtgtttggcgtcggaattaaacaaccaccatgtcgagcaaaaaggcaaagaccaagaccaccaagaagcgccctcagcgtgcaacatccaatgtgtttgccatgtttgaccagtcacagattcaggagttcaaagaggccttcaacatgattgatcagaacagagatggcttcatcgacaaggaagatttgcatgatatgcttgcttctctagggaagaatcccactgatgcataccttgatgccatgatgaatgaggccccagggcccatcaatttcaccatgttcctgaccatgtttggtgagaagttaaatggcacagatcctgaagatgtcatcagaaacgcctttgcttgctttgatgaagaagcaacaggcaccattcaggaagattacctaagagagctgctgacaaccatgggggatcggtttacagatgaggaagtggatgagctgtacagagaagcacctattgacaaaaaggggaatttcaattacatcgagttcacacgcatcctgaaacatggagccaaagacaaagatgactgaaagaactttagctaaaatcttccagttacattgtcttactctcttttacttctcagacacttcccccaccctcatagaacctgttgcatgcaacttagtttcacagctttgcctcttctttttgatgtatttattccagacctttctgccacttagcacttgtataatcagactggaaatggggatgagggtgtaaattgtattgaaaaagatcgcgaataaaaatcaacaaatgtgaaagcccagaaaaatatattcgtattttctgggttttgctggatttttacattttttatataataaaaatgttatttttgaaat

SEQ ID NO: 193172 - DNA, 972 bp, Homo Sapiens
actttgtacaaaaaagttgggcaggaagtgtcggcacagccactgtccggccacagcctaacgctcttcgctgtcgtttgcggtctcgcgcagggcggccccggttctggtgtttggcgtcggaattaaacaaccaccatgtcgagcaaaaaggcaaagaccaagaccaccaagaagcgccctcagcgtgcaacatccaatgtgtttgccatgtttgaccagtcacagattcaggagttcaaagaggccttcaacatgattgatcagaacagagatggcttcatcgacaaggaagatttgcatgatatgcttgcttctctagggaagaatcccactgatgcataccttgatgccatgatgaatgaggccccagggcccatcaatttcaccatgttcctgaccatgtttggtgagaagttaaatggcacagatcctgaagatgtcatcagaaacgcctttgcttgctttgatgaagaagcaacaggcaccattcaggaagattacctaagagagctgctgacaaccatgggggatcggtttacagatgaggaagtggatgagctgtacagagaagcacctattgacaaaaaggggaatttcaattacatcgagttcacacgcatcctgaaacatggagccaaagacaaagatgactgaaagaactttagctaaaatcttccagttacattgtcttactctcttttacttctcagacacttcccccaccctcatagaacctgttgcatgcaacttagtttcacagctttgcctcttctttttgatgtatttattccagacctttctgccacttagcacttgtataatcagactggaaatggggatgagggtgtaaattgtattgaaaaagatcgcgaataaaaatcaacaaatgtgaaagcccagaaaaatatattcgtatttctgggtttgctggatttttacatttttatataataaaaatggttattttga

SEQ ID NO: 193173 - DNA, 913 bp, Homo Sapiens
ctttgtacaaaaaagctgggagcagggtggtgtgatagcggcagcgaggggctcggagaggtgctcggattctcgtagctgtgccgggacttaaccaccaccatgtcgagcaaaagaacaaagaccaagaccaagaagcgccctcagcgtgcaacatccaatgtgtttgctatgtttgaccagtcacagattcaggagttcaaagaggccttcaacatgattgatcagaacagagatggtttcatcgacaaggaagatttgcatgatatgcttgcttcattggggaagaatccaactgatgagtatctagatgccatgatgaatgaggctccaggccccatcaatttcaccatgttcctcaccatgtttggtgagaagttaaatggcacagatcctgaagatgtcatcagaaatgcctttgcttgctttgatgaagaagcaactggcaccatacaggaagattacttgagagagctgctgacaaccatgggggatcggtttacagatgaggaagtggatgagctgtacagagaagcacctattgataaaaaggggaatttcaattacatcgagttcacacgcatcctgaaacatggagccaaagacaaagatgactgaaataacttcaaattccagccaaacgttccttgttgccactttgggtattctgagattttctcttgcatgcccttagctttacagcttttgcatttcctgttgtatttattctcagccattttgggcatatgtatctttataatcagactggaaacgggactttctattaatatcattttcagaataaaaaataggataatttaacctaccagcccttctcccccactaactgtggtctatacagagtcaatatattttttcagagaaagttattcgctcgatttttttctgaatc

SEQ ID NO: 193174 - DNA, 1279 bp, Homo Sapiens
  misc_feature (1098)..(1123): n is a, c, g, or t
tggcttcgggctgtcctaattaggtctgttactcggtggtggcggagtctacggaagccgttttcgcttcacttttcctggctgtagagcgctttccccctggcgggtgagagtgcagagacgaaggtgcgagatgagcactatgttcgcggacactctcctcatcgtttttatctctgtgtgcacggctctgctcgcagagggcataacctgggtcctggtttacaggacagacaagtacaagagactgaaggcagaagtggaaaaacagagtaaaaaattggaaaagaagaaggaaacaataacagagtcagctggtcgacaacagaaaaagaaaatagagagacaagaagagaaactgaagaataacaacagagatctatcaatggttcgaatgaaatccatgtttgctattggcttttgttttactgccctaatgggaatgttcaattccatatttgatggtagagtggtggcaaagcttccttttacccctctttcttacatccaaggactgtctcatcgaaatctgctgggagatgacaccacagactgttccttcattttcctgtatattctctgtactatgtcgattcgacagaacattcagaagattctcggccttgccccttcacgagccgccaccaagcaggcaggtggatttcttggcccaccacctccttctgggaagttctcttgaactcaagaactctttattttctatcattctttctagacacacacacatcagactggcaactgttttgtagcaagagccataggtagccttactacttgggcctctttctagttttgaattatttctaagccttttgggtatgattagagtgaaaatggcagccagcaaacttgatagtgcttttggtcctagatgatttttatcaaataagtggattgattagttaagttcaggtaatgtttatgtaatgaaaaacaaatagcatccttcttgtttcatttacataagtattttctgtgggaccgactctcaaggcactgtgtatgccctgcaagttggctgtctatgagcatttagagatttagaagaaaaatttagtttgtttaacccttgtaacnnnnnnnnnnnnnnnnnnnnnnnnnncaagccaaatacatgacataagatcaataaagaggccaaattttcagctgttttatgtacaaggagagatctgtttcattttgttttgccgtatttctagatataagttttagcatgggccaggaaggactaaaataaaagtttttaaggtactgt

SEQ ID NO: 193175 - DNA, 955 bp, Homo Sapiens
ttggcctgagttacttcacccccgcgcatggggaggtaggctcggaccggcccgcggagctgctgcagtccttcgcgccctcctcgccctccccaccgacatcatgctccagttcctgcttggatttacactgggcaacgtggttggaatgtatctggctcagaactatgatataccaaacctggctaaaaaacttgaagaaattaaaaaggacttggatgccaagaagaaaccccctagtgcatgagactgcctccagcactgccttcaggatatactgattctactgctcttgagggcctcgtttactatctgaaccaaaagcttttgttttcgtctccagcctcagcacttctcttctttgctagaccctgtgttttttgctttaaagcaagcaaaatggggccccaatttgagaactacccgacatttccaacatactcacctcttcccataatccctttccaactgcatgggaggttctaagactggaattatggtgctagattagtaaacatgacttttaatgagtagtgtcttctttatcgtttgcgatttttactaccttttttcaaaagaaaaattgatgagttttgtatagctggtcagatacaaataatagtgacttcacagtttagtaattataatgggtacttgttaaacatttggtactaaattatgttgctgcaaagtaattaaaattagtatctagagctagtttctggtgaattattcatttattttgtactgttgttaggcagctctgtagttgctaatttaaccaataagtcaatttgctattcatgaagaaacgattctgagaatcctgtcaggaattggggaatgaaaaaatacacaaaataatggtctttgtcctcagtagagttcatagtctatttagtgtgcatgtttttccttaatgatgtatttgatctgacttttttccttctcaaaa

SEQ ID NO: 193176 - DNA, 994 bp, Homo Sapiens; identical to SEQ ID NO: 185739
  misc_feature (616)..(624): n is a, c, g, or t

SEQ ID NO: 193177 - DNA, 803 bp, Homo Sapiens; identical to SEQ ID NO: 185744

SEQ ID NO: 193178 - DNA, 788 bp, Homo Sapiens; identical to SEQ ID NO: 180757

SEQ ID NO: 193179 - DNA, 867 bp, Homo Sapiens
  misc_feature (483)..(501): n is a, c, g, or t
tcacagagacaattaacctcggccatgagaaaacatctgcacacccacggtcccagagtccacgtctgtgcagaatgtggcaaagcttttgttgagagttcaaaactaaaacgacaccaactggttcatactggagagaagccctttcagtgcacgttcgaaggctgtgggaaacgcttttcactggacttcaatttgcgcacacatgtgcgaatccataccggagacaggccctatgtgtgccccttcgatggttgtaataagaagtttgctcagtcaactaacctgaaatctcacatcttaacacatgctaaggccaaaaacaaccagtgaaaagaagagagaagacccttctcgaccacgggaagcatcttccagaagtgtgattgggaataaatatgcctctcctttgtatattatttctaggaagaattttaaaaatgaatcctacacacctaagggacatgttttgataaagtagtnnnnnnnnnnnnnnnnnnnctttactaagatgacattgctaagatgctctatcttgctctgtaatctcgtttcaaaaacacagtgtttttgtaaagtgtggtcccaacaggaggacaattcatgaacttcgcatcaaaagacaattctttatacaacagtgctaaaaatgggacttcttttcacattcttataaatatgaagctcacctgttgcttacaatttttttaattttgtattttccaagtgtgcatattgtacactttttttggggatatgcttagtaatgctacgtgtgatttttctggaggttgataactttgcttgcagtatattttctttaaaagaatgggcagttacatgcatacttcaaaagtattttcctgt

SEQ ID NO: 193180 - DNA, 1202 bp, Homo Sapiens
ttggagccgaggcagcgggcagacgagcagggggcgggcggacatcttgggatccggagagtggccgggccggcagagcagggggccgaggacaccaggtctgttctcagagcgatgggccgcggagactgatctgccgccatgattggaggcttattcatctataatcacaagggggaggtgctcatctcccgagtctaccgagatgacatcgggaggaacgcagtggatgcctttcgggtcaatgttatccatgcccggcagcaggtgcgcagccccgtcaccaacattgctcgcaccagcttcttccacgttaagcggtccaacatttggctggcagcagtcaccaagcagaatgtcaacgctgccatggtcttcgaattcctctataagatgtgtgacgtgatggctgcctactttggcaagatcagcgaggaaaacatcaagaacaattttgtgctcatatatgagctgctggatgagattctagactttggctacccacagaattccgagacaggcgcgctgaaaaccttcatcacgcagcagggcatcaagagtcagcatcagacaaaagaagagcagtcacagatcaccagccaggtaactgggcagattggctggcggcgagagggtatcaagtatcgtcggaatgagctcttcctggatgtgctggagagtgtgaacctgctcatgtccccacaagggcaggtgctgagtgcccatgtgtcgggccgggtggtgatgaagagctacctgagtggcatgcctgaatgcaagtttgggatgaatgacaagattgttattgaaaagcagggcaaaggcacagctgatgaaacaagcaagagcgggaagcaatcaattgccattgatgactgcaccttccaccagtgtgtgcgactcagcaagtttgactctgaacgcagcatcagctttatcccgccagatggagagtttgagcttatgaggtatcgcacaaccaaggacatcatccttcccttccgggtgatcccgctagtgcgagaagtgggacgcaccaaactggaggtcaaggtggtcatcaagtccaactttaaaccctcactgctggctcagaagatcgaggtgaggatcccaaccccactgaacacaagcggggtgcaggtgatctgcatgaagggaaggccaagtacaaaggccagcgagaatgccatcgtgtggaa

SEQ ID NO: 193181 - DNA, 955 bp, Homo Sapiens; identical to SEQ ID NO: 185752

SEQ ID NO: 193182 - DNA, 2152 bp, Homo Sapiens; identical to SEQ ID NO: 185754
  misc_feature (1222)..(1247): n is a, c, g, or t

SEQ ID NO: 193183 - DNA, 1387 bp, Homo Sapiens; identical to SEQ ID NO: 185757
  misc_feature (1128)..(1139): n is a, c, g, or t

SEQ ID NO: 193184 - DNA, 1482 bp, Homo Sapiens; identical to SEQ ID NO: 180759
  misc_feature (200)..(249): n is a, c, g, or t

SEQ ID NO: 193185 - DNA, 1227 bp, Homo Sapiens; identical to SEQ ID NO: 180760
  misc_feature (260)..(269): n is a, c, g, or t

SEQ ID NO: 193186 - DNA, 2653 bp, Homo Sapiens; identical to SEQ ID NO: 185758
  misc_feature (2026)..(2153): n is a, c, g, or t

SEQ ID NO: 193187 - DNA, 1422 bp, Homo Sapiens; identical to SEQ ID NO: 185759
  misc_feature (1349)..(1360): n is a, c, g, or t

SEQ ID NO: 193188 - DNA, 1065 bp, Homo Sapiens
  misc_feature (100)..(147): n is a, c, g, or t
  misc_feature (194)..(232): n is a, c, g, or t
ttgggttatttactaaattgttcttgtaccattagaaaaaaaatacggcaatttacgttcttatttattttggctgtactacccctttgttttaattttnnnnnnnnnnnnnnnnnnnnnnnnnnnnnnnnnnnnnnnnnnnnnnnnaagtgctggaattataggcgtgaaccaccgcccccggctgcagttgnnnnnnnnnnnnnnnnnnnnnnnnnnnnnnnnnnnnnnnatctccaagggactctcccggcacttctaccttccagagttacttcagtgcataaagtttgaattattttgttcttgtgggcagaagtgggaatgatggaatatcctcacggaaaaggcagtgaagttgggagtactgcttacaaaacagggtcaccagtgcattatgtggcgtgttcatccccacgccgtgtgtcacgggctagggcggcgtgttcatccccacaccgtgtgtcacaacaggctagggcacttcacgatgtcactacttgtttttctgatgttccaaaaacaacgtaacttggttttcatgtgtttttccgtggtatatgtgagattgatgctacgggtcttacggactcacacccgttcccactctctgcaatatggatcaggcagtgtttctgataggatgtgaaatggactctcctcgggtgggtccagcaggggccctgcccaccagaacacagtccgtgctgtgctgcgctaaggagctggccctcaactctccttggtgcagggttcccacaaccgagttctagttccctgaggtctttaaaaacaaaaacagaatgttgtacgtgaagattctaggaggggagggaccagcaaatctgagagaaccgtcctggggcctcccttcgaggagccctctgatgtgaggagggacttgagttgagtgacgctgtggtgtgaggtgttctgagctcactgaccggaaaggtccaggtgaatctcgtcataagtgatctcaggctctcacaggatccggagggaaatgtgttagagggtctggaaaattcagtgcttttgagttacttgtttttattaaaa

SEQ ID NO: 193189 - DNA, 1876 bp, Homo Sapiens; identical to SEQ ID NO: 185762

SEQ ID NO: 193190 - DNA, 1226 bp, Homo Sapiens; identical to SEQ ID NO: 185764
  misc_feature (877)..(890): n is a, c, g, or t

SEQ ID NO: 193191 - DNA, 1518 bp, Homo Sapiens
  misc_feature (1014)..(1025): n is a, c, g, or t
  misc_feature (1057)..(1092): n is a, c, g, or t
  misc_feature (1233)..(1250): n is a, c, g, or t
tttgtacaaaaaagttggtttgtcttgaatgcatttatataaaaggaaatatataataaaaatgttaaccagaaggtaaacttgagtgtaattgtcagacagacacacttttccaccagtgtatttgaattttagaccagtgaccctgttttgtggcattcatgcaaaacatgctgagggctttgttcatctggtcatcgtgtccaaatttcagtcatgtttgtagcaagattttggaagcattcatatttcctttttaaaatgtattcctttgtgttcaacagttaatcaaaaccagagagtctagggcagcctctctgatgttgtcaatgatgtaaattcagtccctggtttttaattttctgtctgatgtcacagatcattgttgcacacaaacgtggcatagaaaagaacatgttcagaagccatggggccaagcacatgcggggacggtctcaaatgcgtgatcagagaatccttcacctttgctgaaaagtgagctcagatccagcaccatgttcctcctgacccatcctgtctatcttctcagttgagtttttaatctcactttgggtttccttgtgaagttggagggaagtttataatagcctaacactaccccacccccaactaggaggaacctctgttttcaagagagatgcctgtcctgtgcttggatagtcagtcaattatttgtgtatgaaacaatgtacaaatcaatgttttgaaaataatgatctcagactttctaagttaaattttaaaaattttgattgtttgccatattgggtgggtttactcttagaatcgcatgctgtagaaatgctcaaaagtgcatatgggactcagtccttaggtgttctttttcttttaagaaataacctcttacagttgtaaccattgcggctctgtccacttctcgttgctgctctgtggcacatatcggaagcagtacagcgcgcggctctacacgcttgggtagcgggataagtcactgttttctttatttctttnnnnnnnnnnnngttctgttgcaaacgactgctgttggattctnnnnnnnnnnnnnnnnnnnnnnnnnnnnnnnnnnnntgaagagcctgccctcctatatggattcttcagggccctccacatctgaggtggctcattcccatcacacacagattgtcctggtgttcatttcaaggccagtgttcagcagcagcgtttggaaagcaggttctgtgggannnnnnnnnnnnnnnnnngcactccttcatagcagcagtagtggcttctccatcctgttttctgcaacattctatacaaaactgtgctgtgaccttgcggtaggcctggatctggcaaagagaatacaaatgaaaccccttctttctctttccgtccaacaactctgtagagctctctgcacccttacccctttccaccttttgtatttaattttaaagtcagtgtactgcaaggaagctggatgcaagatagatactatattaaactgtactgttatttaagatg

SEQ ID NO: 193192 - DNA, 1466 bp, Homo Sapiens
  misc_feature (93)..(146): n is a, c, g, or t
ggaggaagacagcgccgcccgcgcaccgccagcgacccccgccgcagagtcccaccgccacaggcctcgggccagcggccaggagctgcctcnnnnnnnnnnnnnnnnnnnnnnnnnnnnnnnnnnnnnnnnnnnnnnnnnnnnnnggcgccatgagtgagctggagcaactgagacaggaggccgagcagctccggaaccagatccgggatgcccgaaaagcatgtggggactcaacactgacccagatcacagctgggctggacccagtggggagaatccagatgaggacccggaggaccctccgtgggcacctggcaaagatctatgccatgcactgggggaccgactcaaggctgctggtcagcgcctcccaggatgggaagctcatcatctgggacagctacaccaccaacaaggtccacgccatcccgctgcgctcctcctgggtaatgacctgtgcctacgcgccctcagggaactttgtggcctgtggggggttggacaacatctgctccatctacagcctcaagacccgcgagggcaacgtcagggtcagccgggagctgcctggccacactgggtacctgtcgtgttgccgcttcctggatgacaaccaaatcatcaccagctctggggataccacctgtgccctgtgggacattgagacaggccagcagacagtgggttttgctggacacagtggggatgtgatgtccctgtccctggcccccgatggccgcacgtttgtgtcaggcgcctgtgatgcctctatcaagctgtgggacgtgcgggattccatgtgccgacagaccttcatcggccatgaatccgacatcaatgcagtggctttcttccccaacggctacgccttcaccaccggctctgacgacgccacgtgccgcctcttcgacctgcgggccgatcaggagctcctcatgtactcccatgacaacatcatctgtggcatcacctctgttgccttctcgcgcagcggacggctgctgctcgctggctacgacgacttcaactgcaacatctgggatgccatgaagggcgaccgtgcaggagtcctcgctggccacgacaaccgcgtgagctgcctcggggtcaccgacgatggcatggctgtggccacgggctcctgggactccttcctcaagatctggaactaatggccccacccccactgggcccaggccaggaggggccctgcccatgcccacactacaggccagggctgcggggctggcgcaatcccagcccccttccccgggccacggggccttgggtccctgccctcccacccaggtttggttcctcccggggcccccactgtggagataagaaggggatggaatgggggaagaggaggagcaggaggccctcatccttctgctgccctggggttggggcctcacccctctggagggccggaggcaggaggtggaaacccaggggctggc

SEQ ID NO: 193193 - DNA, 1289 bp, Homo Sapiens
  misc_feature (790)..(802): n is a, c, g, or t
  misc_feature (834)..(869): n is a, c, g, or t
  misc_feature (1010)..(1027): n is a, c, g, or t
ctttgtacaaaaaagttggcatatttcctttcctaaaatgtattcctttgtgttctcagtttatcttgccaaagagtctagggcatcctctcagatgttgtcaatgaggtaaattcagtccctgttttttaattttctgtctgatgtcacagatcattgttgcacacaaacgtggtatattaaaagaacatgttcacaagccatggggccaagcacatgcggggacggtctcaaatgcgtgatcaaaaaatccttcacctttgctgaaaagtgagctcatatccagcaccatgttcctcctgacccatcctgtctatcttctcatttgagtttttattctcactttgggtttccttgtgaagttggagggaagtttataatagcctaacactaccccacccccaactaggaggaacctctgttttcaagaaagatgcctgtcctgtgcttggatagtcagtcaattatttgtgtatgaaacaatgtacaaatcaatgttttgaaaataattgatcccagactttctaagttaaattttaaaaattttgattgtttgccatattgggtgggtttactcttagaatcgcatgctgtagaaatgctcaaaagtgcatatgggactcagtccttaggtgttctttttcttttaagaaataacctcttacagttgtaaccattgcggctctgtccacttctcgttgctgctctgtggcacatatcggaagcagtacagcgcgcggctctacacgcttgggtagcgggataagtcactgttttctttatttctttnnnnnnnnnnnnngttctgttgcaaacgactgctgttggattctnnnnnnnnnnnnnnnnnnnnnnnnnnnnnnnnnnnntgaagagcctgccctcctatatggattcttcagggccctccacatctgaggtggctcattcccatcacacacagattgtcctggtgttcatttcaaggccagtgttcagcagcagcgtttggaaagcaggttctgtgggannnnnnnnnnnnnnnnnngcactccttcatagcagcagtagtggcttctccatcctgttttctgcaacattctatacaaaactgtgctgtgaccttgcggtaggcctggatctggcaaagagaatacaaatgaaaccccttctttctctttccgtccaacaactctgtagagctctctgcacccttaccccttttccacctttttgtatttaattttaaagtcagtgtactgcaagaaagctggatgcaagatagatactatattaaactgtacttgtta

SEQ ID NO: 193194 - DNA, 1281 bp, Homo Sapiens
agtggagcagccgccgcggcgggactggaccgagcctcgccggcgcgcacctgcccgcagcgcccgcggagcgcgcagcgcggcccgagcgcgacgacctgccgagcggcggccgaggcggcggtgtgggcgcgtcaggccgcgacgagggcgctgagatctcacattcttgaaggtggcattgaagagcactaagatcggaagatgagtgagcttgaccagttacggcaggaggccgagcaacttaagaaccagattcgagacgccaggaaagcatgtgcagatgcaactctctctcagatcacaaacaacatcgacccagtgggaagaatccaaatgcgcacgaggaggacactgcgggggcacctggccaagatctacgccatgcactggggcacagactccaggcttctcgtcagtgcctcgcaggatggtaaacttatcatctgggacagctacaccaccaacaaggtccacgccatccctctgcgctcctcctgggtcatgacctgtgcatatcccccttctgggaactatgtggcctgcggtggcctggataacatttgctccatttacaatctgaaaactcgtgaggggaacgtgcgcgtgagtcgtgagctggcaggacacacaggttacctgtcctgctgccgattcctggatgacaatcagatcgtcaccagctctggagacaccacgtgtgccctgtgggacatcgagaccggccagcagacgaccacgtttaccggacacactggagatgtcatgagcctttctcttgctcctgacaccagactgttcgtctctggtgcttgtgatgcttcagccaaactctgggatgtgcgagaaggcatgtgccggcagaccttcactggccacgagtctgacatcaatgccatttgcttctttccaaatggcaatgcatttgccactggctcagacgacgccacctgcaggctgtttgaccttcgtgctgaccaggagctcatgacttactcccatgacaacatcatctgcgggatcacctctgtctccttctccaagagcgggcgcctcctccttgctgggtacgacgacttcaactgcaacgtctgggatgcactcaaagccgaccgggcaggtgtcttggctgggcgtgactgacgatggcatggctgtggcgacagggtcctgggatagcttcctcaagatctggaactaacgccagtagcatgtggatgccatgggagactggaagaccattccaacttggacgcgttaccatgagagcatatcctatcc

SEQ ID NO: 193195 - DNA, 910 bp, Homo Sapiens
  misc_feature (69)..(116): n is a, c, g, or t
  misc_feature (208)..(254): n is a, c, g, or t
ttggcgggatccctccgctctggggaggcagcgctggcggcggggctggggccactgaggaaatccatnnnnnnnnnnnnnnnnnnnnnnnnnnnnnnnnnnnnnnnnnnnnnnnnggaggaagacagcgccgcccgcgcaccgccagcgacccccgccgcagagtcccaccgccacaggcctcgggccagcggccaggagctgcctnnnnnnnnnnnnnnnnnnnnnnnnnnnnnnnnnnnnnnnnnnnnnnnacgggcccggcgccatgagtgagctggagcaactgagacaggaggccgagcagctccggaaccagatccgggatgcccgaaaagcatgtggggactcaacactgacccagatcacagctgggctggacccagtggggagaatccagatgaggacccggaggaccctccgtgggcacctggcaaagatctatgccatgcactgggggaccgactcaaggctgctggtcagcgcctcccaggatgggaagctcatcatctgggacagctacaccaccaacaaggtccacgccatcccgctgcgctcctcctgggtaatgacctgtgcctacgcgccctcagggaactttgtggcctgtggggggttggacaacatctgctccatctacagcctcaagacccgcgagggcaacgtcagggtcagccgggagctgcctggccacactgggtacctgtcgtgttgccgcttcctggatgacaaccaaatcatcaccagctctggggataccacctgtgccctgtgggacattgagacaggccagcagacagtgggttttgctggacacagtggggatgtgatgtccctgtccctggcccccgatggccgcacgtttgtgtcagcgcctgtgatgcctctatcaagctgtgggacgtgcggg

SEQ ID NO: 193196 - DNA, 2867 bp, Homo Sapiens; identical to SEQ ID NO: 185777
  misc_feature (2548)..(2557): n is a, c, g, or t

SEQ ID NO: 193197 - DNA, 1047 bp, Homo Sapiens
ttgggaataaatgtccacttgtgtatctccttaaagctgtactaacctaaaatcggtagttcccctgggcatttgccagggatggtggcttctagactttgagtgatgggagaataattgttagtgtaggtaagttgttggttttatccacctcaaacctgattgggacttcagaggaacctctttgggaagctaatgattcagggtattgaagacattagcatagaacattagtggttctttttgtttcagaagttcattgttgtgattaaattgccatctgataatttttatagaacagatgcttaatttttagagcatttttctattttccagcctttgcaaaatgttagcacagtgctgcagaagcctaatcctctctataatcagaatacagatatggtccagaaatcagtcagcaaaaccttgccctctacttggtctgaccccagtgtaaacatcagcctagacaacttactacctggtatgcagccttccaaaccccagcagccatcactgaatacaatgattcagcaacagaatatgcagcagcctatgaatgtgatgactcaaagttttggagctgtgaacctcagttctccatcgaacatgcttcctgtccggccccaaactaatgctttgatagggggacccatgcctatgagcatgcccaatgtgatgactggcaccatgggaatggcccctcttggaaatactccgatgatgaaccagagcatgatgggcatgaacatgaacatagggatgtccgctgctgggatgggcttgacaggcacaatgggaatgggcatgcccaacatagccatgacttctggaactgtgcaacccaagcaagatgcctttgcaaatttcgccaattttagcaaataagagattgtaaaagaagcagattgaatgaaaatttttagctgtgcagataggtgatgttgggatggaaaatgctaatcaactaccctttcttttatcaagtaattaaaataaatctacataaagaaccaaaaaggctgttttataaaagtgaaatatcca

SEQ ID NO: 193198 - DNA, 722 bp, Homo Sapiens
  misc_feature (294)..(312): n is a, c, g, or t
ttgtacaaaaaagttggctgctattatactatccaaatttttattgtaacaaaacctctttaagcaattggtgattgccatgggacttttcccatgtcttctgctgtaattatcctgtgcagaactaggaagaaatttttttcaggactgctctatggtttcctttaaaagaaaaaaacttctgtttgtttttagcagtcattatttacaatttgcagtgattaacttggcaaggcttccttccgtgtttatccctgtagccatcatttaagtcaggaacagtcagaaaaatannnnnnnnnnnnnnnnnnngggtgtctgcaaaggtaaaaatccattaaaaccttaagttaaatataaatgttacaactcaatgtttgcttttagattttatacagtatttgttttgttttggttttgagtgtatataatgcagcattagcaatatggttccaatagaggagttaaatatatattgttaaaggagacctgtagcagtcaaagattttattgatttaatgacaaaggaaattaatgaaaatgtttttgtttttctgctgtaattctgcattaagctcacatgaaaatcatgattctagagtttggaatgcaaaattaattgttttaccctcaagctgggaatatttttcacaataaatactataatatagatatcaaattattacctccccatgttatgttgaaaatttttttattaaatt

SEQ ID NO: 193199 - DNA, 1533 bp, Homo Sapiens; identical to SEQ ID NO: 185779
  misc_feature (1260)..(1295): n is a, c, g, or t

SEQ ID NO: 193200 - DNA, 1425 bp, Homo Sapiens
  misc_feature (199)..(234): n is a, c, g, or t
ttggggctgtgcccccggcccgccccgttaggagccgcgagtaaggcgagtgtccaacgccgagctggctgacagagcccggccgcggcctccgcgggcccaggggcctccaggccccgtgaccaccggaccgagcaccctggaacggccccagcttggcctcgggacagtccgcgcgctcaccgactccctggtgaannnnnnnnnnnnnnnnnnnnnnnnnnnnnnnnnnnnagaagcggaaaccggcgcaaggacccggtccccgcggcgccgaatgtagtaagaaaacaaaaactgatgaccaagagaatgtgtcagccgatgcaccgagtccagcccaggaaaatggagagaagggagaattccacaagttggctgatgccaagatatttttgagcgactgcctggcatgtgacagctgtatgactgcagaggaaggagtccaactttcccagcaaaatgccaaggacttcttccgcgttctgaaccttaacaagaaatgtgatacctcaaagcacaaagtgctggtagtgtctgtgtgtcctcaatctttgccttattttgctgctaaattcaacctcagtgtaactgatgcatccagaagactctgtggtttcctcaaaagtcttggggtgcactatgtatttgatacgacgatagctgcggattttagtatcctggagagtcaaaaagaattcgtgcgtcgctatcgccagcacagtgaggaggaacgcaccctgcccatgctgacctctgcctgtcctggctgggtccgatacgccgagcgggtgctgggtcgccccatcactgcccacctctgcaccgccaagtccccccagcaggtcatgggctctttggtgaaggattatttcgccagacagcagaacctgtctccagagaagattttccacgtcattgtggccccttgttatgacaagaagctggaggctcttcaggaaagccttccccctgctttgcatggctcccggggcgctgactgcgtgttaacatcaggtgaaattgctcaaataatggagcaaggtgacctctcagtgagagatgctgccgtcgacactctgtttggagacttgaaggaggacaaagtgacgcgtcatgatggagccagctcagacgggcacctggcacacatcttcagacatgcggccaaggagctgttcaacgaggatgtggaggaggtcacttaccgagccctgagaaacaaagacttccaagaggtcacccttgagaagaacggagaggtggtgttacgctttgctgcagcctatggctttcgaaacatccagaacatgatcctgaagcttaagaagggcaagttcccattccactttgtggaggtcctcgcctgtgctggaggatgcttaaatgggcagaggccaagcccagactccagacggacatgcg

SEQ ID NO: 193201 - DNA, 348 bp, Homo Sapiens
  misc_feature (46)..(57): n is a, c, g, or t
gcttttttataatagccaactttgtacaaaaaagttggatttgccnnnnnnnnnnnncctttgaactttgaagctagtgcattggaaaaatgcaccctttccctcctttggaatgctgtattaatgtagtataataattactggttttgtaacttgttctggtaatgtccttcccggactctttttaaatgtctccccctaagttttatacttgattgtattattactctgtttttaaatgttttgcccggtttttctcttcaatattagtgtatataaaccgatcttcgtgatactgtacatagctgtttgaaatgccagaatgacttctgacattccaagtttttc

SEQ ID NO: 193202 - DNA, 1986 bp, Homo Sapiens; identical to SEQ ID NO: 185780
  misc_feature (1549)..(1558): n is a, c, g, or t
  misc_feature (1785)..(1798): n is a, c, g, or t

SEQ ID NO: 193203 - DNA, 804 bp, Homo Sapiens
ttggttctaatcttttttcatttatatgcaaaagaaatagttttaagtaactttttatagcaagatgatacaatggtatgagtgtaatctaaacttccttgtggtattaccttgtatgctgttacttttattttattccttgtaattaagtcacaggcaggacccagtttccagagagcaggcggggccgcccagtgggtcaggcacagggagccccggtcctatcttagagcccctgagcttcagggaaggggcgggcgtgtcgccgcctctggcatcgcctccggttgccttacaccacgccttcacctgcagtcgcctagaaaacttgctctcaaacttcagggttttttcttccttcaaattttggaccaaagtctcatttctgtgttttgcctgcctctgatgctgggacccggaaggcgggcgctcctgtctttgtgctctttctaccgcccccgcgtcctgtcccgggggctctcctaggatcccctttccgtaaaagcgtgtaacaagggtgtaaatatttataattttttatacctgttgtgagacccgaggggcggcggcgcggttttttatggtgacacaaatgtatattttgctaacagcaattccaggctcagtattgtgaccgcggagccacaggggaccccacgcacattccgttgccttacccgatggcttgtgacgcggagagaaccgattaaaaccgtttgagaaactcctcccttgtctagccctgtgttcgctgtggacgctgtagaggcaggttgggccagtctgtacctggacttcgaataa

SEQ ID NO: 193204 - DNA, 2220 bp, Homo Sapiens; identical to SEQ ID NO: 185782

SEQ ID NO: 193205 - DNA, 1795 bp, Homo Sapiens; identical to SEQ ID NO: 185783

SEQ ID NO: 193206 - DNA, 1059 bp, Homo Sapiens; identical to SEQ ID NO: 185788
  misc_feature (222)..(230): n is a, c, g, or t

SEQ ID NO: 193207 - DNA, 1853 bp, Homo Sapiens; identical to SEQ ID NO: 180768
  misc_feature (285)..(298): n is a, c, g, or t
  misc_feature (804)..(813): n is a, c, g, or t

SEQ ID NO: 193208 - DNA, 2479 bp, Homo Sapiens; identical to SEQ ID NO: 180769
  misc_feature (2134)..(2146): n is a, c, g, or t

SEQ ID NO: 193209 - DNA, 1549 bp, Homo Sapiens; identical to SEQ ID NO: 180770

SEQ ID NO: 193210 - DNA, 1925 bp, Homo Sapiens; identical to SEQ ID NO: 185792

SEQ ID NO: 193211 - DNA, 855 bp, Homo Sapiens; identical to SEQ ID NO: 185793

SEQ ID NO: 193212 - DNA, 489 bp, Homo Sapiens
tttgtacaaaaaagttggagaaaagtgcaccacccaccaccccctttactcgtgcattaaaatttcttatttacccttttcccccttcccatttcttcccactttcatctaccttttctggcaaaaaggagccttttgctctctgtgaccctaagagcacactgcacagggaaaattgccccatccagacctggctccactcttgatctctcttgtcctcttctgctcttttcctggtgctcttttttctcggtggggtgtgggtaatagaacagccgtgggcttttggggacctttaacttttttttctctcttttgtttataaaaaacactaaacattcaattccagagaaccaaaaatcccaccttcccaccgaacactactaaggggcttgtgttctgctccataccttttctcttttctttctgtcttgttaatgcttttaaaaacaaatgagttttttatataaataaagtttttaaagtgtg

SEQ ID NO: 193213 - DNA, 986 bp, Homo Sapiens; identical to SEQ ID NO: 185794

SEQ ID NO: 193214 - DNA, 890 bp, Homo Sapiens; identical to SEQ ID NO: 185795

SEQ ID NO: 193215 - DNA, 2286 bp, Homo Sapiens; identical to SEQ ID NO: 180772
  misc_feature (163)..(197): n is a, c, g, or t
  misc_feature (202)..(235): n is a, c, g, or t
  misc_feature (1003)..(1068): n is a, c, g, or t
  misc_feature (1148)..(1244): n is a, c, g, or t

SEQ ID NO: 193216 - DNA, 923 bp, Homo Sapiens; identical to SEQ ID NO: 185797

SEQ ID NO: 193217 - DNA, 2730 bp, Homo Sapiens; identical to SEQ ID NO: 185799
  misc_feature (659)..(728): n is a, c, g, or t
  misc_feature (730)..(731): n is a, c, g, or t
  misc_feature (2613)..(2621): n is a, c, g, or t

SEQ ID NO: 193218 - DNA, 960 bp, Homo Sapiens
ttggcgccgggtgagtgagagagttggttggtgttgggccggaggaaagcgggaagactcatcggagcgtgtggatttgagccgccgcattttttaaccctagatctcgaaatgcatcgtgattcctgtccattggactgtaaggtttatgtaggcaatcttggaaacaatggcaacaagacggaattggaacgggcttttggctactatggaccactccgaagtgtgtgggttgctagaaacccacccggctttgcttttgttgaatttgaagatccccgagatgcagctgatgcagtccgagagctagatggaagaacactatgtggctgccgtgtaagagtggaactgtcgaatggtgaaaaaagaagtagaaatcgtggcccacctccctcttggggtcgtcgccctcgagatgattatcgtaggaggagtcctccacctcgtcgcagatctccaagaaggagaagcttctctcgcagccggagcaggtccctttctagagataggagaagagagagatcgctgtctcgggagagaaatcacaagccgtcccgatccttctctaggtctcgtagtcgatctaggtcaaatgaaaggaaatagaagacagtttgcaagagaagtggtgtacaggaaattacttcatttgacaggagtatgtacagaaaattcaagttttgtttgagacttcataagcttggtgcatttttaagatgttttagctgttcaaatctgtttgtctcttgaaacagtgacacaaaggtgtaattctctatggtttgaaatggatcatacgaggcatgtaataccaagaattgttactttacaatgttcccttaagcaaaattgaatttgctttgaacttttagttatgcacagactgataataaacctctaaacctgcccagcggaagtgtgttttttttaaatttaaatacaggaaacaactggccaaaa

SEQ ID NO: 193219 - DNA, 1172 bp, Homo Sapiens
  misc_feature (840)..(848): n is a, c, g, or t
ttgggcattttttaaccctagatctcgaaatgcatcgtgattcctgtccattggactgtaaggtttatgtaggcaatcttggaaacaatggcaacaagacggaattggaacgggcttttggctactatggaccactccgaagtgtgtgggttgctagaaacccacccggctttgcttttgttgaatttgaagatccccgagatgcagctgatgcagtccgagagctagatggaagaacactatgtggctgccgtgtaagagtggaactgtcgaatggtgaaaaaagaagtagaaatcgtggcccacctccctcttggggtcgtcgccctcgagatgattatcgtaggaggagtcctccacctcgtcgcagatctccaagaaggagaagcttctctcgcagccggagcaggtccctttctagagataggagaagagagagatcgctgtctcgggagagaaatcacaagccgtcccgatccttctctaggtctcgtagtcgatctaggtcaaatgaaaggaaatagaagacagtttgcaagagaagtggtgtacaggaaattacttcatttgacaggagtatgtacagaaaattcaagttttgtttgagacttcataagcttggtgcatttttaagatgttttagctgttcaaatctgtttgtctcttgaaacagtgacacaaaggtgtaattctctatggtttgaaatggatcatacgaggcatgtaataccaagaattgttactttacaatgttcccttaagcaaaattgaatttgctttgaacttttagttatgcacagactgataataaacctctaaacctgcccagcggaagtgtgnnnnnnnnnaaatttaaatacagaaacaactggcaaaaattgaactaagatttacttttttttccatagctgggatataggctgcagctatagttgaacaagcagtctttaaaaactgctgtgaaacacaggccatcagggaaaacgaaatgctgcactattaaattagaggtttttgaaaaatccaactctcatcctgggcagaggtttgcctagttggtatagaatgttaagtttcaagaagtttacctttgctttaggtcataagttcctttatttgattgctgtatatggatacatggctgttcgtgacattctttatgtgcaaatttg

SEQ ID NO: 193220 - DNA, 1351 bp, Homo Sapiens
  misc_feature (952)..(961): n is a, c, g, or t
ttggataaaaatgaaccccgttacagagtcaccatcatgtctcttctcaccaccctctgaatctgcattagccagtcaactagccctttcagcgtcatgtgaccagcgcgccccattcagcttggctggtgtcgtttcacatgacccaggctggccagtcgtcaggttgcaccgccctttggttcccgagcatgctgttttctctcagccttctctccaaccttaaccaaatcggcagcagccacctcgaccgcccacacattcctggccaatcagctcagctgtttatttaccaaatgtcttcacaacaactacagcagcagccttcggctaacaaaaaagcaggaaaaatccacaacacccccttcgccaaccaactaaatccaacgcaacatctggcaaaaccttttcagcaaattcttcctggccgtcagtccggcagcctcacctcaccatttctagcttgttgaaacccaaaactaatctccaagaaggagaagcttctctcgcagccggagcaggtccctttctagagataggagaagagagagatcgctgtctcgggagagaaatcacaagccgtcccgatccttctctaggtctcgtagtcgatctaggtcaaatgaaaggaaatagaagacagtttgcaagagaagtggtgtacaggaaattacttcatttgacaggagtatgtacagaaaattcaagttttgtttgagacttcataagcttggtgcatttttaagatgttttagctgttcaaatctgtttgtctcttgaaacagtgacacaaaggtgtaattctctatggtttgaaatggatcatacgaggcatgtaataccaagaattgttactttacaatgttcccttaagcaaaattgaatttgctttgaacttttagttatgcacagactgataataaacctctaaacctgcccagcggaagtgtgnnnnnnnnnnaaatttaaatacagaaacaactggcaaaaattgaactaagatttacttttttttccatagctgggatataggctgcagctatagttgaacaagcagtctttaaaaactgctgtgaaacacaggccatcagggaaaacgaaatgctgcactattaaattagaggtttttgaaaaatccaactctcatcctgggcagaggttgcctagttggtatagaatgttaagtttcaagaaagtttacctttgctttaggtcataagttccttatttgattgctgtatatggatacatggctgttcgtgacattctttatgtgcaaatttgtgatttcaaaaatgtcctgccagtttaaggtacattgtagagccgaactttgagttactgtgcaaga

SEQ ID NO: 193221 - DNA, 643 bp, Homo Sapiens
  misc_feature (166)..(174): n is a, c, g, or t
  misc_feature (566)..(574): n is a, c, g, or t
ttggcaaaggtgtaattctctatggtttgaaatggatcatacgaggcatgtaataccaagaattgttactttacaatgttcccttaagcaaaattgaatttgctttgaacttttagttatgcacagactgataataaacctctaaacctgcccagcggaagtgtgnnnnnnnnnaaatttaaatacagaaacaactggcaaaaattgaactaagatttacttttttttccatagctgggatataggctgcagctatagttgaacaagcagtctttaaaaactgctgtgaaacacaggccatcagggaaaacgaaatgctgcactattaaattagaggtttttgaaaaatccaactctcatcctgggcagaggttgcctagttggtatagaatgttaagtttcaagaaagtttacctttgctttaggtcataagttccttatttgattgctgtatatggatacatggctgttcgtgacattctttatgtgcaaatttgtgatttcaaaaatgtcctgccagtttaagggtacattgtagagccgaactttgagttactgtgcaagannnnnnnnncatgctgtcatttgtaatatgttttgtgagaatccttgggattaaagttttggttacaaattgttcttt

SEQ ID NO: 193222 - DNA, 875 bp, Homo Sapiens
  misc_feature (70)..(78): n is a, c, g, or t
aaagaacaatttgtaaccaaaactttaatcccaaggattctcacaaaacatattacaaatgacagcatgnnnnnnnnntcttgcacagtaactcaaagttcggctctacaatgtacccttaaactggcaggacatttttgaaatcacaaatttgcacataaagaatgtcacgaacagccatgtatccatatacagcaatcaaataaggaacatatgacctaaagcaaaggtaaactttcttgaaacttaacattctataccaactaggcaacctctgcccaggatgagagttggatttttcaaaaacctctaatttaatagtgcagcatttcgttttccctgatggcctgtgtttcacagcagtttttaaagactgcttgttcaactatagctgcagcctatatcccagctatggaaaaaaaagtaaatcttagttcaatttttgccagttgtttctgtatttaaatttgagaaaaaacacacttccgctgggcaggtttagaggtttattatcagtctgtgcataactaaaagttcaaagcaaattcaattttgcttaagggaacattgtaaagtaacaattcttggtattacatgcctcgtatgatccatttcaaaccatagagaattacacctttgtgtcactgtttcaagagacaacagatttgaacagctaaaacatcttaaaaatgcaccaagcttatgaagtctcaaacaaaacttgaattttctgtacatactcctgtcaaatgaagtaatttcctgtacaccacttctcttgcaaactgtcttctatttcctttctatttgaggctagatcgactccaacttttttgtacaaaggcggcttttatgtaaagcattgctcatcaatt

SEQ ID NO: 193223 - DNA, 974 bp, Homo Sapiens
  misc_feature (916)..(924): n is a, c, g, or t
actttgtacaaaagagttggttggtgttgggccggaggaaagcgggaagactcatcggagcgtgtggatttgagccgccgcattttttaaccctagatctcgaaatgcatcgtgattcctgtccattggactgtaaggtttatgtaggcaatcttggaaacaatggcaacaagacggaattggaacgggcttttggctactatggaccactccgaagtgtgtgggttgctagaaacccacccggctttgcttttgttgaatttgaagatccccgagatgcagctgatgcagtccgagagctagatggaagaacactatgtggctgccgtgtaagagtggaactgtcgaatggtgaaaaaagaagtagaaatcgtggcccacctccctcttggggtcgtcgccctcgagatgattatcgtaggaggagtcctccacctcgtcgcagatctccaagaaggagaagcttctctcgcagccggagcaggtccctttctagagataggagaagagagagatcgctgtctcgggagagaaatcacaagccgtcccgatccttctctaggtctcgtagtcgatctaggtcaaatgaaaggaaatagaagacagtttgcaagagaagtggtgtacaggaaattacttcatttgacaggagtatgtacagaaaattcaagttttgtttgagacttcataagcttggtgcatttttaagatgttttagctgttcaaatctgtttgtctcttgaaacagtgacacaaaggtgtaattctctatggtttgaaatggatcatacgaggcatgtaataccaagaattgttactttacaatgttcccttaagcaaaattgaaatttgctttgaacttttagttatgcacagactgataataaacctctaaacctgcccagcggaagtgtgnnnnnnnnnaattttaatacagaacaactggcaaaattgaactaagatttacttttttt

SEQ ID NO: 193224 - DNA, 1179 bp, Homo Sapiens
  misc_feature (182)..(190): n is a, c, g, or t
  misc_feature (954)..(967): n is a, c, g, or t
actttgtacaaaaaagttggcaaaggtgtaattctctatggtttgaaatggatcatacgaggcatgtaataccaagaattgttactttacaatgttcccttaagcaaaattgaatttgctttgaacttttagttatgcacagactgataataaacctctaaacctgcccagcggaagtgtgnnnnnnnnnaaatttaaatacagaaacaactggcaaaaattgaactaagatttacttttttttccatagctgggatataggctgcagctatagttgaacaagcagtctttaaaaactgctgtgaaacacaggccatcagggaaaacgaaatgctgcactattaaattagaggtttttgaaaaatccaactctcatcctgggcagaggttgcctagttggtatagaatgttaagtttcaagaaagtttacctttgctttaggtcataagttccttatttgattgctgtatatggatacatggctgttcgtgacattctttatgtgcaaatttgtgatttcaaaaatgtcctgccagtttaagggtacattgtagagccgaactttgagttactgtgcaagatttttatttcatgctgtcatttgtaatatgttttgtgagaatccttgggattaaagttttggttacaaattgttctttaacttgaaagcctgtttttccttgcaaactcaaatctgtgagcttggtaccaagtccaggtataacattcctattggaagccatacttatattttcttgtaaagtgcttttgaattaataaaatattagcataattgtgtatagtcagttgaacccactgttaccattgttcttatcccatgggaagcagttggttacacgattcttattttataagaaacagctgagaggcactatggattagtcttctgaagtgaaggaaatatagatgtcacctaagtgatagttaacccannnnnnnnnnnnnnaggcatagaagccagttcagggtccataatatttagtgaccaacattttaaagtatagcagcaacctggttcttaaacacaaagtaagttgcccattaacaaatggcttttatcttttagcatgaaaacttttcacaggtctaaaaattgcttccattttataatttgaggtgttgcatggggaattctaagctgatcatcatgatgtaaaa

SEQ ID NO: 193225 - DNA, 894 bp, Homo Sapiens
  misc_feature (492)..(501): n is a, c, g, or t
ctttgtacaaaaaagttggctaatctccaagaaggagaagcttctctcgcagccggagcaggtccctttctagagataggagaagagagagatcgctgtctcgggagagaaatcacaagccgtcccgatccttctctaggtctcgtagtcgatctaggtcaaatgaaaggaaatagaagacagtttgcaagagaagtggtgtacaggaaattacttcatttgacaggagtatgtacagaaaattcaagttttgtttgagacttcataagcttggtgcatttttaagatgttttagctgttcaaatctgtttgtctcttgaaacagtgacacaaaggtgtaattctctatggtttgaaatggatcatacgaggcatgtaataccaagaattgttactttacaatgttcccttaagcaaaattgaatttgctttgaacttttagttatgcacagactgataataaacctctaaacctgcccagcggaagtgtgnnnnnnnnnnaaatttaaatacagaaacaactggcaaaaattgaactaagatttacttttttttccatagctgggatataggctgcagctatagttgaacaagcagtctttaaaaactgctgtgaaacacaggccatcagggaaaacgaaatgctgcactattaaattagaggtttttgaaaaatccaactctcatcctgggcagaggttgcctagttggtatagaatgttaagtttcaagaaagtttacctttgctttaggtcataagttccttatttgattgctgtatatgggatacatggctgttcgtgacattctttatgtgcaaatttgtgattttcaaaaatgtcctgccagtttaagggtacattgtagagccgaactttgagttactgtgcaaga

SEQ ID NO: 193226 - DNA, 905 bp, Homo Sapiens; identical to SEQ ID NO: 180775

SEQ ID NO: 193227 - DNA, 1266 bp, Homo Sapiens; identical to SEQ ID NO: 185803
  misc_feature (140)..(239): n is a, c, g, or t
  misc_feature (1214)..(1222): n is a, c, g, or t

SEQ ID NO: 193228 - DNA, 1627 bp, Homo Sapiens; identical to SEQ ID NO: 185807
  misc_feature (198)..(248): n is a, c, g, or t

SEQ ID NO: 193229 - DNA, 1130 bp, Homo Sapiens; identical to SEQ ID NO: 180778
  misc_feature (41)..(56): n is a, c, g, or t
  misc_feature (430)..(467): n is a, c, g, or t
  misc_feature (514)..(564): n is a, c, g, or t
  misc_feature (723)..(734): n is a, c, g, or t

SEQ ID NO: 193230 - DNA, 2966 bp, Homo Sapiens; identical to SEQ ID NO: 185809
  misc_feature (2651)..(2675): n is a, c, g, or t

SEQ ID NO: 193231 - DNA, 1312 bp, Homo Sapiens; identical to SEQ ID NO: 185810
  misc_feature (1189)..(1204): n is a, c, g, or t

SEQ ID NO: 193232 - DNA, 1062 bp, Homo Sapiens; identical to SEQ ID NO: 185811
  misc_feature (68)..(90): n is a, c, g, or t

SEQ ID NO: 193233 - DNA, 1217 bp, Homo Sapiens; identical to SEQ ID NO: 185812
  misc_feature (496)..(602): n is a, c, g, or t
  misc_feature (763)..(805): n is a, c, g, or t

SEQ ID NO: 193234 - DNA, 959 bp, Homo Sapiens
tacaaaaaagttgggtcttcccgacccagtgtgctgagctctccgcgtcgcctctgtcgcccgcgcctggcctaccgcggcactcccggctgcacgctctgcttggcctcgccatgccggtggacctcagcaagtggtccgggcccttgagcctgcaagaagtggacgagcagccgcagcacccgctgcatgtcacctacgccggggcggcggtggacgagctgggcaaagtgctgacgcccacccaggttaagaatagacccaccagcatttcgtgggatggtcttgattcagggaagctctacaccttggtcctgacagacccggatgctcccagcaggaaggatcccaaatacagagaatggcatcatttcctggtggtcaacatgaagggcaatgacatcagcagtggcacagtcctctccgattatgtgggctcggggcctcccaagggcacaggcctccaccgctatgtctggctggtttacgagcaggacaggccgctaaagtgtgacgagcccatcctcagcaaccgatctggagaccaccgtggcaaattcaaggtggcgtccttccgtaaaaagtatgagctcagggccccggtggctggcacgtgttaccaggccgagtgggatgactatgtgcccaaactgtacgagcagctgtctgggaagtagggggttagcttggggacctgaactgtcctggaggccccaagccatgttccccagttcagtgttgcatgtataatagatttctcctcttcctgccccccttggcatgggtgagacctgaccagtcagatggtagttgagggtgacttttcctgctgcctggcctttataattttactcactcactctgatttatgttttgatcaaattgaacttcattttggggggtattttgggtactgtgatggggtcatcaaattattaatctgaaaataccacccagaa

SEQ ID NO: 193235 - DNA, 696 bp, Homo Sapiens
  misc_feature (618)..(643): n is a, c, g, or t
actttgtacaaaaaagttggatcatttcctggtggtcaacatgaagggcaatgacatcagcagtggcacagtcctctccgattatgtgggctcggggcctcccaagggcacaggcctccaccgctatgtctggctggtttacgagcaggacaggccgctaaagtgtgacgagcccatcctcagcaaccgatctggagaccaccgtggcaaattcaaggtggcgtccttccgtaaaaagtatgagctcagggccccggtggctggcacgtgttaccaggccgagtgggatgactatgtgcccaaactgtacgagcagctgtctgggaagtagggggttagcttggggacctgaactgtcctggaggccccaagccatgttccccagttcagtgttgcatgtataatagatttctcctcttcctgccccccttggcatgggtgagacctgaccagtcagatggtagttgagggtgacttttcctgctgcctggcctttataattttactcactcactctgatttatgttttgatcaaatttgaacttcattttggggggtattttggtactgtgatggggtcatcaaattattaatctgaaaatagcaacccagaatgtnnnnnnnnnnnnnnnnnnnnnnnnnngaccaggtctacagtgatagagcaaagcatcaaagaatctttaagggaggttt

SEQ ID NO: 193236 - DNA, 912 bp, Homo Sapiens
ttgggcctccgcccggccccgaggggctctccccggaggctcagccccctctgctccccatgggcaactgccaggcagggcacaacctgcacctgtgtctggcccaccacccacctctggtctgtgccactttgatcctgctgctccttggcctctctggcctgggccttggcagcttcctcctcacccacaggactggcctgcgcagccctgacatcccccaggactgggtctcttttttgagatcttttggccagctgaccctgtgtcccaggaatgggacagtcacagggaagtggcgagggtctcacgtcgtgggcttgctgaccaccttgaacttcggagacggtccagacaggaacaagacccggacattccaggccacagtcctgggaagtcagatgggattgaaaggatcttctgcaggacaactggtccttatcacagccagggtgaccacagaaaggactgcaggaacctgcctatattttagtgctgttccaggaatcctaccctccagccagccacccatatcctgctcagaggagggggctggaaatgccaccctgagccctagaatgggtgaggaatgtgttagtgtctggagccatgaaggccttgtgctgaccaagctgctcacctcggaggagctggctctgtgtggctccaggctgctggtcttgggctccttcctgcttctcttctgtggccttctctgctgtgtcactgctatgtgcttccacccgcgccgggagtcccactggtctagaacccggctctgagggcactggcctagttcccgacttgtttctcaggtgtgaatcaacttcttgggccttggctctgagttggaaaaggttttaaaaaagtgaagagctggaatgtgggggaaaataaaaagcttttttgccc

SEQ ID NO: 193237 - DNA, 1060 bp, Homo Sapiens; identical to SEQ ID NO: 180782

SEQ ID NO: 193238 - DNA, 970 bp, Homo Sapiens; identical to SEQ ID NO: 185816

SEQ ID NO: 193239 - DNA, 1228 bp, Homo Sapiens; identical to SEQ ID NO: 180783
  misc_feature (162)..(170): n is a, c, g, or t

SEQ ID NO: 193240 - DNA, 1896 bp, Homo Sapiens; identical to SEQ ID NO: 180784
  misc_feature (428)..(440): n is a, c, g, or t
  misc_feature (907)..(954): n is a, c, g, or t
  misc_feature (1504)..(1512): n is a, c, g, or t

SEQ ID NO: 193241 - DNA, 976 bp, Homo Sapiens; identical to SEQ ID NO: 185819

SEQ ID NO: 193242 - DNA, 1041 bp, Homo Sapiens
gagcaatgcttttttcctattaaaacaactttgtacaaaaaagttggcttctgtttctccccttatctggatgttatcagatcacagaccatggtctcagggttttgactctgggaggagggctgccttatttggagcaccttaatctctctggttgtcttactataactggtgcaggcctgcaggatttggtttcagcatgtccttctctgaatgatgaatacttttactactgtgacaacattaacggtcctcatgctgataccgccagtggatgccagaatttgcagtgtggttttcgagcctgctgccgctctggcgaatgacccttgacttctgatctttgtctacttcatttagctgagcaggctttctttcatgcactttactcatagcacatttcttgtgttaaccatccctttttgagcgtgacttgttttggccccatttcttacaacttcagaaatcttaatttaccagtgaattgtaatgttgtttctcttgcaaattatacttttggtttagaaagggattaggtcttttcaaaagggtgagaacagtcttacatttttcttttaaatgaaatgctttaaagaatgttggtaatgccatgtcatttaaagtatttcatagataattttgagttttaaagtccatggaggtgattggttctctttacacattaacactgtaccaagctttgcagatcttttccgacacacatgtctgaagacttattttcaaagacagcacatttttggaaactaatctcttttccgtaatatttcctttatttcaatgattctcagaaggccaattcaaacaaacccacatttaaggttctttaggattatagaataaattggcttttgagtgttagctcagtgagctaggaaagcaccaatcgatatttgtttcctttagggatactttgttctcaccactgtccctatgtcatcaaatttgggagagattttttaaaataccacaatcatttgaagaaatgtataaataaaatttactttgaggactttaccaagt

SEQ ID NO: 193243 - DNA, 1554 bp, Homo Sapiens; identical to SEQ ID NO: 185823

SEQ ID NO: 193244 - DNA, 855 bp, Homo Sapiens
ctttgtacaaaaaagttggattttaaattacacagttcacaaacagtaaaggccatgtgaagagaattattacatctttattaacctcagcatttactttgtttcttttgcttaggaaattgctcataatctggttataattttggtccaaattctttattcttccttgagctaagcagaataatggaatataatatgtcttcataatataacaacactaatacactaatagtaagattaagttaggcagtcttctaccaaatgtgtaatggagattgcctcaaaattgtgtccacataatccacgctcatcttgcaaagcgctatttcaggcacatcattggaatacaggaagtagccctgcacctgccagtgagctcgccattcactgattggaagagtgacctggcatcttggaaatcattgtgtgtcttcaggagaatgtgcagtgtcttgtaacaactaattataatgcaaattagggctacattgtaatctgctttgttaatgaaaatgataaaacagaatattgacaagctaggacacctgtggtatctttaattgtatctccttcagaagtttgcttcttatggtataataaagtatggaagaatattgagtatatgtttactctgggcctgggagaacttaactttctagagcagtttgttgacttgtgtgcaatggggagaggtaccatgatgacactcacagggagccactgttcactgacacttggaagcggtcattgttaatatcacgggcgtaacactttgaacgatatagagatgcacaaacagttgaacttagaagtagcagtattggctttatgtaataaaggaagcatttttgactt

SEQ ID NO: 193245 - DNA, 965 bp, Homo Sapiens
gccaactttgtacaaaaaagttggctctcggtcccgcagccgtgaggaggacggtctgcatactcgctgcccgccggctccctcccccgcgtccctgcgaccgccgcggcgaagatggcctcaggagtgcaagtagctgatgaagtatgtcgcattttttatgacatgaaagttcgtaaatgctccacaccagaagaaatcaagaaaagaaagaaggctgtcattttttgtctcagtgcagacaaaaagtgcatcattgtagaagaaggcaaagagatcttggttggagatgttggtgtaaccataactgatcctttcaagcattttgtgggaatgcttcctgaaaaagattgtcgctatgctttgtatgatgcaagctttgaaacaaaagaatccagaaaagaagagttgatgttttttttgtgggcaccagaactagcacctctgaaaagtaaaatgatctatgcaagctccaaggatgcaattaaaaagaaatttcaaggcataaaacatgaatgtcaagcaaatggaccagaagatctcaatcgggcttgtattgctgaaaagttaggtggatccttaattgtagcctttgaaggatgccctgtgtagattattcagtgccacaaattgaaagcttccatgtttaatgttatcctcttgctatataaataaagcaaatatatttaggccagggtctcactgagggggagctgtcttgtcatcttttagagtaaactattctataaacatatgcaaacagccctaaataaatctaaagtctaaagttttattgatgtgaaattaaattcttattggccaaatgcctgttttgatgagttgatttataaagatttttgttaagctcaggattttaaattacacagttcacaaacagtaaaaggccatgtgaagagaattattacatctttattaacctcagcattttactttgtttcttttgc

SEQ ID NO: 193246 - DNA, 1534 bp, Homo Sapiens; identical to SEQ ID NO: 185827
  misc_feature (431)..(473): n is a, c, g, or t
  misc_feature (645)..(674): n is a, c, g, or t
  misc_feature (1118)..(1132): n is a, c, g, or t

SEQ ID NO: 193247 - DNA, 1793 bp, Homo Sapiens; identical to SEQ ID NO: 180788
  misc_feature (354)..(368): n is a, c, g, or t
  misc_feature (810)..(840): n is a, c, g, or t
  misc_feature (1011)..(1053): n is a, c, g, or t

SEQ ID NO: 193248 - DNA, 2034 bp, Homo Sapiens; identical to SEQ ID NO: 180789
  misc_feature (1826)..(1835): n is a, c, g, or t

SEQ ID NO: 193249 - DNA, 901 bp, Homo Sapiens; identical to SEQ ID NO: 180790
  misc_feature (721)..(731): n is a, c, g, or t

SEQ ID NO: 193250 - DNA, 2105 bp, Homo Sapiens; identical to SEQ ID NO: 185833
  misc_feature (1825)..(1840): n is a, c, g, or t

SEQ ID NO: 193251 - DNA, 1643 bp, Homo Sapiens; identical to SEQ ID NO: 185834
  misc_feature (1388)..(1408): n is a, c, g, or t

SEQ ID NO: 193252 - DNA, 1468 bp, Homo Sapiens; identical to SEQ ID NO: 185836

SEQ ID NO: 193253 - DNA, 1512 bp, Homo Sapiens; identical to SEQ ID NO: 185837
  misc_feature (1332)..(1341): n is a, c, g, or t

SEQ ID NO: 193254 - DNA, 1429 bp, Homo Sapiens; identical to SEQ ID NO: 180792
  misc_feature (917)..(950): n is a, c, g, or t

SEQ ID NO: 193255 - DNA, 528 bp, Homo Sapiens
ctttgtacaaaaaagttggctgaggctttggccctgtgtcaagtattagcatttcattagtacttcacatgcttttgatgtactcttgagattgctttaaattttgtattgaaacaacaatacattttgcactgtagtaatgggagcactaactcttacaacagttagtgaatcgttttaaagaatcagttcagtgtagacattttgaaaagattgtttcctgtgctttacgatagcttagtgcaatgtgcacttctgttttacttgccattttcctgctctgttttctctgtgacatgaagcaacagaaactgagatcaaagttaagattatatcctgtttgtagtatcagatatttttctgtgtacaattataggattgtaatctaaactggaatttttaggcagtaagtcaccacaaaatgttttagataagacacaataaaattattataaataaaagcttaatgtttgtaaaaaatctcttttttagtatttcttttttcacatgaaagaagtggtggctgct

SEQ ID NO: 193256 - DNA, 969 bp, Homo Sapiens
ttggcttaggggcgcctggcgctacgggtttctcgttggaggcggccttcgtggcagctgtagacgccgggaaaaggcataaagtccgttggccgacacctttctttcctccggcctcggtagaaccgccagcccgcgtccgaaggcggaggcgaggggaactggccgcgtgaggggcctgaggcgagcggttagagcgtctcccggaaggatgggccggtctcggagccggagctcgtcccgctccaagcacaccaagagcagcaagcacaacaagaagcgcagccggtcccggtcgcgatcccgggacaaggagcgcgtgcggaagcgttccaaatctcgggaaagtaaacggaaccggcggcgggagtcgcggtcccgttcgcgctccaccaacacggccgtgtcccggcgcgagcgggaccgggagcgcgcctcgtccccgcccgaccgcatcgacatcttcgggcgcacggtgagcaagcgcagcagcctggacgagaagcagaagcgagaggaggaggagaagaaagcggagttcgagcggcagcgaaaaattcgacagcaagaaatagaagaaaaactcatcgaggaagaaacagcacgaagagtagaagaattggtagcaaaaagggtggaggaagaactggagaaaaggaaggatgaaattgaacgagaagttctccgaagggtggaggaagccaaacgcatcatggaaaagcagttgctcgaagaactcgagcgacagagacaagctgagcttgccgcacaaaaagctagagaggtaacgctcggtcgtttggaaagtagagacagtccatggcaaaactttcagtgttgggttctgcctcctgctcagttcagaaagagatggaatacagactatctaattcctttctcgtctaaacttaacattgctgcgaaagttaattttttagcctattcagaagtgctgactgataacttaaa

SEQ ID NO: 193257 - DNA, 831 bp, Homo Sapiens; identical to SEQ ID NO: 185840

SEQ ID NO: 193258 - DNA, 1146 bp, Homo Sapiens; identical to SEQ ID NO: 185842
  misc_feature (954)..(1014): n is a, c, g, or t

SEQ ID NO: 193259 - DNA, 3264 bp, Homo Sapiens; identical to SEQ ID NO: 185843
  misc_feature (1028)..(1037): n is a, c, g, or t

SEQ ID NO: 193260 - DNA, 1344 bp, Homo Sapiens
ttgtacaaaaaagttgggttcttcaatgcccaaaaaaaccatcccgtggcataaacccagatgaagctgtagcgtatggtgctgctgtccaggctggtgtgctctctggtgatcaagatacaggtgacctggtactgcttgatgtatgtccccttacacttggtattgaaactgtgggaggtgtcatgaccaaactgattccaaggaacacagtggtgcctaccaagaagtctcagatcttttctacagcttctgataatcaaccaactgttacaatcaaggtctatgaaggtgaaagacccctgacaaaagacaatcatcttctgggtacatttgatctgactggaattcctcctgctcctcgtggggtcccacagattgaagtcacctttgagatagatgtgaatggtattcttcgagtgacagctgaagacaagggtacagggaacaaaaataagatcacaatcaccaatgaccagaatcgcctgacacctgaagaaatcgaaaggatggttaatgatgctgagaagtttgctgaggaagacaaaaagctcaaggagcgcattgatactagaaatgagttggaaagctatgcctattctctaaagaatcagattggagataaagaaaagctgggaggtaaactttcctctgaagataaggagaccatggaaaaagctgtagaagaaaagattgaatggctggaaagccaccaagatgctgacattgaagacttcaaagctaagaagaaggaactggaagaaattgttcaaccaattatcagcaaactctatggaagtgcaggccctcccccaactggtgaagaggatacagcagaaaaagatgagttgtagacactgatctgctagtgctgtaatattgtaaatactggactcaggaacttttgttaggaaaaaattgaaagaacttaagtctcgaatgtaattggaatcttcacctcagagtggagttgaaactgctatagcctaagcggctgtttactgcttttcattagcagttgctcacatgtctttgggtgggggggagaagaagaattggccatcttaaaaagcgggtaaaaaacctgggttagggtgtgtgttcaccttcaaaatgttctatttaacaactgggtcatgtgcatctggtgtaggaagttttttctaccataagtgacaccaataaatgtttgttatttacactggtctaatgtttgtgagaagcttctaattagatcaattacttattttaggaaatttaagactagatactcgtgtgtggggtgaggggagggagtatttggtatgttgggataagaaacacttctatttaatgcttcaggga

SEQ ID NO: 193261 - DNA, 2506 bp, Homo Sapiens; identical to SEQ ID NO: 185844
  misc_feature (2372)..(2384): n is a, c, g, or t

SEQ ID NO: 193262 - DNA, 1279 bp, Homo Sapiens; identical to SEQ ID NO: 185850

SEQ ID NO: 193263 - DNA, 959 bp, Homo Sapiens
agtgacctgttcgttgcacaattgatgagcatgctttcttaatgccaactttgtacaaatagttgggtcttggacacgctcatcctttacctgcgcatcgtgcattccttggattattacaacacctgtgagtaccccaacgaggacgagatgcccaatcgctgtgggatcatccacgttcgggggcccatgccacccaaccgcatcagtcacggggaagtgctggagtggcagaagacttttgaggagaagctcacgccgttgctgagtgtgcgggagtcactctcagaggaagaggcccagaagatggggcgcaaagacccagagcaggaagtggagaagttcgtcacctccaacacgcaggaactgggcaaggataagtggctgtgtcctctcagtggcaagaaattcaagggtcctgagtttgtgcgcaaacatatcttcaacaagcatgcagagaaaattgaggaagtggaaaaggaagtcgcgttttttaacaacttcctcactgatgctaagcgcccagctctgcctgagatcaagccagcccagccacctggccccgcccagatactccccccaggtttgaccccaggactcccctacccacaccagactccccagggcctgatgccctatggtcagccccggcccccgatcttgggctatggagctggtgctgtccgccctgcagtccccacaggaggccctccatacccccatgccccgtatggtgctggtcgagggaactatgatgccttccgaggccagggaggttatcctgggaaacctcgcaacaggatggttcgtggagacccaagggccattgtggaatatcgggacctggatgccccagacgatgttgatttcttttgagccgtcccccgttcctcagtcctgtatcatccatacttgtactaccttgtcctatgaagctctgagaattttttgtacgatca

SEQ ID NO: 193264 - DNA, 2042 bp, Homo Sapiens; identical to SEQ ID NO: 185851
  misc_feature (695)..(704): n is a, c, g, or t
  misc_feature (867)..(877): n is a, c, g, or t
  misc_feature (1487)..(1497): n is a, c, g, or t

SEQ ID NO: 193265 - DNA, 2398 bp, Homo Sapiens; identical to SEQ ID NO: 185852
  misc_feature (2135)..(2145): n is a, c, g, or t

SEQ ID NO: 193266 - DNA, 1883 bp, Homo Sapiens; identical to SEQ ID NO: 185853
  misc_feature (719)..(728): n is a, c, g, or t
  misc_feature (891)..(901): n is a, c, g, or t
  misc_feature (1511)..(1521): n is a, c, g, or t

SEQ ID NO: 193267 - DNA, 1336 bp, Homo Sapiens; identical to SEQ ID NO: 185854
  misc_feature (58)..(67): n is a, c, g, or t
  misc_feature (230)..(240): n is a, c, g, or t
  misc_feature (850)..(860): n is a, c, g, or t

SEQ ID NO: 193268 - DNA, 1015 bp, Homo Sapiens
  misc_feature (552)..(562): n is a, c, g, or t
gtacaaaaaagttggctttagaatcagctgaaccaagccagttggaagttccagccacagaagaaataaaagagactgatggaagctctcagatcaagcaagaaccagaccccacgtggtagacctcttccctcctaggcttaaagtatcagtggttgagaagagcttttcggacctgttactaccccaagctgtgtaatatacttgtataacagaaataccttctatacaaacctttttttctacttttagatagaaatgtctactttttcagcagttctgtgaattaaagagcagagtgactgtgggtctggaatggctggtgtacttgggaatgtactatcaggattttacagcaatgctgggaaatgacagggaaaatgacaggaatgaatctcaccagattttttatgtactcagcagagccttgagttacggtgtttattttccaatcaagtgaagatatctcctacttctcctactggaacatctcagcttctgcagtgaagaaaaattcctgtgatagttcagttctttagtttttctatttgnnnnnnnnnnntcatttaaatgatcctttgttcacggctctccttaatgactgagtgaacagttcctatctgtatatttgactaaaccttttcctaagctatctctcatggttcctatgtttttttatcataattaaaagcaaaaccatctggatcacctaacagtcagaggtcagtatctcagcgtgtgaattatagaggaaatacagagagaacctcttccacttttacttttcgtccaaataaaatgcatggtgtaccagaagttgaagatcgggttgaggattggggctagctcgatgacactaagggccccaacatcgcgggacctgctgtggcgcggattcttaggaacgctgttctagccggccccctctccaggggtcgccgtggccggcattatttcctagttcttcttgtaaccctgaggtgccagcgcggggagttgagaaggggtcaggggg

SEQ ID NO: 193269 - DNA, 935 bp, Homo Sapiens
ctataaaagccaactttgtacaaaaaagttggcttacggatcctctcctggagaggatattacttgcaaaggaaaggattcgttttgtgattaagaaacatgagcttctgaattcaacacgtgaagatttacagcttgataagccagcttcaggagtaaaggaagaatggtatgccagaatcactaaattaagaaagatggtggatcagcttttctgcaaaaaatttgcggaagccttggggagcactgaagccaaggctgtaccgtaccaaaaatttgaggcacacccgaatgatctgtacgtggaaggactgccagaaaacattcctttccgaagtccctcatggtatggaatcccaaggctggaaaaaatcattcaagtgggcaatcgaattaaatttgttattaaaagaccagaacttctgactcacagtaccactgaagttactcagccaagaacgaatacaccagtcaaagaagattggaatgtcagaattaccaagctacggaagcaagtggaagagatttttaatttgaaatttgctcaagctcttggactcaccgaggcagtaaaagtaccatatcctgtgtttgaatcaaacccggagttcttgtatgtggaaggcttgccagaggggattcccttccgaagccctacctggtttggaattccacgacttgaaaggatcgtccgcgggagtaataaaatcaagttcgttgttaaaaaacctgaactagttatttcctacttgcctcctgggatggctagtaaaataaacactaaagctttgcagtcccccaaaagaccacgaagtcctgggagtaattcaaaggttcctgaaattgagtcaccgtggaagccctaataacaacaatcctcaaacctcagctgttcgaaccccgacccagactaacggttctaacgttcccttcaa

SEQ ID NO: 193270 - DNA, 1556 bp, Homo Sapiens; identical to SEQ ID NO: 185857

SEQ ID NO: 193271 - DNA, 1278 bp, Homo Sapiens; identical to SEQ ID NO: 185858

SEQ ID NO: 193272 - DNA, 852 bp, Homo Sapiens; identical to SEQ ID NO: 180799

SEQ ID NO: 193273 - DNA, 886 bp, Homo Sapiens; identical to SEQ ID NO: 185864

SEQ ID NO: 193274 - DNA, 2584 bp, Homo Sapiens; identical to SEQ ID NO: 185868
  misc_feature (1955)..(1997): n is a, c, g, or t

SEQ ID NO: 193275 - DNA, 1729 bp, Homo Sapiens; identical to SEQ ID NO: 185869
  misc_feature (189)..(231): n is a, c, g, or t
  misc_feature (897)..(921): n is a, c, g, or t
  misc_feature (993)..(1060): n is a, c, g, or t

SEQ ID NO: 193276 - DNA, 1672 bp, Homo Sapiens; identical to SEQ ID NO: 185871
  misc_feature (110)..(129): n is a, c, g, or t
  misc_feature (185)..(201): n is a, c, g, or t

SEQ ID NO: 193277 - DNA, 1355 bp, Homo Sapiens; identical to SEQ ID NO: 185872
  misc_feature (390)..(418): n is a, c, g, or t
  misc_feature (551)..(610): n is a, c, g, or t

SEQ ID NO: 193278 - DNA, 1463 bp, Homo Sapiens
  misc_feature (1095)..(1113): n is a, c, g, or t
ttggatcctggccactgctcttaatcgtccctctcctgcttcagggtggcattgtgtgtcccagagtgccggagcgagtcccagaagagaggcgaggctaagcccagagcgctgggttgcttcagcagggaagactcccttccccctgcttcaggctgctgagcactgagcagcgctcagaatggaagccatcgccaaatatgacttcaaagctactgcagacgacgagctgagcttcaaaaggggggacatcctcaaggttttgaacgaagaatgtgatcagaactggtacaaggcagagcttaatggaaaagacggcttcattcccaagaactacatagaaatgaaaccacatccgtggttttttggcaaaatccccagagccaaggcagaagaaatgcttagcaaacagcggcacgatggggcctttcttatccgagagagtgagagcgctcctggggacttctccctctctgtcaagtttggaaacgatgtgcagcacttcaaggtgctccgagatggagccgggaagtacttcctctgggtggtgaagttcaattctttgaatgagctggtggattatcacagatctacatctgtctccagaaaccagcagatattcctgcgggacatagaacaggtgccacagcagccgacatacgtccaggccctctttgactttgatccccaggaggatggagagctgggcttccgccggggagattttatccatgtcatggataactcagaccccaactggtggaaaggagcttgccacgggcagaccggcatgtttccccgcaattatgtcacccccgtgaaccggaacgtctaagagtcaagaagcaattatttaaagaaagtgaaaaatgtaaaacacatacaaaagaattaaacccacaagctgcctctgacagcagcctgtgagggagtgcagaacacctggccgggtcaccctgtgaccctctcactttggttggaactttagggggtgggagggggcgttggatttaaaaatgccaaaacttacctataaattaagaagagtttttattacaaattttcactgctgctcctctttcccctcctttgtcnnnnnnnnnnnnnnnnnnnctcttctgtccatcagtgcatgacgtttaaggccacgtatagtcctagctgacgccaataataaaaaacaagaaaccaagtgggctggtattctctctatgcaaaatgtctgttttagttggaatgactgaaagaagaacagctgttcctgtgttcttcgtatatacacacaaaaaggagcgggcagggccgctcgatgcctttgctgtttagcttcctccagaggaggggacttgtaggaatctgccttccagcccagacccccagtgtattttgtccaagttcacagtagagtagggtagaaggaaagcatgtctctgcttccatggcttcctgagaaagcccacctg

SEQ ID NO: 193279 - DNA, 1680 bp, Homo Sapiens; identical to SEQ ID NO: 185877

SEQ ID NO: 193280 - DNA, 951 bp, Homo Sapiens
tcagataacatttatacattttccacaggacacagaggttcattggctcattcttatgccaaagcaagtaaatagaggcattagcaaaaggtgcaatagttcactgttatgtttaaaaaatatttatgcacattgcattcatttagatatatatatttttaaaaagttatggaaaagcatagttcacaggttactatttctacatacattgtaatacaacataaatgatgtagaacattaaaaaaatcttccaatagagagttaagcaactgaaagtttccaccaagagattaaaacactgattccagtagttagtgagatctagaatgacatttccaggctctggctcaactctgcattatcatatgcacacaaacagagccagctccaaaacacactgtaatcaatgtaattttttgcatgccaactcacccttaagaaacactttgagttatttttacccacgatcattctggatcattgattttgcatcgaactgtgacatcacttgggtgaaaggggaaacgcctatattaagcctaggtttaaatttgtatttacattaaaaagaaaggtcactgaaaagatttttttaaatctgtaaaaatcaagaagtggtagttttcttactggtgggattagacctgctgatttcttctagtgctgccctctaaagatacaaaaaattagaaagatttgacccttttaaaactcaaatatcaaccaagaaagacattgcttttggcagagaagcagaattttagaaatttgggacatgtttccaacaaatcacactttgtatcctatcgtgaatatgagtcaccatcaaactagaattcttcttttcacatcccatcttttgtccccttaatttttcactttccctttcattctttctcataaggtagccataatgaaagcttttctttacccaacttttttgtacaaagt

SEQ ID NO: 193281 - DNA, 2070 bp, Homo Sapiens; identical to SEQ ID NO: 185880
  misc_feature (240)..(256): n is a, c, g, or t
  misc_feature (988)..(1003): n is a, c, g, or t

SEQ ID NO: 193282 - DNA, 2290 bp, Homo Sapiens; identical to SEQ ID NO: 185881

SEQ ID NO: 193283 - DNA, 1182 bp, Homo Sapiens; identical to SEQ ID NO: 185883
  misc_feature (665)..(725): n is a, c, g, or t

SEQ ID NO: 193284 - DNA, 1106 bp, Homo Sapiens; identical to SEQ ID NO: 185884

SEQ ID NO: 193285 - DNA, 1483 bp, Homo Sapiens; identical to SEQ ID NO: 180805
  misc_feature (145)..(153): n is a, c, g, or t

SEQ ID NO: 193286 - DNA, 352 bp, Homo Sapiens; identical to SEQ ID NO: 185886

SEQ ID NO: 193287 - DNA, 760 bp, Homo Sapiens; identical to SEQ ID NO: 185887

SEQ ID NO: 193288 - DNA, 1473 bp, Homo Sapiens
  misc_feature (135)..(177): n is a, c, g, or t
  misc_feature (1325)..(1334): n is a, c, g, or t
ttggggataataattgaattggtttttaaaggcaacatagcattctacagcagggttaatctattatcaagaacagtcaccctggttaataacaagttttaccgatcagttgctggttggttggttggttggcannnnnnnnnnnnnnnnnnnnnnnnnnnnnnnnnnnnnnnnnnnatttttccccatgagtcctttttttaatcctgtggctttttcacttacaactagcctaaccctgtaattttcctacatccaagaaaacaatcacaaagtagtggtttaaatactttgttgtatttggctaattttgctgtcttaatgcagcctattaagagttgggttaaaaatcagtaatcagtactttattacatcactgaactaaaatatggagacatcctcattgaaaatggagggcactctatcagtctataactatcaacgtagtgcaacagggtgttttgatacctttgttttcacctcttgacataatgctatttaaaggcttgaatttttccctttatataattttcacctttactttcaaagtgttttgttgtagttggctattgcagagagtgcattgtcctatcattcctaaacctggtctgctttctacattcatggtatggaaaccatgtgattctttgtacagtttatcctgatgttgcttgtaatgcagtagaggctatttcgccttcgcttttctttctcgacctttttgtaaaccctataattatgaagcgattgcttgagaaaataacatataaacatagaatagaatagactgaccaagatggttcacagtttctttttttaactaggttatttataatgtatttctgaaccacttggcagacaaattcacaacacttaatgttcatattttgagtaaaggaagctaaaaccatgtttgctttctggtactacatgcattagcgaaaggttaagtaagttttgttctccactgaagtaatacttaacatctcagaaaaaattttgcatgttctgtagttttgtattaaatcagtcatttcatatgcactatatcaagtacaaacaggtagtttacctgtttatagtagtgtactaacaaagtctcccttgcagcttcagactgttatctataggcttatcgttcaaatacagcacttgaatatcccaagtagttcttctacgcatagctcacctttctaaacccagttaagcatggaagagaggtagtaggtaggtgcagtgtgtggaagctgcaaacaagtaggccttttattcattgatatcttttcccaagtactggattttaaatctgtatgtatctgtttgannnnnnnnnnctaatatttcagttgagctgctgttttcttccatgcaatattgtatactcaattgtgtatagaataagctggtgagagtgccctcctacataataaagcaaatgcagtgttttgcatgcgaaatataaaaaatttaaat

SEQ ID NO: 193289 - DNA, 812 bp, Homo Sapiens
  misc_feature (127)..(169): n is a, c, g, or t
ttggattgaattggtttttaaaggcaacatagcattctacagcagggttaatctattatcaagaacagtcaccctggttaataacaagttttactgatcagttgctggttggttggttggttggcannnnnnnnnnnnnnnnnnnnnnnnnnnnnnnnnnnnnnnnnnnatttttccccatgagtcctttttttaatcctgtggctttttcacttacaactagcctaaccctgtaattttcctacatccaagaaaacaatcacaaagtagtggtttaaatactttgttgtatttggctaattttgctgtcttaatgcagcctattaagagttgggttaaaaatcagtaatcagtactttattacatcactgaactaaaatatggagacatcctcattgaaaatggagggcactctatcagtctataactatcaacgtagtgcaacagggtgttttgatacctttgttttcacctcttgacataatgctatttaaaggcttgaatttttccctttatataattttcacctttactttcaaagtgttttgttgtagttggctattgcagagagtgcattgtcctatcattcctaaacctggtctgctttctacattcatggtatggaaaccatgtgattctttgtacagtttatcctgatgttgcttgtaatgcagtagaggctatttcgccttcgcttttctttctcgacttttttgtaaaccctataattatgaagcgattgcttgagaaaataacatataaacatagaatagaatagactgaccagatgggttcacagtttctttttttaa

SEQ ID NO: 193290 - DNA, 1973 bp, Homo Sapiens; identical to SEQ ID NO: 185889

SEQ ID NO: 193291 - DNA, 900 bp, Homo Sapiens
taaaagccaactttgtacaaaaaagttggctagaattcactgagttttgtttcactttgacatttggggatctggtgggcagtcgaaccatggtgaactccacctccgtggaataaatggagattcagcgtgggtgttgaatccagcacgtctgtgtgagtaacgggacagtaaacactccacattcttcagtttttcacttctacctacatatttgtatgtttttctgtataacagccttttccttctggttctaactgctgttaaaattaatatatcattatctttgctgttattgacagcgatataattttattacatatgattagagggatgagacagacattcacctgtatatttcttttaatgggcacaaaatgggcccttgcctctaaatagcactttttggggttcaagaagtaatcagtatgcaaagcaatcttttatacaataattgaagtgttccctttttcataattactctacttcccagtaaccctaaggaagttgctaacttaaaaaactgcatcccacgttctgttaatttagtaaataaacaagtcaaagacttgtggaaaataggaagtgaacccatattttaaattctcataagtagcattcatgtaataaacaggtttttagtttgttcttcagattgatagggagttttaaagaaattttagtagttactaaaattatgttactgtatttttcagaaatccaactgcttatgaaaagtactaatagaacttgttaacctttctaaccttcacgattaactgtgaaatgtacgtcatttgtgcaagaccgtttgtccacttcattttgtataatcacagttgtgttcctgacactcaataaacagtcattggaaagagtgccagtcagcagtcatgcacg

SEQ ID NO: 193292 - DNA, 1911 bp, Homo Sapiens; identical to SEQ ID NO: 185890
  misc_feature (1363)..(1372): n is a, c, g, or t

SEQ ID NO: 193293 - DNA, 921 bp, Homo Sapiens
  misc_feature (153)..(162): n is a, c, g, or t
ttggctacagaatgcggcctctgagacatgaagacaccatctccatgtgaccgaacactgcagctgtctgaccttccaaagactaagactcgcggcaggttctctttgagtcaatagcttgtcttcgtccatctgttgacaaatgacagatcnnnnnnnnnnccccctatcagttgatttttcttatttacagataacttctttaggggaagtaaaacagtcatctagaattcactgagttttgtttcactttgacatttggggatctggtgggcagtcgaaccatggtgaactccacctccgtggaataaatggagattcagcgtgggtgttgaatccagcacgtctgtgtgagtaacgggacagtaaacactccacattcttcagtttttcacttctacctacatatttgtatgtttttctgtataacagccttttccttctggttctaactgctgttaaaattaatatatcattatctttgctgttattgacagcgatataattttattacatatgattagagggatgagacagacattcacctgtatatttcttttaatgggcacaaaatgggcccttgcctctaaatagcactttttggggttcaagaagtaatcagtatgcaaagcaatcttttatacaataattgaagtgttccctttttcataattactctacttcccagtaaccctaaggaagttgctaacttaaaaaactgcatcccacgttctgttaatttagtaaataaacaagtcaaagacttgtggaaaataggaagtgaacccatattttaaattctcataagtagcattcatgtaataaacaggttttaggtttgttcttcagattgatagggagttttaagaaattttagtagttactaaaattatgttactgtattttcagaaatcaactgct

SEQ ID NO: 193294 - DNA, 1032 bp, Homo Sapiens; identical to SEQ ID NO: 180806
  misc_feature (543)..(558): n is a, c, g, or t
  misc_feature (571)..(611): n is a, c, g, or t

SEQ ID NO: 193295 - DNA, 1714 bp, Homo Sapiens; identical to SEQ ID NO: 180807
  misc_feature (335)..(560): n is a, c, g, or t
  misc_feature (982)..(992): n is a, c, g, or t

SEQ ID NO: 193296 - DNA, 3273 bp, Homo Sapiens; identical to SEQ ID NO: 185893

SEQ ID NO: 193297 - DNA, 944 bp, Homo Sapiens
agggccttatggcggcggagccgactcgtagcggccgaggcgcgcgcggtccgtgccggcgtcagtctgggattggccggcccgcgacttcctccgccccctgccaatcgccggggacgacttccgtgggtttttccggctcccccgcgtcgctaaggagcgacgggctgtcggccagaccccgagttctcggtgcgctcagcggccgccgacgctaggaggccgcgctccgcccccgctaccatgaggccccggaaagccttcctgctcctgctgctcttggggctggtgcagctgctggccgtggcgggtgccgagggcccggacgaggattcttctaacagagaaaatgccattgaggatgaagaggaggaggaggaggaagatgatgatgaggaagaagacgacttggaagttaaggaagaaaatggagtcttggtcctaaatgatgcaaactttgataattttgtggctgacaaagacacagtgctgctggagttttatgctccatggtgtggacattgcaagcagtttgctccggaatatgaaaaaattgccaacatattaaaggataaagatcctcccattcctgttgccaagatcgatgcaacctcagcgtctgtgctggccagcaggtttgatgtgagtggctaccccaccatcaagatccttaagaaggggcaggctgtagactacgagggctccagaacccaggaagaaattgttgccaaggtcagagaagtctcccagcccgactggacgcctccaccagaagtcacgcttgtgttgaccaaagagaactttgatgaagttgtgaatgatgcagatatcattctggtggagttttatgccccatggtgtggacactgcaagaaacttgcccccagtatgagaaggccgccaggagctcagcaagcgttctcctccaattcccctggcaaaag

SEQ ID NO: 193298 - DNA, 1123 bp, Homo Sapiens; identical to SEQ ID NO: 185898

SEQ ID NO: 193299 - DNA, 1936 bp, Homo Sapiens; identical to SEQ ID NO: 185899
  misc_feature (1794)..(1818): n is a, c, g, or t

SEQ ID NO: 193300 - DNA, 837 bp, Homo Sapiens
ttggagaatatttcgccgttgaatacagtttctgcctggcttgttttcttctgcctcttttttttaaagctcatctttgggtgaaaaattgtcgggatcttctgcagtccagctacaacaaacagcgctttgatcaacctttagaggcttcaacctggctgaagaatttcaaaactacaaatgagcgcttcctgaaccagataaaagttcaagagaagtatgtctggaataagagagaaagcactgagaaagggagtcctctgggagaagtggttgaacagggcataacacgggtgaggaacgccacagatgcagttggaattgtgctgaaagagctaaagaggcaaagttctttgggtatgtttcacctcctagtggccgtggatggaatcaatgctctttggggaagaaccactctgaaaagagaagataaaagcccgattgcccccgaggaattagcacttgttcacaacttgaggaaaatgatgaaaaatgattggcatggaggcgccattgtgtcggctttgagccagactgggtctctctttaagccccggaaagcctatctgccccaggagttgctgggaaaggaaggatttgatgccctggatccctttattcccatcctggtttccaactataacccaaaggaatttgaaagttgtattcagtattatttggaaaacattggcttcaacatgagaaagctcctacagaataagggaaaaaagagctgctgttcctaaataacgcgaacccctcgctgctggagcggcactgtgcctacctctaagccaagatcacagcatgtgaggaagacagtggacatctgcttta

SEQ ID NO: 193301 - DNA, 926 bp, Homo Sapiens
cccactttgtacaaaaaagttggctcaggacggcctactttggagccgggcccaggcagcgtgtgtcggtcgcctagtctggagaactagtcctcgactcacgtgcaaggatgatgctgaaaggaataacaaggcttatctctaggatccataagttggaccctgggcgttttttacacatggggacccaggctcgccaaagcattgctgctcacctagataaccaggttccagttgagagtccgagagctatttcccgcaccaatgagaatgacccggccaagcatggggatcagcacgagggtcagcactacaacatctccccccaggatttggagactgtatttccccatggccttcctcctcgctttgtgatgcaggtgaagacattcagtgaagcttgcctgatggtaaggaaaccagccctagaacttctgcattacctgaaaaacaccagttttgcttatccagctatacgatatcttctgtatggagagaagggaacaggaaaaaccctaagtctttgccatgttattcatttctgtgcaaaacaggactggctgatactacatattccagatgctcatctttgggtgaaaaattgtcgggatcttctgcagtccagctacaacaaacagcgctttgatcaacctttagaggcttcaacctggctgaagaatttcaaaactacaaatgagcgcttcctgaaccagggcataacacgggtgaggaacgccacagatgcagttggaattgtgctgaaagagctaaagaggcaaagttctttgggtatgtttcacctcctagtggccgtggatggaatcaatgctctctggggaagaaccactctgaaaagagaagataaaagcccgattgccccccaggaattacacttgttcacaacttgaggaaatgatgaaaatgat

SEQ ID NO: 193302 - DNA, 1187 bp, Homo Sapiens
ctttgtacaaaaaagttggctcaggacgggcgctttggagccggccccaggcagcgtgtgtcggtcgcctaggctggagaactagtcctcgactcacgtgcaaggatgatgctgaaaggaataacaaggcttatctctaggatccataagttggaccctgggcgttttttacacatggggacccaggctcgccaaagcattgctgctcacctagataaccaggttccagttgagagtccgagagctatttcccgcaccaatgagaatgacccggccaagcatggggatcagcacgagggtcagcactacaacatctccccccaggatttggagactgtatttccccatggccttcctcctcgctttgtgatgcaggtgaagacattcagtgaagcttgcctgatggtaaggaaaccagccctagaacttctgcattacctgaaaaacaccagttttgcttatccagctatacgatatcttctgtatggagagaagggaacaggaaaaaccctaagtctttgccatgttattcatttctgtgcaaaacaggactggctgatactacatattccagatgctcatctttgggtgaaaaattgtcgggatcttctgcagtccagctacaacaaacagcgctttgatcaacctttagaggcttcaacctggctgaagaatttcaaaactacaaatgagcgcttcctgaaccagataaaagttcaagagaagtatgtctggaataagagagaaagcactgagaaagggagtcctctgggagaagtggttgaacagggcataacacgggtgaggaacgccacagatgcagttggaattgtgctgaaagagctaaagaggcaaagttctttgggtatgtttcacctcctagtggccgtggatggaatcaatgctctttggggaagaaccactctgaaaagagaagataaaagcccgattgcccccgaggaattagcacttgttcacaacttgaggaaaatgatgaaaaatgattggcatggaggcgccattgtgtcggctttgagccagactgggtctctctttaagccccggaaagcctatctgctccaggagttgctgggaaaggaaggatttgatgccctggatccctttattcccatcctggtttccaactataccccaaaggaattgaaagttgtaattcagtattattt

SEQ ID NO: 193303 - DNA, 870 bp, Homo Sapiens; identical to SEQ ID NO: 185901
  misc_feature (665)..(718): n is a, c, g, or t

SEQ ID NO: 193304 - DNA, 2085 bp, Homo Sapiens; identical to SEQ ID NO: 185903

SEQ ID NO: 193305 - DNA, 1581 bp, Homo Sapiens; identical to SEQ ID NO: 185904
  misc_feature (1467)..(1485): n is a, c, g, or t

SEQ ID NO: 193306 - DNA, 1241 bp, Homo Sapiens; identical to SEQ ID NO: 185905

SEQ ID NO: 193307 - DNA, 3379 bp, Homo Sapiens; identical to SEQ ID NO: 185906
  misc_feature (1528)..(1566): n is a, c, g, or t

SEQ ID NO: 193308 - DNA, 1401 bp, Homo Sapiens; identical to SEQ ID NO: 185909

SEQ ID NO: 193309 - DNA, 1404 bp, Homo Sapiens; identical to SEQ ID NO: 185911

SEQ ID NO: 193310 - DNA, 1230 bp, Homo Sapiens
ctttgtacaaaaaagttggctctttagttctttgcaagaaggtagagataaagacactttttcaaaaatggcaatggtatcagaattcctcaagcaggcctggtttattgaaaatgaagagcaggaatatgttcaaactgtgaagtcatccaaaggtggtcccggatcagcggtgagcccctatcctaccttcaatccatcctcggatgtcgctgccttgcataaggccataatggttaaaggtgtggatgaagcaaccatcattgacattctaactaagcgaaacaatgcacagcgtcaacagatcaaagcagcatatctccaggaaacaggaaagcccctggatgaaacactgaagaaagcccttacaggtcaccttgaggaggttgttttagctctgctaaaaactccagcgcaatttgatgctgatgaacttcgtgctgccatgaagggccttggaactgatgaagatactctaattgagattttggcatcaagaactaacaaagaaatcagagacattaacagggtctacagagaggaactgaagagagatctggccaaagacataacctcagacacatctggagattttcggaacgctttgctttctcttgctaagggtgaccgatctgaggactttggtgtgaatgaagacttggctgattcagatgccagggccttgtatgaagcaggagaaaggagaaaggggacagacgtaaacgtgttcaataccatccttaccaccagaagctatccacaacttcgcagagtgtttcagaaatacaccaagtacagtaagcatgacatgaacaaagttctggacctggagttgaaaggtgacattgagaaatgcctcacagctatcgtgaagtgcgccacaagcaaaccagctttctttgcagagaagcttcatcaagccatgaaaggtgttggaactcgccataaggcattgatcaggattatggtttcccgttctgaaattgacatgaatgatatcaaagcattctatcagaagatgtatggtatctccctttgccaagccatcctggatgaaaccaaaggagattatgagaaaatcctggtggctctttgtggaggaaactaaacattcccttgatggtctcaagctatgatcagaagactttaattatatattttcatcctataagcttaaataggaaagtttcttcaacaggattacagtgtagctacctacatgctgaaaaa

SEQ ID NO: 193311 - DNA, 1060 bp, Homo Sapiens
ttggctgagccatgtacttcaaacagaaggcagccaattactaacttctggttgctaggtgtggcttcctttaaaatcctataaaatcagaagcccaagtctccactgccagtgtgaaatcttcagagaagaatttctctttagttctttgcaagaaggtagagataaagacactttttcaaaaatggcaatggtatcagaattcctcaagcaggcctggtttattgaaaatgaagagcaggaatatgttcaaactgtgaagtcatccaaaggtggtcccggatcagcggtgagcccctatcctaccttcaatccatcctcggatgtcgctgccttgcataaggccataatggttaaaggtgtggatgaagcaaccatcattgacattctaactaagcgaaacaatgcacagcgtcaacagatcaaagcagcatatctccaggaaacaggaaagcccctggatgaaacactgaagaaagcccttacaggtcaccttgaggaggttgttttagctctgctaaaaactccagcgcaatttgatgctgatgaacttcgtgctgccatgaagggccttggaactgatgaagatactctaattgagattttggcatcaagaactaacaaagaaatcagagacattaacagggtctacagagaggaactgaagagagatctggccaaagacataacctcagacacatctggagattttcggaacgctttgctttctcttgctaagggtgaccgatctgaggactttggtgtgaatgaagacttggctgattcagatgccagggccttgtatgaagcaggagaaaggagaaaggggacagacgtaaacgtgttcaataccatccttaccaccagaagctatccacaacttcgcagagtgtttcagaaatacaccaagtacagtaagcatgacatgaacaaagttctggacctggagttgaaaggtgacattgagaaatgcctcacagctatcgtgaagtgcgccacaagcaaaccagctttctttgcagagaagcttcatcaagccatgaaagtatgtaccattcta

SEQ ID NO: 193312 - DNA, 1117 bp, Homo Sapiens
gagcaatgcttttttataattgccaactttgtacaaaaaagttggatctccaggaaacaggaaagcccctggatgaaacactgaagaaagcccttacaggtcaccttgaggagggggttttagctctgctaaaaactccagcgcaatttgatgctgatgaacttcgtgctgccatgaagggccttggaactgatgaagatactctaattgagattttggcatcaagaactaacaaagaaatcagagacattaacagggtctacagagaggaactgaagagagatctggccaaagacataacctcagacacatctggagattttcggaacgctttgctttctcttgctaagggtgaccgatctgaggactttggtgtgaatgaagacttggctgattcagatgccagggccttgtatgaagcaggagaaaggagaaaggggacagacgtaaacgtgttcaataccatccttaccaccagaagctatccacaacttcgcagagtgtttcagaaatacaccaagtacagtaagcatgacatgaacaaagttctggacctggagttgaaaggtgacattgagaaatgcctcacagctatcgtgaagtgcgccacaagcaaaccagctttctttgcagagaagcttcatcaagccatgaaaggtgttggaactcgccataaggcattgatcaggattatggtttcccgttctgaaattgacatgaatgatatcaaagcattctatcagaagatgtatggtatctccctttgccaagccatcctggatgaaaccaaaggagattatgagaaaatcctggtggctctttgtggaggaaactaaacattcccttgatggtctcaagctatgatcagaagactttaattatatattttcatcctataagcttaaataggaaagtttcttcaacaggattacagtgtagctacctacatgctgaaaaatatagcctttaaatcatttttatattataactctgtataatagagataagtccattttttaaaaatgttttcccccaaccataaaaccctataccaattgttctagtaacaatacatgagaaagatgtctatgtagctgaaaataaaatgacgtcacag

SEQ ID NO: 193313 - DNA, 1547 bp, Homo Sapiens; identical to SEQ ID NO: 185914
  misc_feature (1175)..(1237): n is a, c, g, or t
  misc_feature (1268)..(1277): n is a, c, g, or t

SEQ ID NO: 193314 - DNA, 830 bp, Homo Sapiens
ctttgtacaaaaaagttggggctttgctccagacacagatgacctgaagcagctggccaatggtgttgacagatacatctccaagtatgagctggacaaagctttctccgataggaacaccctcatcatctacctggacaaggtctcacactctgaggatgactgtctagctttcaaagttcaccaatactttaatgtagagcttatccagcctggagcagtcaaggtctacgcctattacaacctggaggaaagctgtacccggttctaccatccggaaaaggaggatggaaagctgaacaagctctgccgtgatgaactgtgccgctgtgctgaggagaattgcttcatacaaaagtcggatgacaaggtcaccctggaagaacggctggacaaggcctgtgagccaggagtggactatgtgtacaagacccgactggtcaaggttcagctgtccaatgactttgacgagtacatcatggccattgagcagaccatcaagtcaggctcggatgaggtgcaggttggacagcagcgcacgttcatcagccccatcaagtgcagagaagccctgaagctggaggagaagaaacactacctcatgtggggtctctcctccgatttctggggagagaagcccaacctcagctacatcatcgggaaggacacttgggtggagcactggcccgaggaggacgaatgccaagacgaagagaaccagaaacaatgccaggacctcggcgccttcaccgagagcatggttgtctttgggtgccccaactgaccacacccccattcccccactccagataaagcttcagttatatctc

SEQ ID NO: 193315 - DNA, 1223 bp, Homo Sapiens; identical to SEQ ID NO: 185916

SEQ ID NO: 193316 - DNA, 1551 bp, Homo Sapiens
ctttgtacaaaaaagttggatcagaatagccgatggctatgagcaggctgctcgcgttgctattgaacacctggacaagatcagcgatagcgtccttgttgacataaaggacaccgaacccctgattcagacagcaaaaaccacgctgggctccaaagtggtcaacagttgtcaccgacagatggctgagattgctgtgaatgccgtcctcactgtagcagatatggagcggagagacgttgactttgagcttatcaaagtagaaggcaaagtgggcggcaggctggaggacactaaactgattaagggcgtgattgtggacaaggatttcagtcacccacagatgccaaaaaaaagtggaagatgcgaagattgcaattctcacatgtccatttgaaccacccaaaccaaaaacaaagcataagctggatgtgacctctgtcgaagattataaagcccttcagaaatacgaaaaggagaaatttgaagagatgattcaacaaattaaagagactggtgctaacctagcaatttgtcagtggggctttgatgatgaagcaaatcacttacttcttcagaacaacttgcctgcggttcgctgggtaggaggacctgaaattgagctgattgccatcgcaacaggagggcggatcgtccccaggttctcagagctcacagccgagaagctgggctttgctggtcttgtacaggagatctcatttgggacaactaaggataaaatgctggtcatcgagcagtgtaagaactccagagctgtaaccatttttattagaggaggaaataagatgatcattgaggaggcgaaacgatcccttcacgatgctttgtgtgtcatccggaacctcatccgcgataatcgtgtggtgtatggaggaggggctgctgagatatcctgtgccctggcagttagccaagaggcggataagtgccccaccttagaacagtatgccatgagagcgtttgccgacgcactggaggtcatccccatggccctctctgaaaacagtggcatgaatcccatccagactatgaccgaagtccgagccagacaggtgaaggagatgaaccctgctcttggcatcgactgtttgcacaaggggacaaatgatatgaagcaacagcatgtcatagaaaccttgattggcaaaaagcaacagatatctcttgcaacacaaatggttagaatgattttgaagattgatgacattcgtaagcctggagaatctgaagaatgaagacattgagaaaactatgtagcaagatccacttctgtgattaagtaaatggatgtctcgtgatgcgtctacagttatttattgttacatccttttccagacactgtagatgctataataaaaatagctgtttggtaaccatagtttcacttgttcaaagctgtgtaatcgtgggggtactatctcaactgcttttgtattcattgtattaaaagaatctgtttaaacaacctttatcttctcttcgggtttaagaaacgtttattgtaacagtaattaaatgctgccttaattg

SEQ ID NO: 193317 - DNA, 958 bp, Homo Sapiens
actttgtacaaaaaagttgggtaattccggctgttgcaccatggcgtccatggggaccctcgccttcgatgaatatgggcgccctttcctcatcatcaaggatcaggaccgcaagtcccgtcttatgggacttgaggccctcaagtctcatataatggcagcaaaggctgtagcaaatacaatgagaacatcacttggaccaaatgggcttgataagatgatggtggataaggatggggatgtgactgtaactaatgatggggccaccatcttaagcatgatggatgttgatcatcagattgccaagctgatggtggaactgtccaagtctcaggatgatgaaattggagatggaaccacaggagtggttgtcctggctggtgccttgttagaagaagcggagcaattgctagaccgaggcattcacccaatcagaatagccgatggctatgagcaggctgctcgcgttgctattgaacacctggacaagatcagcgatagcgtccttgttgacataaaggacaccgaacccctgattcagacagcaaaaaccacgctgggctccaaagtggtcaacagttgtcaccgacagatggctgagattgctgtgaatgccgtcctcactgtagcagatatggagcggagagacgttgactttgagcttatcaaagtagaaggcaaagtgggcggcaggctggaggacactaaactgattaagggcgtgattgtggacaaggatttcagtcacccacagatgccaaaaaaagtggaagatgcgaagattgcaattctcacatgtccatttgaaccacccaaaccaaaaacaaagcataagctggatgtgacctctgtcgaagattataaagcccttcagaaatacgaaaaggagaaatttgaagagatgattcaacaaattaaagagactggtgctaacctagcaatttgtcaatggggcttt

SEQ ID NO: 193318 - DNA, 1457 bp, Homo Sapiens; identical to SEQ ID NO: 180814
  misc_feature (806)..(814): n is a, c, g, or t
  misc_feature (1151)..(1164): n is a, c, g, or t
  misc_feature (1189)..(1238): n is a, c, g, or t

SEQ ID NO: 193319 - DNA, 1614 bp, Homo Sapiens; identical to SEQ ID NO: 185923
  misc_feature (1477)..(1519): n is a, c, g, or t

SEQ ID NO: 193320 - DNA, 1849 bp, Homo Sapiens; identical to SEQ ID NO: 185924
  misc_feature (1717)..(1773): n is a, c, g, or t

SEQ ID NO: 193321 - DNA, 1098 bp, Homo Sapiens; identical to SEQ ID NO: 185925

SEQ ID NO: 193322 - DNA, 629 bp, Homo Sapiens; identical to SEQ ID NO: 185926
  misc_feature (94)..(150): n is a, c, g, or t

SEQ ID NO: 193323 - DNA, 1209 bp, Homo Sapiens; identical to SEQ ID NO: 185928

SEQ ID NO: 193324 - DNA, 2049 bp, Homo Sapiens; identical to SEQ ID NO: 185930
  misc_feature (807)..(890): n is a, c, g, or t
  misc_feature (1798)..(1834): n is a, c, g, or t

SEQ ID NO: 193325 - DNA, 1556 bp, Homo Sapiens; identical to SEQ ID NO: 185932

SEQ ID NO: 193326 - DNA, 901 bp, Homo Sapiens; identical to SEQ ID NO: 185934
  misc_feature (756)..(770): n is a, c, g, or t

SEQ ID NO: 193327 - DNA, 1594 bp, Homo Sapiens; identical to SEQ ID NO: 185935
  misc_feature (1459)..(1472): n is a, c, g, or t

SEQ ID NO: 193328 - DNA, 877 bp, Homo Sapiens
  misc_feature (147)..(180): n is a, c, g, or t
ttgggttcctctaattcctttcactctccctaagccctctgagagagatgaagatagatgattttattgctactaaattgaagggagcactatttctttttgtcttttgttagcaaaaaattgcaaaaagaattgtacattcttgcnnnnnnnnnnnnnnnnnnnnnnnnnnnnnnnnnncaagggacctaacaaaactcagcagtgttactgtattttttaaaaatatttttatagactcattttcaggttattaaatgtaagagaaacagatacccctcttttttaaagtaggtaaatcattgatgatttatattaccaatttttagaagtaattttctagtaagcttgtggcatcagaaaatactagaagatttttttagttaaattagttagaacatttatgaatgaatataataaatattttttcagaataaaatatggaccctttgtgtttactaatagataaagccagatataattttttgtttttaaggccacaaaatatggcctttgttaaagaacactaaagttagaaatctaaagttagagcaactttttaatggctatttcctattattgtaagtgttaaaacccctgcagaattcttgataaggtgctatttatactatatttcttattataagataactgtctttagtcttcttagtactagtctttttagtactaaatcaatcagcaaacatcatcatttcaccccaaaattttgtcacagaaaaggcgtatcaaatgaaaaataatttcagagatctttctttcaagatattttttcctgataaaatacattgtcttgaagtaaatacattgtcaaaacctaattgcaattctgttaaatctaagtaatttttagacagtg

SEQ ID NO: 193329 - DNA, 848 bp, Homo Sapiens
tttgtacaaaaaagttggctttttaatggctatttcctattattgtaagtgttaaaacccctgcagaattcttgataaggtgctatttatactatatttcttattataagataactgtctttagtcttcttagtactagtctttttagtactaaatcaatcagcaaacatcatcatttcaccccaaaattttgtcacagaaaaggcgtatcaaatgaaaaataatttcagagatctttctttcaagatattttttcctgataaaatacattgtcttgaagtaaatacattgtcaaaacctaattgcaattctgttaaatctaagtaatttttagacagtgtttcaccgtattatttaggatgtgaaatgccatttctttcactgattacaccatatacaggaaacaggtaaaacagtgaaaactttattgtgctggttgatgccaacttggttgaaaagctctctgcagaagaagtgatctagactgacagaagtgttgctaattacaagttgtgttctcatgacgtaattagaaagtaacttctcaaagtacaacttttatgaaaaaaataagctgttaaaaaaaggaaatcgtaggttaatttaattgggaaaatgggcaattgacagagaccattttcctaacacatatatgtgctagtactttaactttttaaaattttacttctacgttttgtaatataaaaatttctattttaagtttagaatgttatacgtaccgaaagtatgcagccaaatcgatcagatcaaaccattttacctggagtttggtactggtttttacttctctgaatctgtataagaaaaataaagacaattgaacttcc

SEQ ID NO: 193330 - DNA, 1016 bp, Homo Sapiens
ttcactcccatatccaaaacaaagcatgtgtgcgatcagttggtcgctcctgctgccgcctcagtatggcttgtagttattctgatgggccaccacgtcgctggctcttgccgtagtttgtactaccctgactgtagtcgtagccggggccgtagccgtaatagccatagggcgagtagtcgtagccgccatagccaggcccgtagccctgctggtagccgtagccctggttccagtagttgccgtagccctgattccaactctgactctgacctccacctccaccaccacctccgctgcctcggttccctcggttgcggtttccacggcccccagagccatactgctgctgctgatagacttctttgggctgggccaccttgatctcacacttgcttccactgacagtatggaactttttctccagaaccttcttcacgggttcttcttctttaaaggtgataaacacaaaacctcgtcttttgttcaactttggatccattggcaattcaatggcctcaatctccccaaactcgccaaagtactccctgatcttttcctcagtggcttcaggattcagacccccaacgaagattttcttcaccgggtccttcttcatagccatggcctttttagggtcaatgacacggccatccagcctgtgctccttctggtctaggaccttctccacactggctgcatctttgaacaggataaacccaaaccctcttgaccgtccagtgttgggatccatttttattgtacagtcaacgacctctccaaatttagtaaaatagtcttttaaatcttttttgctagtatcccagctcaggccaccaacgaacatttttcccgcgtcctcctcgttcttgctggcgttgatctggtcgccctcggcgccgttctgattcccgctcgggggcgccgcggtcgcgcctccagcccccgccgcgctcaagctcgcgctgctgaggcctcgccccagtcagcccacggagctggtccaactgtgccaa

SEQ ID NO: 193331 - DNA, 1886 bp, Homo Sapiens; identical to SEQ ID NO: 185936
  misc_feature (1052)..(1063): n is a, c, g, or t
  misc_feature (1620)..(1640): n is a, c, g, or t

SEQ ID NO: 193332 - DNA, 919 bp, Homo Sapiens
taaaagccaactttgtacaaaaaagttgggggttggcccgtgcggcggcggccaaggaggaggagacacagttggagcagctccgtgggctgactggggcgaggcctcagcagcgcgagcttgagtgcggccgagcctgcggcgccttcccctgcgggtggggacgagcgggccccgcggcgtcatcggcggcgaggagccgccgcgcctcggcctagcatgtcggaagcgggcgaggagcagcccatggagacgacgggcgccaccgagaacggacatgaggccgtccccgaaggcgagtcgccggccggggctggcacgggcgccgcggcgggggctggaggcgcgaccgcggcgcccccgagcgggaatcagaacggcgccgagggcgaccagatcaacgccagcaagaacgaggaggacgcgggaaaaatgttcgttggtggcctgagctgggatactagcaaaaaagatttaaaagactattttactaaatttggagaggtcgttgactgtacaataaaaatggatcccaacactggacggtcaagagggtttgggtttatcctgttcaaagatgcagccagtgtggagaaggtcctagaccagaaggagcacaggctggatggccgtgtcattgaccctaaaaaggccatggctatgaagaaggacccggtgaagaaaatcttcgttgggggtctgaatcctgaagccactgaggaaaagatcagggagtactttggcgagtttggggagattgaggccattgaattgccaatggatccaaagttgaacaaaagacgaggttttgtgtttatcacctttaaagaagaagaacccgtgaagaaaggttctggagaaaaatttccatactgtccgtgggaacaagtgtgagatcaggtggcccaacccataagaa

SEQ ID NO: 193333 - DNA, 1256 bp, Homo Sapiens; identical to SEQ ID NO: 180819

SEQ ID NO: 193334 - DNA, 1608 bp, Homo Sapiens; identical to SEQ ID NO: 180820

SEQ ID NO: 193335 - DNA, 1453 bp, Homo Sapiens; identical to SEQ ID NO: 185940
  misc_feature (966)..(1000): n is a, c, g, or t

SEQ ID NO: 193336 - DNA, 895 bp, Homo Sapiens
  misc_feature (698)..(733): n is a, c, g, or t
gagcccgccgcttcctatctcagcgccctgccgccgccgccgcggcccagcgagcggccctgatgcaggccatcaagtgtgtggtggtgggagacggagctgtaggtaaaacttgcctactgatcagttacacaaccaatgcatttcctggagaatatatccctactgtctttgacaattattctgccaatgttatggtagatggaaaaccggtgaatctgggcttatgggatacagctggacaagaagattatgacagattacgccccctatcctatccgcaaacagatgtgttcttaatttgcttttcccttgtgagtcctgcatcatttgaaaatgtccgtgcaaagtggtatcctgaggtgcggcaccactgtcccaacactcccatcatcctagtgggaactaaacttgatcttagggatgataaagacacgatcgagaaactgaaggagaagaagctgactcccatcacctatccgcagggtctagccatggctaaggagattggtgctgtaaaatacctggagtgctcggcgctcacacagcgaggcctcaagacagtgtttgacgaagcgatccgagcagtcctctgcccgcctcccgtgaagaagaggaagagaaaatgcctgctgttgtaaatgtctcagcccctcgttcttggtcctgtcccttggaacctttgtacgctttgctcnnnnnnnnnnnnnnnnnnnnnnnnnnnnnnnnnnnncaacggtggagccttcgcactcaatgccaactttttgttacagattaatttttccataaaaccattttttgaaccaatcagtaattttaagggttttgtttgttctaaatgtaagagttcagactcacattctattaaaatttagccctaaaatgaccagcc

SEQ ID NO: 193337 - DNA, 1869 bp, Homo Sapiens; identical to SEQ ID NO: 185941
  misc_feature (423)..(457): n is a, c, g, or t

SEQ ID NO: 193338 - DNA, 1350 bp, Homo Sapiens; identical to SEQ ID NO: 180823
  misc_feature (87)..(103): n is a, c, g, or t
  misc_feature (1166)..(1182): n is a, c, g, or t

SEQ ID NO: 193339 - DNA, 1457 bp, Homo Sapiens; identical to SEQ ID NO: 180824
  misc_feature (1000)..(1036): n is a, c, g, or t
  misc_feature (1048)..(1056): n is a, c, g, or t

SEQ ID NO: 193340 - DNA, 639 bp, Homo Sapiens
gtacaaaaaagttaggttttattttttgatattaccaactgtgaacctacaagacgtcttggacaactgaagtttaaatatccacagggttttattttgcttgttgaactcttagagctattgcaaacttcccaagatccagatgactgaatttcagatagcatttttatgattcccaactcattgaaggtcttatttatataattttttccaagccaaggagaccattggccatccaggaaatttcgtacagctgaaatataggcaggatgttcaacatcagtttacttgcagctggaagcatttgtttttgaagttgtacatagtaataatatgtcattgtacatgttgaaaggtttctatggtactaaaagtttgttttattttatcaaacattaagcttttttaagaaaataattgggcagtgaaataaatgtatcttcttgtctctggagtgtcatttgtacttgaagaaattatttcattgagaaaatatgaaacttgggagaaactttaagataatgcataaaaacaaattgatgcttcagtgaggttgcagagtcatagaacttctttcagtgaatatctaactttgggctttatcttcttatcactttataatagtagctctcacccaaa

SEQ ID NO: 193341 - DNA, 1000 bp, Homo Sapiens; identical to SEQ ID NO: 185946
  misc_feature (908)..(944): n is a, c, g, or t

SEQ ID NO: 193342 - DNA, 924 bp, Homo Sapiens; identical to SEQ ID NO: 185947

SEQ ID NO: 193343 - DNA, 1184 bp, Homo Sapiens
ctttgtacaaaaaagttggcgagtggatcggagttataccaggtggtagaatatagtgagatttccctggcaacagctcaaaaacgaagctcagacggacgactgctgttcaatgcggggaacattgccaaccatttcttcactgtaccatttctgagagatgttgtcaatgtttatgaacctcagttgcagcaccatgtggctcaaaagaagattccttatgtggatacccaaggacagttaattaagccagacaaacccaatggaataaagatggaaaaatttgtctttgacatcttccagtttgcaaagaagtttgtggtatatgaagtattgcgagaagatgagttttccccactaaagaatgctgatagtcagaatgggaaagacaaccctactactgcaaggcatgctttgatgtcccttcatcattgctgggtcctcaatgcagggggccatttcatagatgaaaatggctctcgccttccagcaattccccgcagtgctacaaatgggaagtcagagaccatcacagctgatgtcaatcacaacttgaaggatgccaatgatgtaccaatccaatgtgaaatctctcctcttatctcctatgctggagaaggattagaaagttatgtggcagataaagaattccatgcacctctaatcatcgatgagaatggagttcatgagctggtgaaaaatggtatttgaaccagataccaagttttgtttgccacgataggaatagcttttatttttgatagaccaactgtgaacctacaagacgtcttggacaactgaagtttaaatatccacagggttttattttgcttgttgaactcttagagctattgcaaacttcccaagatccagatgactgaatttcagatagcatttttatgattcccaactcattgaaggtcttatttatataattttttccaagccaaggagaccattggccatccaggaaatttcgtacagctgaaatataggcaggatgttcaacatcagtttacttgcagctggaagcatttgtttttgaagttgtacatagtaataatatgtcattgtacatgttgaaaggtttctatggtactaaaagtttgttttattttatcaaacattaagcttttttaagaaaataattgggcagtgaaataaatgtatcttcttgtctctgg

SEQ ID NO: 193344 - DNA, 643 bp, Homo Sapiens
ttgtacaaaaaagttggggagaagaagaccttgcaaggaagacaagccaggcacgatggccaccttcccaccagcaaccagcgccccccagcagcccccaggcccggaggacgaggactccagcctggatgaatctgacctctatagcctggcccattcctacctcggaggtggaggccggaaaggtcgcaccaagagagaagctgctgccaacaccaaccgccccagccctggcgggcacgagaggaaactggtgaccaagctgcagaattcagagaggaagaagcgaggggcacggcgctgagacagagctggagatgaggccagaccatggacactacacccagcaatagagacgggactgcggaggaaggaggacccaggacaggatccaggccggcttgccacaccccccacccctaggacttattcccgctgactgagtctctgaggggctaccaggaaagcgcctccaaccctagcaaaagtgcaagatggggagtgagaggctgggaatggaggggcagagccaggaagatcccccagaaaagaaagctacagaagaaactggggctcctccagggtggcagcaacaataaatagacacgcacggcagccacagcttgggtgtgtgttcatcctt

SEQ ID NO: 193345 - DNA, 2573 bp, Homo Sapiens; identical to SEQ ID NO: 185949

SEQ ID NO: 193346 - DNA, 1196 bp, Homo Sapiens; identical to SEQ ID NO: 185952

SEQ ID NO: 193347 - DNA, 1118 bp, Homo Sapiens; identical to SEQ ID NO: 185958

SEQ ID NO: 193348 - DNA, 1509 bp, Homo Sapiens
  misc_feature (1304)..(1321): n is a, c, g, or t
ttggctcaaccactgggtgcgggccctggtggctgcccagagctacctgtacagcggctcctaccagacaatcaagatctgggacatccgaacccttgactgcatccacgtcctgcagacgtctggtggcagcgtctactccattgctgtgacaaatcaccacattgtctgtggcacctacgagaacctcatccacgtgtgggacattgagtccaaggagcaggtgcggaccctcacgggccacgtgggcaccgtgtatgccctggcggtcatctcgacgccagaccagaccaaagtcttcagtgcatcctacgaccggtccctcagggtctggagtatggacaacatgatctgcacgcagaccctgctgcgtcaccagggcagtgtcaccgcgctggctgtgtcccggggccgactcttctcaggggctgtggatagcactgtgaaggtttggacttgctaacaggatccaggccaggctgtggtttcccctgaaccagccctggacctttctgagccaggctggccacatggggtggtctcggggtttctgcctgccccgtgggcataggtggacaggctctggcagccgggcagtgccctccccgtcccatgctcggcgagcctccctctactcggcactgtccttgctgcccagcccctctctgggtgccaggtacgacgcttgccccggcccaccctccatccccaccctccatccccaccctagatggagcgagggcctttttactcaccttttctaccgtttttagactgtatgtagatttggttacctcctggttgaaataaatgctccacagactgtggctgtgagtggggacagctcctcgggacaagggggctgtgtgtggccttgaggttggtgtgcacaggcactggctgctgtgagtgggggggcatggggcagtttcctttggtggaccccaggacttcggcccactccggggcctcccctccctgctaggaggcaactcgtcacacccaagctgctggcctccagtcccatctcccccaacacatgtgcccccaaaaagtgagccaggcacctctgtttcctgctgtttattgacagccgacggcagcgccttgcccagacctcccctgcccacctgctggagcccagcctgtgccgccctctgaggagaggcctggggggacagctgggcacgtccactcgcagggaaacacggggtgagacagcatgaaggggccctgcacgccgggacgccacctccgccagccgcctccacccgccccacaccacaatcgctggttttcggcannnnnnnnnnnnnnnnnnaagaaacgtcaaaagttgtgcccaacactgtgggatcagcaaacacgatagaggagaccagtcagtacttcttggaggggggcaggaggagagaggaaaagggagggccgagaatgaccacacaacacaacccttggaccatgaccagaaccgtccgtggggaactccactggggtgggatgggcctg

SEQ ID NO: 193349 - DNA, 2195 bp, Homo Sapiens; identical to SEQ ID NO: 185966

SEQ ID NO: 193350 - DNA, 958 bp, Homo Sapiens; identical to SEQ ID NO: 185968

SEQ ID NO: 193351 - DNA, 759 bp, Homo Sapiens
ctttgttggcaacagtgttctaactattaacgctacgatgcctgaacctaccaagtctgctcctgccccaaagaagggctccaagaaggcggtgactaaggctcagaagaaggacgggaagaagcgcaagcgcagccgcaaggagagctattcagtgtatgtgtacaaggtgctgaagcaggtccatcccgacaccggcatctcttccaaggcaatggggatcatgaattccttcgtcaacgacatcttcgagcgcatcgcaggcgaggcttcccgcctggcgcattacaacaagcgctcgaccatcacctccagggagatccagacggccgtgcgcctgctgcttccgggggagctggccaagcacgccgtgtcggagggcaccaaggccgtcaccaagtacaccagttccaagtaactttgccaagggagagacatgaagacagaggagaaatgaatgcataaaataactgataatatgaatctatacatagaacttaggaagtctcatctgcctgaaaatgactgtgtggatcccacccaaatccaactcatcctggtttgctgcacactggttcatcaaaagaaggttaccgaggggaaggaactaaaggtgtttgcacttcatgttactttttgagtttataaacataaaaacagaatttacttctgttacagacctagttactgggaattcattacttgccatggactacctttgctaagaaaagtctgaatgagaagatggcaggacgtctg

SEQ ID NO: 193352 - DNA, 1659 bp, Homo Sapiens; identical to SEQ ID NO: 185971

SEQ ID NO: 193353 - DNA, 1043 bp, Homo Sapiens; identical to SEQ ID NO: 180833

SEQ ID NO: 193354 - DNA, 532 bp, Homo Sapiens; identical to SEQ ID NO: 185972

SEQ ID NO: 193355 - DNA, 798 bp, Homo Sapiens; identical to SEQ ID NO: 185973

SEQ ID NO: 193356 - DNA, 896 bp, Homo Sapiens
actttgtacaaaaaagttggtgctcgtctcaggctcgtagttcgccttcaacatgccggaaccagcgaagtccgctcccgcgcccaagaagggctcgaagaaagccgtgactaaggcgcagaagaaggacggcaagaagcgcaagcgcagccgcaaggagagctactccgtatacgtgtacaaggtgctgaagcaggtccaccccgacaccggcatctcctctaaggccatgggaatcatgaactccttcgtcaacgacatcttcgaacgcatcgcgggtgaggcttcccgcctggcgcattacaacaagcgctcgaccatcacctccagggagatccagacggccgtgcgcctgctgctgcccggggagttggccaagcacgccgtgtccgagggcaccaaggccgtcaccaagtacaccagcgctaagtaaacttgccaaggagggactttctctggaatttcctgatatgaccaagaaagcttcttatcaaaagaagcacaattgccttcggttacctcattatctactgcagaaaagaagacgagaatgcaaccatacctagatggacttttccacaagctaaagctggcctcttgatctcattcagattccaaagagaatcatttacaagttaatttctgtctccttggtccattccttctctctaataatcatttactgttcctcaaagaattgtctacattacccatctcctcttttgcctctgagaaagagtatataagcttctgtaccccactggggggttggggtaatattctgtggtcctcagccctgtaccttaataaatttgtatgccttttctcttattaatcttgtcagttgattttcagtgaactttcagaggccaaaaaggaggttttctcttggcccc

SEQ ID NO: 193357 - DNA, 3717 bp, Homo Sapiens; identical to SEQ ID NO: 185976

SEQ ID NO: 193358 - DNA, 804 bp, Homo Sapiens
  misc_feature (658)..(666): n is a, c, g, or t
gtgattgcatggggtaaccctttatttttatttaacagtacatttggaagaagataaggcaacaaggcaaaatttctataatgttgctagcattttcccaaggtaaagccaggaaacaaacttgtgtcctttctataagaacttctaagtgatgtcccctctaactccatggacagacactagtggtggtgaagttcataaagttttgaggtggcaaacagcttattttgtcctttatcataattggtttacaaattggatgcctggttttggcatactggttcagttgatcaagcgcaggatccctttggtctttgtaagaccagatgtataaggccgaatagggtcaagaacttgattgtaaggagaacgatttactattaccaatcaatattctacaaaacctgtctcttgtttaacccaagcgacagaggtgagtcttctctcctggactctccagatgccttgacaagattacttcatgatataccatgtttcccagttggctcatgggaaatggtaatcttggactgttgtttggtagaatcaacagctgcattttaaacttgaagttgctttaaatattccctgccaagggcctcgtgtcctttgagagcgactcaatgtttttgctcagctgttaaatacctccctgcannnnnnnnncctgatttaatattgctatgaacaggaaagtgtgtaaaagtaaaaagtgtatactatttacagatttaaagctttctttgaccttgtcaagggttaagcgactcatttgcatttagtataatgatatgcaaatcccaa

SEQ ID NO: 193359 - DNA, 1378 bp, Homo Sapiens; identical to SEQ ID NO: 185980
  misc_feature (1115)..(1123): n is a, c, g, or t

SEQ ID NO: 193360 - DNA, 1135 bp, Homo Sapiens
ctttgtacaaaaaagttggctattcccgcctggagatctgtaacctgaccccagacactctcaccagcgatacctacaagaagtggaaactcaccaaaatggatgggaactggaggcggggctccaccgcgggaggttgcaggaactacccgaacacattctggatgaaccctcagtacctgatcaagctggaggaggaggatgaggacgaggaggatggggagagcggctgcaccttcctggtggggctcattcagaagcaccgacggcggcagaggaagatgggcgaggacatgcacaccatcggctttggcatctatgaggttccagaggagttaagtgggcagaccaacatccacctcagcaaaaacttcttcctgacgaatcgcgccagggagcgctcagacaccttcatcaacctccgggaggtgctcaaccgcttcaagctgccgccaggagagtacattctcgtgccttccaccttcgaacccaacaaggatggggatttctgcatccgggtcttttctgaaaagaaagctgactaccaagctgtcgatgatgaaatcgaggccaatcttgaagagttcgacatcagcgaggatgacattgatgatggattcaggagactgtttgcccagttggcaggagaggatgcggagatctctgcctttgagctgcagaccatcctgagaagggttctagcaaagcgccaagatatcaagtcagatggcttcagcatcgagacatgcaaaattatggttgacatgctagattcggacgggagtggcaagctggggctgaaggagttctacattctctggacgaagattcaaaaataccaaaaaatttaccgagaaatcgacgttgacaggtctggtaccatgaattcctatgaaatgcggaaggcattagaagaagcaggtttcaagatgccctgtcaactccaccaagtcatcgttgctcggtttgcagatgaccagctcatcatcgattttgataattttgttcggtgtttggttcggctggaaacgctattcaagatatttaagcagctggatcccgagaatactggaacaatagagctcgaccttatctcttggctctgtttctcagtactttgaagttataactaatc

SEQ ID NO: 193361 - DNA, 975 bp, Homo Sapiens
ttggcccgcagtggccgcagcagcgcgccgggccctggccgcgccccagccgagcgcagcgcggagtcgccccgacctttctctgcgcagtacggccgccgggaccgcagcatggcgggcatcgcggccaagctggcgaaggaccgggaggcggccgaggggctgggctcccacgagagggccatcaagtacctcaaccaggactacgaggcgctgcggaacgagtgcctggaggccgggacgctcttccaggacccgtccttcccggccatcccctcggccctgggcttcaaggagttggggccctactccagcaaaacccggggcatcgagtggaagcgccccacggagatctgcgctgacccccagtttatcattggaggagccacccgcacagacatctgccaaggagccctaggtgactgctggctgctggcagccattgccccctcaccttgaatgaagaaatcctggctcgagtcgtccccctaaaccagagcttccaggaaaactatgcagggatctttcacttccagttctggcaatacggcgagtgggtggaggtggtggtggatgacaggctgcccactaaggacggggagctgctctttgtgcattcagccgaagggagcgagttctggagcgccctgctggagaaggcatacgccaagatcaacggatgctatgaagcactatcagggggtgccaccactgagggcttcgaagacttcaccggaggcattgctgagtggtatgagttgaagaagccccctcccaacctgttcaagatcatccagaaagctctgcaaaaaggctctctccttggctgctccatcgacatcaccagcgccgcggactcggaggccatcacgtttcaaagctggtgaaggggcacgcgtactcggtcaccggagccgaggggttgaaagtaacggaagcctacagaaactgatccgcatccgaaatccctgggga

SEQ ID NO: 193362 - DNA, 1547 bp, Homo Sapiens; identical to SEQ ID NO: 185981
  misc_feature (1096)..(1104): n is a, c, g, or t

SEQ ID NO: 193363 - DNA, 1146 bp, Homo Sapiens
  misc_feature (785)..(793): n is a, c, g, or t
actttgtacaaaaaagttggcaaaatactattagttatttaaggcagaaacataagtgattcttccacggccaaactagaggcacagagctggaaaaacttcatccccactcagcacatactagggaggtaacttgccagctttgctttgggtcatagttcttacagctaacttatgtgttccagaaaatttaccgagaaatcgacgttgacaggtctggtaccatgaattcctatgaaatgcggaaggcattagaagaagcaggtttcaagatgccctgtcaactccaccaagtcatcgttgctcggtttgcagatgaccagctcatcatcgattttgataattttgttcggtgtttggttcggctggaaacgctattcaagatatttaagcagctggatcccgagaatactggaacaatagagctcgaccttatctcttggctctgtttctcagtactttgaagttataactaatctgcctgaagacttctcatgatggaaaatcagccaaggactaagcttccatagaaatacactttgtatctggacctcaaaattatgggaacatttacttaaacggatgatcatagctgaaaataatgatactgtcaatttgagatagcagaagtttcacacatcaaagtaaaagatttgcatatcattatactaaatgcaaatgagtcgcttaacccttgacaaggtcaaagaaagctttaaatctgtaaatagtatacactttttacttttacacactttcctgttcatagcaatattaaatcaggnnnnnnnnntgcagggaggtatttaacagctgagcaaaaacattgagtcgctctcaaaggacacgaggcccttggcagggaatatttaaagcaacttcaagtttaaaatgcagctgttgattctaccaaacaacagtccaagattaccatttcccatgagccaactgggaaacatggtatatcatgaagtaatcttgtcaaggcatctggagagtccaggagagaagactcacctctgtcgcttgggttaaacaagagacaggttttgtagaatattgattggtaatagtaaatcgttctccttacaatcaagtgcgtgaccctattcggccttatacatctggtcttacaagaccaaaggg

SEQ ID NO: 193364 - DNA, 2331 bp, Homo Sapiens; identical to SEQ ID NO: 185983
  misc_feature (2067)..(2082): n is a, c, g, or t

SEQ ID NO: 193365 - DNA, 887 bp, Homo Sapiens; identical to SEQ ID NO: 185984

SEQ ID NO: 193366 - DNA, 1099 bp, Homo Sapiens
ttgggagagccttacccgacggaaactggacactggaccggcagcgccatgagactcctcccccgcttgctgctgcttctcttactcgtgttccctgccactgtcttgttccgaggcggccccagaggcttgttagcagtggcacaagatcttacagaggatgaagaaacagtagaagattccataattgaggatgaagatgatgaagccgaggtagaagaagatgaacccacagatttggtagaagataaagaggaagaagatgtgtctggtgaacctgaagcttcaccgagtgcagatacaactatactgtttgtaaaaggagaagattttccagcaaataacattgtgaagttcctggtaggctttaccaacaagggtacagaagattttattgttgaatccttagatgcctcattccgttatcctcaggactaccagttttatatccagaatttcacagctcttcctctgaacactgtagtgccaccccagagacaggcaacttttgagtactctttcattcctgcagagcccatgggcggacgaccatttggtttggtcatcaatctgaactacaaagatttgaacggcaatgtattccaagatgcagtcttcaatcaaacagttacagttattgaaagagaggatgggttagatggagaaacaatctttatgtatatgttccttgctggtcttgggcttctggttattgttggccttcatcaactcctagaatctagaaagcgtaagagacccatacagaaagtagaaatgggtacatcaagtcagaatgatgttgacatgagttggattcctcaggaaacattgaatcaaatcaataaagcttcaccaagaaggttgcccaggaaacgggcacagaagagatcagtgggatctgatgagtaaatgttcctttgtgcaacaattcggtctttacttaacctgccctaatatttttcggcctgatgggaattagtgcagagaagccatgtcaccatagaaggcaactcctacttgtgtgtggactgagcaatcagagtctggcgatatattgctgaaatgcactgcattcatttttctaaagtaacaaatttgg

SEQ ID NO: 193367 - DNA, 1750 bp, Homo Sapiens; identical to SEQ ID NO: 185987
  misc_feature (306)..(337): n is a, c, g, or t
  misc_feature (1426)..(1437): n is a, c, g, or t

SEQ ID NO: 193368 - DNA, 1537 bp, Homo Sapiens; identical to SEQ ID NO: 185988
  misc_feature (84)..(116): n is a, c, g, or t
  misc_feature (628)..(668): n is a, c, g, or t
  misc_feature (1206)..(1218): n is a, c, g, or t

SEQ ID NO: 193369 - DNA, 1258 bp, Homo Sapiens; identical to SEQ ID NO: 185989
  misc_feature (477)..(485): n is a, c, g, or t
  misc_feature (1088)..(1119): n is a, c, g, or t

SEQ ID NO: 193370 - DNA, 1956 bp, Homo Sapiens; identical to SEQ ID NO: 185990
  misc_feature (867)..(875): n is a, c, g, or t
  misc_feature (1478)..(1509): n is a, c, g, or t

SEQ ID NO: 193371 - DNA, 762 bp, Homo Sapiens
tttgtacaaaaaagttggcaggctgtgcagtttgctttggacatggcaaggggcatggccttcctacacacactagagcccctcatcccacgacatgcactcaatagccgtagtgtaatgattgatgaggacatgactgcccgaattagcatggctgatgtcaagttctctttccaatgtcctggtcgcatgtatgcacctgcctgggtagcccccgaagctctgcagaagaagcctgaagacacaaacagacgctcagcagacatgtggagttttgcagtgcttctgtgggaactggtgacacgggaggtaccctttgctgacctctccaatatggagattggaatgaaggtggcattggaaggccttcggcctaccatcccaccaggtatttcccctcatgtgtgtaagctcatgaagatctgcatgaatgaagaccctgcaaagcgacccaaatttgacatgattgtgcctatccttgagaagatgcaggacaagtaggactggaaggtccttgcctgaactccagaggtgtcgggacatggttgggggaatgcacctccccaaagcagcaggcctctggttgcctcccccgcctccagtcatggtactaccccagccatggggtccatccccttcccccatccctaccactgtggccccaagaggggcgggctcagagctttgtcacttgccacatggtgtctcccaacatgggagggatcagccccgcctgtcacaataaagtttattatgaaaaaa

SEQ ID NO: 193372 - DNA, 2353 bp, Homo Sapiens; identical to SEQ ID NO: 180837
  misc_feature (755)..(867): n is a, c, g, or t
  misc_feature (885)..(893): n is a, c, g, or t
  misc_feature (1858)..(1871): n is a, c, g, or t

SEQ ID NO: 193373 - DNA, 1362 bp, Homo Sapiens; identical to SEQ ID NO: 185997
  misc_feature (124)..(154): n is a, c, g, or t

SEQ ID NO: 193374 - DNA, 720 bp, Homo Sapiens; identical to SEQ ID NO: 180843

SEQ ID NO: 193375 - DNA, 943 bp, Homo Sapiens; identical to SEQ ID NO: 180844
  misc_feature (126)..(217): n is a, c, g, or t

SEQ ID NO: 193376 - DNA, 1342 bp, Homo Sapiens
ctttgtacaaaaaagttgggtcgctgctcggctcgcggcccgtggggtcggccccgccaccgttgccgccatgcccatgaagggccgcttccccatccgccgcaccctgcaatatctgagccaggggaacgtggtgttcaaggactccgtgaaggtcatgacagtgaattacaacacgcatggggagctgggcgagggcgccaggaagtttgtgtttttcaacatacctcagattcaatacaaaaacccttgggtgcagatcatgatgtttaagaacatgacgccgtcacccttcctgcgattctacttagattctggggagcaggtcctggtggatgtggagaccaagagcaataaggagatcatggagcacatcagaaaaatcttggggaagaatgaggaaaccctcagggaagaggaggaggagaaaaagcagctttctcacccagccaacttcggccctcgaaagtactgcctgcgggagtgcatctgtgaagtggaagggcaggtgccctgccccagcctggtgccattacccaaggagatgagggggaagtacaaagccgctctgaaagccgatgcccaggactaaggcccacggtcactgtgggctggggtgatggtgtctgaccagtggggagattggaatgggattactttggcccagggaagcccctggttctgtccctggagactctggaaatccttttgcattaaaaggactttacacacctgtgtaaaaggatgtgggagaggagggtctgaagctgagctgctaaatgaatatccctgctctgctggtcaataaaacgcttcctaatagcagcttggcgtgtatctggtcctagtgaagaggaaggcctgtgtagcagaaaggctttgggcctgagaggttaaggccacagcctgttgacacctgttttggtcctgcgaccctttactggtctccgctggctttgaatcttcctctgggctctactctggagaacataagggctgctgtggttgagtctggctagcactgtctgtggttggcagtgtgtacacccctccgttcagttccttgggggtatttttcagaaatccaaaggcaacccttcgtgcagtgctcacttttttaagtacagttgattacccttgcctgctggggggcctagccatgggccagagatggaggagccccagtggctgacaggccagcctcactcggcacgtacctgctgaccagtcagccactgccaacccatggcccagccactgtgtgcattaacatgggaggtttgtatgccatggaggaaatgaggagaaccacctaatggagacattggggccctgctggggg

SEQ ID NO: 193377 - DNA, 1248 bp, Homo Sapiens; identical to SEQ ID NO: 180849
  misc_feature (968)..(1031): n is a, c, g, or t

SEQ ID NO: 193378 - DNA, 1006 bp, Homo Sapiens
ttggcaaatttattgttgtttcagaaggttttgcaggactgggaacgctttagtgtcatcaacagtaaacctcagatactgttctgcacagttcagaagtaccataccaggtattgtgagtggcaagaacgccaggggacagagatgcttctggtagatgagggccagagaaaccagctctcctccattttgacagcaatttctcactgtggccatttggcctccattatgttttgagaggaatttcttgagatcttgagaaatcaccatgattaggccaattgtcaatcagtattcagaaactagaaaggaacaatgagatacttgtttatggttctttagggcatatgtttgaaaaccctctcatctcagatctgtatagctggtgtgtgtttgtgtccataaatacacgtgcattgctgtcgtgcccattaagaaagggggagtaagtaaaagaggaatcgctcagatctttccttggatgaacagcagtggcgtggttggtgtgttgactgtgaacaggctgacttagctgttgatgtatactcagaacctccatctcctcccagaccctgcacttttccttctctgcagtctgattctctaatgactgtcactggacaaaccccagttttatgctcgcttagtaaaaataagtttaaacatttcatggtggttgacagaactttgtccccaaacatgcggattcaattctttaaaactcgttgaacgtttataccaaaggtcccgccccgcaggtgtgtatgtggtgcacagagggtgaggtttggagcatcgggcactgtgtgcattgctaaggggacatagtgagacaatgtgggatttaactaaaaacacatcaattgtgtgtcacattaccagtgttgtcaggtatttgttcttaattgttattgtaatatattttcagttgtttttctaatttaattctctccgtctgttgtctgactgtgacctgctaactgttgttaaacttgatgtaaataaa

SEQ ID NO: 193379 - DNA, 1017 bp, Homo Sapiens
gatgagcaatgctttttccataatagccaactttgtacaaaaaagttggaaactaacaaacaaaaattgttttgctttgctacaaggtggggaagactgaagaagtgttaactgaaaacaggtgacacagagtcaccagttttccgagaaccaaagggaggggtgtgtgatgccatctcacaggcaggggaaatgtctttaccagcttcctcctggtggccaagacagcctgtttcagagggttgttttgtttggggtgtgggtgttatcaagtgaattagtcacttgaaagatgggcgtcagacttgcatacgcagcagatcagcatccttcgctgccccttagcaacttaggtggttgatttgaaactgtgaaggtgtgattttttcaggagctggaagtcttagaaaagccttgtaaatgcctatattgtgggcttttaacgtatttaagggaccacttaagacgagattagatgggctcttctggatttgttcctcatttgtcacaggtgtcttgtgattgaaaatcatgagcgaagtgaaattgcattgaatttcaagggaatttagtatgtaaatcgtgccttagaaacacatctgttgtcttttctgtgtttggtcgatattaataatggcaaaatttttgcctatctagtatcttcaaattgtagtctttgtaacaaccaaataaccttttgtggtcactgtaaaattaatatttggtagacagaatccatgtacctttgctaaggttagaatgaataatttattgtatttttaatttgaatgtttgtgctttttaaatgagccaagactagaggggaaactatcaccctaaaatcagtttggaaaacaagacctaaaaagggaaggggatgggggattgtggggagagagtggggcgaggtgcctttactacatgtgtgatctgaaaccctgcttggtttctgagctgcgtctattggaattggtaaagtattacaaatgggctttttatcttttccttccttccctt

SEQ ID NO: 193380 - DNA, 915 bp, Homo Sapiens; identical to SEQ ID NO: 180851

SEQ ID NO: 193381 - DNA, 2144 bp, Homo Sapiens; identical to SEQ ID NO: 180852

SEQ ID NO: 193382 - DNA, 1800 bp, Homo Sapiens; identical to SEQ ID NO: 186007
  misc_feature (1500)..(1513): n is a, c, g, or t

SEQ ID NO: 193383 - DNA, 1197 bp, Homo Sapiens; identical to SEQ ID NO: 186008
  misc_feature (940)..(951): n is a, c, g, or t

SEQ ID NO: 193384 - DNA, 1267 bp, Homo Sapiens; identical to SEQ ID NO: 186009
  misc_feature (557)..(584): n is a, c, g, or t
  misc_feature (847)..(907): n is a, c, g, or t

SEQ ID NO: 193385 - DNA, 1369 bp, Homo Sapiens; identical to SEQ ID NO: 186010
  misc_feature (270)..(298): n is a, c, g, or t

SEQ ID NO: 193386 - DNA, 866 bp, Homo Sapiens; identical to SEQ ID NO: 186015

SEQ ID NO: 193387 - DNA, 1368 bp, Homo Sapiens; identical to SEQ ID NO: 186018
  misc_feature (107)..(123): n is a, c, g, or t
  misc_feature (373)..(393): n is a, c, g, or t
  misc_feature (411)..(673): n is a, c, g, or t

SEQ ID NO: 193388 - DNA, 1397 bp, Homo Sapiens; identical to SEQ ID NO: 186019
  misc_feature (888)..(933): n is a, c, g, or t

SEQ ID NO: 193389 - DNA, 783 bp, Homo Sapiens
  misc_feature (587)..(632): n is a, c, g, or t
ttggagaagaggaaagcctgcagccctctgacaaggacgagggtgaccaccccaacaacagcttcagcccctgtagcgcccatgaccgcaggtgcctgcagaagcacttcgccaaaattcgagaccggagcaccagtgggggcaagatgaaggtcaatggggcgccccgggaggatgcccggcctgtgccccagggctcctgccagagcgagctgcaccgggcgctggagcggctggccgcttcacagagccgcacccacgaggacctctacatcatccccatccccaactgcgaccgcaacggcaacttccaccccaagcagtgtcacccagctctggatgggcagcgtggcaagtgctggtgtgtggaccggaagacgggggtgaagcttccggggggcctggagccaaagggggagctggactgccaccagctggctgacagctttcgagagtgaggcctgccagcaggccagggactcagcgtcccctgctactcctgtgctctggaggctgcagagctgacccagagtggagtctgagtctgagtcctgtctctgcctgcggcccagaagtttccctcaaannnnnnnnnnnnnnnnnnnnnnnnnnnnnnnnnnnnnnnnnnnnnnagcatgggtgtgcccttggggtaagccagagcctggggtgttctctttggtgttacacagcccaagaggactgagactggcacttaacccaagaggtctgagccctggtgtgtttccagatcgatcctggattcactcactcactcattcc

SEQ ID NO: 193390 - DNA, 1544 bp, Homo Sapiens; identical to SEQ ID NO: 186022
  misc_feature (267)..(285): n is a, c, g, or t
  misc_feature (1013)..(1024): n is a, c, g, or t

SEQ ID NO: 193391 - DNA, 953 bp, Homo Sapiens; identical to SEQ ID NO: 186023

SEQ ID NO: 193392 - DNA, 2200 bp, Homo Sapiens; identical to SEQ ID NO: 186024
  misc_feature (695)..(745): n is a, c, g, or t
  misc_feature (1160)..(1178): n is a, c, g, or t
  misc_feature (1906)..(1918): n is a, c, g, or t

SEQ ID NO: 193393 - DNA, 1686 bp, Homo Sapiens; identical to SEQ ID NO: 186026
  misc_feature (347)..(360): n is a, c, g, or t

SEQ ID NO: 193394 - DNA, 1012 bp, Homo Sapiens; identical to SEQ ID NO: 186028

SEQ ID NO: 193395 - DNA, 1625 bp, Homo Sapiens; identical to SEQ ID NO: 186030
  misc_feature (87)..(148): n is a, c, g, or t

SEQ ID NO: 193396 - DNA, 1687 bp, Homo Sapiens; identical to SEQ ID NO: 186031
  misc_feature (1216)..(1261): n is a, c, g, or t

SEQ ID NO: 193397 - DNA, 1619 bp, Homo Sapiens; identical to SEQ ID NO: 186032

SEQ ID NO: 193398 - DNA, 1431 bp, Homo Sapiens
aaaagccaactttgtacaaaaaagttggtgcaaaggtggctctgcagcataatttaggcattggaggagctgtggttgtaacactctacaagatgggttttccggaagccgccagttcttttagaactcatcaaattgaagctgttccaaccagctctgcaagtgatggatttaaggcaaatcttgtttttaaggagattgagaagaaacttgaagaggaaggggaacagtttgtgaagaaaatcggtggtatttttgccttcaaggtgaaagatggccctgggggtaaagaggccacctgggtggtggatgtgaagaatggcaaaggatcagtgcttcctaactcagataagaaggctgactgcacaatcacaatggctgactcagacttcctggctttaatgactggtaaaatgaatcctcagtcggccttctttcaaggcaaattgaaaatcactggcaacatgggtctcgctatgaagttacaaaatcttcagcttcagccaggcaacgctaagctctgaagaactccctttggctacttttgaaaatcaagatgagatatatagatatatatccatacattttattgtcagaatttagactgaaactacacattggcaaatagcgtgggatagatttgtttcttaatgggtgtgaccaatcctgtttttcctatgctctgggtgaatagagcctgatggtatactactgctttgcggaattgcatacaactgtgcattacaaagttaatatggtaattatggtctggggtaaaattgagtttcagaataaaattaggaacagtaaaatccaaagaactatgtaaacaaaaaagcttttgttttgcttacaaagtatatttaaggattattctgctgaagattcagtttaagagttttccttgggagaactaagtaagaaacacaatgccaacagctggccagtaattagtgttgtgcacttcatgtcattaatcaatttctcaatagttcttaaaattagtgagattaaaaatctaaaaattttgcatttcatgctatcagaaacagtattttcttcccaaatcaaaataaaagaaatatgatcagagcttgaacacaggcttatttttaaaataaaaatatttttaacatgggtttccttattgaaaaatcagtgtattagtcataaaacaccatcattaagaataattgaacaataaagtttgctttcagatgcagttttcaaattataatctcatttcaatttataacgttctcagtcctttgttataattttcctttttcatgtaagtttaattatctgcatttatcttttttcctagtttttctaatactaatgttatttcttaaaattcagtgagatataggataaaataatgctttgagaagaatgtttaatagaaaattaaaataacttttttctggc

SEQ ID NO: 193399 - DNA, 924 bp, Homo Sapiens; identical to SEQ ID NO: 180859

SEQ ID NO: 193400 - DNA, 848 bp, Homo Sapiens
aaaagttgggtgcaacaagccattcaaataatagaagttataaattatgatctacctaccaatcgtgaaaactatattcacagaattggcagagggggtcgatttgggaggaaaggtgtggctataaactttgttactgaagaagacaagaggattcttcgtgacattgagactttctacaatactacagtggaggagatgcccatgaatgtggctgaccttatttaattcctgggatgagagttttggatgcagtgctcgctgttgctgaataggcgatcacaacgtgcattgtgcttctttctttgggaatatttgaatcttgtctcaatgctcataacggatcagaaatacagattttgatagcaaagcgacgttagtcgtgagctcttgtgaggaaagtcattggctttatcctctttagagttagactgttggggtgggtataaaagatggggtctgtaaaatctttctttcttagaaatttatttcctagttctgtagaaatggttgtattagatgttctctatcatttaataatatacttgtggactaaaagatataagtgctgtataaaatcagccaattatgttaaactagcatatctgcctttattgtgtttgtcattagcctgagtagaaaggcctttaaaatttttttagaaagcatttgaatgcattttgtttggtattgtatttattcaataaagtatttaattagtgctaagtgtgaactggaccctgttgctaagccccagcaagcaatcctaggtagggtttaatccccagtaaaattgccatattgcacatgtcttaatgaagtttgaatgttaaataaattgtatattc

SEQ ID NO: 193401 - DNA, 1172 bp, Homo Sapiens
tttgtacaaaaaagttggctggaaaaaagtaagttttagaaaatagttaacctttgcagcatttgtttacagtttacagttccagaagtgcgtcgaaatggattacataactgctcttttattcctggtgttcacatctgtcccaggctgacacctgctcttggctggcccactttggtatgggctttaatttcactaccccaaacacgatactgtcatctgctttataataatgctcaagatgcctgataaaaatctcattttgcagccagacaagccttgaatccttttggcactaactgcaaaggaagattttttttctctagatatgcattagcagctagtgctccagttagaagcacgaactataaccttgataagtaaacagcagctggtggttaacaagtggatcgtcatgttcagtagtttatacattatgtgagaagtaacgttctgattctttttcttacacagaattggcagagggggtcgatttgggaggaaaggtgtggctataaactttgttactgaagaagacaagaggattcttcgtgacattgagactttctacaatactacagtggaggagatgcccatgaatgtggctgaccttatttaattcctgggatgagagttttggatgcagtgctcgctgttgctgaataggcgatcacaacgtgcattgtgcttctttctttgggaatatttgaatcttgtctcaatgctcataacggatcagaaatacagattttgatagcaaagcgacgttagtcgtgagctcttgtgaggaaagtcattggctttatcctctttagagttagactgttggggtgggtataaaagatggggtctgtaaaatctttctttcttagaaatttatttcctagttctgtagaaatggttgtattagatgttctctatcatttaataatatacttgtggactaaaagatataagtgctgtataaaatcagccaattatgttaaactagcatatctgcctttattgtgtttgtcattagcctgagtagaaaggcctttaaaatttttttaaaaagcatttgaatgcattttgtttggtattgtatttattcaataaagtatttaattagtgctaagtgtgaactggaccctgttgctaagccccagcaagcatcctaaggtagggtttaa

SEQ ID NO: 193402 - DNA, 652 bp, Homo Sapiens
tgtacaaaaaagttggcttatttaattccttagggatgagagttttggatgcagtgctcgctgttgctgaataggcgatcacaacgtgcattgtgcttctttctttgggaatatttgaatcttgtctcaatgctcataacggatcagaaatacagattttgatagcaaagcgacgttagtcgtgagctcttgtgaggaaagtcattggctttatcctctttagagttagactgttggggtgggtataaaagatggggtctgtaaaatctttctttcttagaaatttatttcctagttctgtagaaatggttgtattagatgttctctatcatttaataatatacttgtggactaaaagatataagtgctgtataaaatcagccaattatgttaaactagcatatctgcctttattgtgtttgtcattagcctgagtagaaaggcctttaaaatttttttagaaagcatttgaatgcattttgtttggtattgtatttattcaataaagtatttaattagtgctaagtgtgaactggaccctgttgctaagccccagcaagcaatcctaggtagggtttaatccccagtaaaattgccatattgcacatgtcttaatgaagtttgaatgttaactaaattgtatattcacttt

SEQ ID NO: 193403 - DNA, 1504 bp, Homo Sapiens; identical to SEQ ID NO: 186037

SEQ ID NO: 193404 - DNA, 988 bp, Homo Sapiens
gagcaatgcttttcctataatagccaactttgtacaaataacctgtctctcattcctaagttgcctcattaattttcatgaacaagaatatgtacctttttgatgctatattactgcgattaaaaagttcttgcaggtaatgtttatgatatgttaaacgttgtaatttcctatcgtaattataacattcccattcttttgtagatgaaacttctacatattgaaccacagattttctgagcttctaaatgtagcctttcattgcacatttcagtgatcagaatagatatccttttacacgcacaaaagcaatagattcattcagtggacaagttccttgtttaactacacagctatgatggaatgatatatccaagttccttgcctcagtgaaatatgcatatgtatatcatgaaagtgggatgccaagtaagcttaaaatggcattctctagcaaagagattagacttttaaataactcttataaaacaggttggcgatcatttcccaagattggtttcccttgagtttttgctaaaacaaatcttagtagttttgcccgtttaaaacaactcacaatcgtaaatgctactattcctaagatatcttacctttttatttcagtttagccatgtattgtatgagtgtattagtctaagcagtgagaatcttttctatgcctctattccagcaaaaagtagaagtatcaaataaaaagggcaacttttaaaatattaagcctgaagacttctaaaaagacaagaaacatggcctaaataaccaacatagatttacatagtaagtttcacactaccttattaccaaaagcaaacacctcttactttaaactacattatcatgtatatctattgtatgctggtctttactttttgccaaaatcaacatataatgaagagatgcctttgtttcatgagattcaaacttgatgctatgctttaaaataaactcagtacttttagaaacataa

SEQ ID NO: 193405 - DNA, 1397 bp, Homo Sapiens; identical to SEQ ID NO: 186039
  misc_feature (68)..(109): n is a, c, g, or t

SEQ ID NO: 193406 - DNA, 994 bp, Homo Sapiens
ccaactttgtacaaaaaagttggcagcagcagcaaacccgccgggatcaaagtgtaccagtcggcagcatggctacgaaatgtgggaattgtggacccggctactccacccctctggaggccatgaaaggacccagggaagagatcgtctacctgccctgcatttaccgaaacacaggcactgaggccccagattatctggccactgtggatgttgaccccaagtctccccagtattgccaggtcatccaccggctgcccatgcccaacctgaaggacgagctgcatcactcaggatggaacacctgcagcagctgcttcggtgatagcaccaagtcgcgcaccaagctggtgctgcccagtctcatctcctctcgcatctatgtggtggacgtgggctctgagccccgggccccaaagctgcacaaggtcattgagcccaaggacatccatgccaagtgcgaactggcctttctccacaccagccactgcctggccagcggggaagtgatgatcagctccctgggagacgtcaagggcaatggcaaagggggttttgtgctgctggatggggagacgttcgaggtgaaggggacatgggagagacctgggggtgctgcaccgttgggctatgacttctggtaccagcctcgacacaatgtcatgatcagcactgagtgggcagctcccaatgtcttacgagatggcttcaaccccgctgatgtggaggctggactgtacgggagccacttatatgtatgggactggcagcgccatgagattgtgcagaccctgtctctaaaagatgggcttattcccttggagatccgcttcctgcacaacccagacgctgcccaaggctttgtgggctgcgcactcagctccaccatccagcgcttctacaagaacgagggaggtacatggtcagtggagaaagtgatccaggtgctccccaagaaagtgaaggctggctgctgcccgaaatgccaggcctg

SEQ ID NO: 193407 - DNA, 1197 bp, Homo Sapiens; identical to SEQ ID NO: 186040

SEQ ID NO: 193408 - DNA, 1676 bp, Homo Sapiens; identical to SEQ ID NO: 186042

SEQ ID NO: 193409 - DNA, 1971 bp, Homo Sapiens; identical to SEQ ID NO: 186043
  misc_feature (1600)..(1663): n is a, c, g, or t

SEQ ID NO: 193410 - DNA, 1353 bp, Homo Sapiens; identical to SEQ ID NO: 186046

SEQ ID NO: 193411 - DNA, 1325 bp, Homo Sapiens
ttgggaggacttcgatggcaagctcagcttccgggagttcctgctcattttccacaaggccgcggcaggggagctgcaggaggacagtgggctgatggcgctggcaaagctttctgagatcgatgtggccctggagggtgtcagaggtgccaagaacttctttgaagccaaggtccaagccttgtcatcggccagtaagtttgaagcagagttgaaagctgagcaagatgagcggaagcgggaggaggaggagaggcggctccgccaggcagccttccagaaactcaaggccaacttcaatacatagtcctgctgaccttgccctctgcccacagctgtgcctcacagatgccccgagaagagatgactaggcatcttcatcactgctgtcggtcccctccctgagccagcatctccatccaccaccccgtgccagctcccgtgccagccttcattcctcccagtgtccaagcccctccaggagggtcctggggtgggccagatgcctgcccacctctgtctcctgcctctgctcctctgcccttcttatagccagaacttgtatcttctcagcaaccttcactttgtccttgtccctttaccattccccatcaaagagtagtctgctatatcaatttgtgtagatatgtctgtctttttgggtcctcagagaaaatgcccattttctcggagaattctctgcactcctctctgcttcacattcaacttccctgttctcatctttggtaggattctgccagttgcttttgcatcttctgttcctgggtaatggtgggtcttaatggaggctgggtggaccactgcccgtccactcttcaacaggaggaacagcatgccaccacagtaacacacattagagaaaggacagaggtctgctccttcctgccacctttctcctggccccttagcattcccccagtccctccctcttcaccttgctccgtctatgtcttcccagctcagccttttccccactcttaaatactgtactacttcactgtaagaacgaaagaatagttaggataccaatgagtaaaagggttcctgttcactctgactctgtgcaaattgtattacagtagaccgctgacgttcccaagtgacagatccagggcctttcaaacatccccaaagtcatggccatactcaccattaaccagtttctaacatctgtttcaaggtatccagctgtagatgttcttatcccccatacttgtgagttcttgggggttgctcacaaatactagggggtttttgttgtatttttaacaaatatatcctaatgtcatatttattctcttttg

SEQ ID NO: 193412 - DNA, 1441 bp, Homo Sapiens
  misc_feature (1194)..(1202): n is a, c, g, or t
ttggctctttcactccgcgctcacggcggcggccaaagcggcggcgacggcggcgcgagaacgacccggcggccagttctcttcctcctgcgcacctgccccgctcggtcagtcagtcggcggccggcgcccggcttgtgctcagacctcgcgcttgcggcgcccaggcccagcggccgtagctagcgtctggcctgagaacctcggcgctccggcggcgcgggcaccacgagccgagcctcgcagcggctccagaggaggcaggcgagtgagcgagtccgaggggtggccggggcaggtggtggcgccgcgaagatggtcgccaagcaaaggatccgtatggccaacgagaagcacagcaagaacatcacccagcgcggcaacgtcgccaagacctcgagaaatgcccccgaagagaaggcgtctgtaggaccctggttattggctctcttcatttttgttgtctgtggttctgcaattttccagattattcaaagtatcaggatgggcatgtgaagtgactgaccttaagatgtttccattctcctgtgaattttaacttgaactcattcctgatgtttgataccctggttgaaaacaattcagtaaagcatcctgcctcagaatgactttcctatcatgcttcatgtgtcattccaaggtttcttcatgagtcattccaagttttctagtccataccacagtgccttgcaaaaaacaccacatgaataaagcaataaaatttgattgttaagatacagtagtggaccctacttattcagtcaattaagagtaagtttttttatgtggttattaaaacagtatgaacaattagtctaactctgcatagacagggtctagattttgttaacccaaatgtataactgcagttagcttaaattacaatttgaagtcttgtggtttttatatagctaggcactttattactcttttgaactgaaagcacactcccttataggttcatgtaactgtcctgtaataaggtgcttataaatggaacaactacacagcctagttttgccacaacctttagcatctaaaaagttttaaaagcttctaaatgtctaatataaagggagatgcttatagccacaacatctattttaccaatattgtttccattacactaccttggattttgcatgagtgagtatagtaacccaagatgccatnnnnnnnnncttgatcgttttctgacttaatcagttactgtggtttcactaaaagctaccgtggtggagtgaagtcagtcaggggaaggtttgtttatgttacatttatttcaccagaactattttaatatatcaaaggggtttactatgccaaacaaaattctagggaaaaatactgctaaaaatggatgcctcatcagaacatgctgttgagtccaatgtgccataaggacattttagcatgttaa

SEQ ID NO: 193413 - DNA, 1650 bp, Homo Sapiens; identical to SEQ ID NO: 186051
  misc_feature (50)..(58): n is a, c, g, or t

SEQ ID NO: 193414 - DNA, 1124 bp, Homo Sapiens; identical to SEQ ID NO: 186052
  misc_feature (229)..(237): n is a, c, g, or t
  misc_feature (794)..(802): n is a, c, g, or t

SEQ ID NO: 193415 - DNA, 692 bp, Homo Sapiens; identical to SEQ ID NO: 180864
  misc_feature (165)..(192): n is a, c, g, or t
  misc_feature (316)..(356): n is a, c, g, or t

SEQ ID NO: 193416 - DNA, 2295 bp, Homo Sapiens; identical to SEQ ID NO: 186053
  misc_feature (110)..(160): n is a, c, g, or t
  misc_feature (1282)..(1290): n is a, c, g, or t
  misc_feature (1846)..(1854): n is a, c, g, or t

SEQ ID NO: 193417 - DNA, 1018 bp, Homo Sapiens; identical to SEQ ID NO: 180865

SEQ ID NO: 193418 - DNA, 744 bp, Homo Sapiens; identical to SEQ ID NO: 180866

SEQ ID NO: 193419 - DNA, 1187 bp, Homo Sapiens
tcaaaaagaggtctctaatcaaaatgaagaaatttaaagcaagatggaacccaaagtgaatggaccccctgccaatccacacacactcacaagtgccaccttttccctgcccctccatagaacacacatataaggagtaactggaaaggtcctggtggtggcagccatatttggaggtctggtgaccaggtggcaagcactagtaccacgcttagaagacacaacacaacctcatggggcgagaggacatgaggagagaaccagtgactggacaggtacagtaccataacagaactccttgggtcagtgctgagagacctgcactcaagtctaatacagatcccatccaggcaacctcactgaggccgaaacaacagttcctcagaaccagcgtctgcagtgtacacaaaggtcggagccaggacagtcctgagggggatggccttcccaaaggatactgtacttgccaatcacaagagcaacagagaaatgacagacagatccctagggtacggattcctactgctggggttcgctggctcggaatgacaggtcactttaagtgcccttgggaggggtccattttaagcagctgggatccatggttttattggagttggaccttttggcctctttggctatccactcatcaatcaggtcctgtctctttaaaactaggtgttttcccttccagtatttgagcatctgaagggcttgcagagtgctgacaatgtccacaggattcacagccgtctcctgactgatttctttgatagaaatctctttgccttgaaaattatgcaggtagcggagaagtacttctttccagtaactgcgatagcttataagccccagatctgagagtggacgttctggggagccaactttttcttcgactttggaaagcaaataactgaaatcaataagcatcttgccatagccctgtctcatgtactgaggcatagtaaggatacaggagacgttgtagttgaggaatgaattcttttccttagaaaaatatccaatcaggtgacagccagtgttgtccgcctctgtcataacatagaacaggaagggctccacatcataatataatgtcttgtggtccagaaaaagtttggccaacaggcacaggttttggcagtagatcttgtttttcttgccatccacttcaaacacagagccaa

SEQ ID NO: 193420 - DNA, 1159 bp, Homo Sapiens
ttggcttttgcttttcaaggctctgtgtggctgcacagtgaacgtccccactctggacggcaggacgatacccgtcgtattcaaagatgttatcaggcctggcatgcggcgaaaagttcctggagaaggcctccccctccccaaaacacccgagaaacgtggggacctcattattgagtttgaagtgatcttccccgaaaggattccccagacatcaagaaccgtacttgagcaggttcttccaatatagctatctgagctccccaaggactgaccagggacctttccagagctcaaggatttctggacctttctaccagttgtggaccatgagagggtgggagggcccagggagggctttcgtactgctgaatgttttccagagcatatattacaatctttcaaagtcgcacactagacttcagtggtttttcgagctatagggcatcaggtggtgggaacagcaggaaaaggcattccagtctgccccactgggtctggcagccctcccgggatgggcccacatccacctccagtccctggccaggggtgagaggcagaccagcagatggacttgatccctctgtgtctttttgcttctggctggtagataatgtcaacctgcagtcttgattcccagaccctgtacactcctccttttctgttgtgtgatcagtttgtgctttattctgtatttgtctcccatgtcttgctcttctcctggagaattctgtcttctctttggccatctcaaattgagaacctaaactattcctgcagaactgcctggttggcgtccacaagcaatacctctcgttccagcaggaccaagggagccagcctccagtgagtgactccagcaagtgcagccacctctcccttgatggtctgggagcctggcctcagcaaggggccttcctgacctctggctccagtgaagctgaatgtcctcactttgtgggtcacactctttacatttctgtaaggcaatcttggcacacgtggggcttaccagtggcccaggtaattttttgtttcatggactatggactctttcaaagggatctgatccttttgattttgcacagccctagatacatcccttttgataaaagggtctttgcttctgattacaggagcactgtggaacgtctgtaaa

SEQ ID NO: 193421 - DNA, 1500 bp, Homo Sapiens; identical to SEQ ID NO: 186059

SEQ ID NO: 193422 - DNA, 753 bp, Homo Sapiens; identical to SEQ ID NO: 180869
  misc_feature (536)..(564): n is a, c, g, or t

SEQ ID NO: 193423 - DNA, 1374 bp, Homo Sapiens; identical to SEQ ID NO: 180870
  misc_feature (45)..(73): n is a, c, g, or t
  misc_feature (263)..(423): n is a, c, g, or t

SEQ ID NO: 193424 - DNA, 582 bp, Homo Sapiens
ctttgtacaaaaaagttggatttaacagatagtttctctgagatacaagtaaggaatatttagacacaaatccttgtcctatagaaacagatatacccaaatgacaaattgtttcttcataatgatcttccatttttaacactgataccactacacagtacatatgaaaacagaagctggggagaagaatgtttttttcacaattgaattgctgcatttctcaaactttgggatctatgaaagcggggagagggaacctgaatattaattatgagcacaaatttgaaggaaagaaaacaaagaaccattatctaatcaagctttgaaagtcctgcatgtttgccttttattttagtgttgacgccaacatagactgtctaaggtatttttttccccaaacacttgaatcttggtcgttggtatgtaatccactctctaaagtccagtgtactttagacttcatctgagtccaatatatgtaccacactactgttttattaatgtaaaaaccttgtaaatgaatttcagatgggtgatttaagtgagtcacaagtcaaaaaactttgctattcatagttaatc

SEQ ID NO: 193425 - DNA, 1118 bp, Homo Sapiens
ttggcgcatgatggctgcggtgccgccgggcctggagccgtggaaccgtgtgagaatccctaaggcggggaaccgcagcgcagtgacagtgcagaaccccggcgcggcccttgacctttgcattgcagctgtaattaaagaatgccatctcgtcatactgtcgctgaagagccaaaccttagatgcagaaacagatgtgttatgtgcagtcctttacagcaatcacaacagaatgggccgccacaaaccccatttggccctcaaacaggttgagcaatgtttaaagcgtttgaaaaacatgaatttggagggctcaattcaagacctgtttgagttgttttcttccaatgaaaatcagcccttaactaccaaagtatgtgttgtccccagtcagccagtggtggagttggtgttgatgaaggttttgggagcctgcaagttgttgctccgcttgttggactgctgctgcaaaacttttcttttgactgtgaaacatctaggtttgcaagagttcattattttaaaccttgtgatggttgggctggtgagcaggttatgggttctctataaaggtgtcttaaaaaggttgattttgttatatgagcctttgtttggattgcttcaagaggtcgctaggattcaaccaatgccttacttcaaagattttacctttccttctgatatcactgaatttttaggacagccatattttgaagcctttaagaaaaaaatgcctatagcttttgcagctaaaggaataaataaattgctaaataaactgtttttaataaatgagcagtcaccaagagccagtgaagaaaccttgcttggaatttcaaaaaaagctaaacaaatgaagatcaatgtacagaataatgtggatcttggacagccagtaaagaataagagagtcttcaaagaagagtcatcaaaatttgatgtgagggctttctgcaaccagctgaaacacaaagctactcacgagaccagttttgattttaaatgttctcaatccagactaaagacaaccaagtattcttctcagaaagtgataggaactcctcatgccaaaagtattgtgcaaagattccgagaggctgagtccttcacacaacttt

SEQ ID NO: 193426 - DNA, 956 bp, Homo Sapiens; identical to SEQ ID NO: 186063
  misc_feature (595)..(676): n is a, c, g, or t

SEQ ID NO: 193427 - DNA, 1508 bp, Homo Sapiens; identical to SEQ ID NO: 186064

SEQ ID NO: 193428 - DNA, 1062 bp, Homo Sapiens; identical to SEQ ID NO: 186065
  misc_feature (711)..(792): n is a, c, g, or t

SEQ ID NO: 193429 - DNA, 1079 bp, Homo Sapiens; identical to SEQ ID NO: 186067

SEQ ID NO: 193430 - DNA, 1539 bp, Homo Sapiens; identical to SEQ ID NO: 186068

SEQ ID NO: 193431 - DNA, 448 bp, Homo Sapiens
  misc_feature (228)..(250): n is a, c, g, or t
  misc_feature (326)..(340): n is a, c, g, or t
tgtacaaaaaagttggcgctaaatataccttgttttagtcttatggcatgatgatagcatatgtgttcaggtttatagctgttgtgtttaaaaattgaaaaaagtggaaaacatctttgtacatttaagtctgtattataataagcaaaaagattgtgtgtatgtatgtttaatataacatgacaggcactaggacgtctgcctttttaaggcagttccgttaagggnnnnnnnnnnnnnnnnnnnnnnngccatccatcctgtgcaatatgccgtgtagaatatttgtcttaaaattcaaggccacaaaaacaatgtttgggggnnnnnnnnnnnnnnntcatgccagctaatcatgtcaagttcactgcctgtcagattgttgatatataccttctgtaaataacttttttggggaaggaaataaaatcaggtggaattgaaccct

SEQ ID NO: 193432 - DNA, 1546 bp, Homo Sapiens; identical to SEQ ID NO: 186070
  misc_feature (365)..(471): n is a, c, g, or t
  misc_feature (573)..(586): n is a, c, g, or t
  misc_feature (982)..(998): n is a, c, g, or t
  misc_feature (1326)..(1348): n is a, c, g, or t
  misc_feature (1424)..(1438): n is a, c, g, or t

SEQ ID NO: 193433 - DNA, 1364 bp, Homo Sapiens; identical to SEQ ID NO: 180873
  misc_feature (289)..(311): n is a, c, g, or t
  misc_feature (951)..(959): n is a, c, g, or t

SEQ ID NO: 193434 - DNA, 1594 bp, Homo Sapiens; identical to SEQ ID NO: 180874
  misc_feature (185)..(215): n is a, c, g, or t

SEQ ID NO: 193435 - DNA, 1049 bp, Homo Sapiens; identical to SEQ ID NO: 180875
  misc_feature (984)..(1006): n is a, c, g, or t

SEQ ID NO: 193436 - DNA, 1290 bp, Homo Sapiens; identical to SEQ ID NO: 180876

SEQ ID NO: 193437 - DNA, 1190 bp, Homo Sapiens
ttggatcggaggccgcgcgggtggctggcagcggcctggtgcgctcgcttagcgggcgacggaatcagacggacgtggacgcccccggagtggaagccgaagcaggagttgttgttgctgaggggctgccgcagccgccgcgagcctccggacagacgccagagcgaggagggcgctacgcgacttggcaagatgacccagttcctgccgcccaaccttctggccctctttgccccccgtgaccctattccatacctgccacccctggagaaactgccacatgaaaaacaccacaatcaaccttattgtggcattgcgccgtacattcgagagtttgaggaccctcgagatgcccctcctccaactcgtgctgaaacccgagaggagcgcatggagaggaaaagacgggaaaagattgagcggcgacagcaagaagtggagacagagcttaaaatgtgggaccctcacaatgatcccaatgctcagggggatgccttcaagactctcttcgtggcgagagtgaattatgacacaacagaatccaagctccggagagagtttgaggtgtacggacctatcaaaagaatacacatggtctacagtaagcggtcaggaaagccccgtggctatgccttcatcgagtacgaacacgagcgagacatgcactccgcttacaaacacgcagatggcaagaagattgatggcaggagggtccttgtggacgtggagaggggccgaaccgtgaagggctggaggccccggcggctaggaggaggcctcggtggtaccagaagaggaggggctgatgtgaacatccggcattcaggccgcgatgacacctcccgctacgatgagaggcccggcccctccccgcttccgcacagggaccgggaccgggaccgtgagcgggagcgcagagagcggagccgggagcgagacaaggagcgagaacggcgacgctcccgctcccgggaccggcggaggcgctcacggagtcgcgacaaggaggagcggaggcgctccagggagcggagcaaggacaaggaccgggaccggaagcggcgaagcagccggagtcgggagcgggcccggcgggagcgggagcgcaaggaggagctgcgtggtggcggtggcgacatggcggagccctccgaggcgggtgacgcgccccctgatgatgggcctccagg

SEQ ID NO: 193438 - DNA, 818 bp, Homo Sapiens
ttggtgtctgtccccttccagctgctcccggtgtgaccgcgtccttccctggccgacccgaaggaagccttctggttgtctgccacttcctcctgttggactgcctgagagaggggaagagagagacctcggacctgcatgtcaagatggattttccccttttatctctgccctcctccactccctttttgtaactcccttacagcccccagacccttcttgaaacgagagccagcaagctgagcacagaccagcagcgacctcccttccagcccccagaaagctcggtcacttgagtgttttctagaatcctggggtgctcccgggccgctctcagagaagtggcaggtttcacgttcagccgtgtggcggatcgtgtggcttccaaagccttttacagcccccgccccccatcccgtggtctgtctgcaggaactctcccgtctgtgagaagcctctttccgagtcgacctcccggccaccccggccctgtgcctgctcggaagagctcactgccagctgcggcctgggcaccgcgggccatgtgtgtttgcatgaggaactctttagtggcagacacctaagagacggctgcggtcaccccacgcctccgcggctcaggagccgtcctgggtgcataggaccagtttctgtgacttttctccagttgggcatgttgacagacatgtttcccctcctcccaccctcattttcaggtcctcgcgactgagagccaggggcgacatcatgaccttctgtcccggccgccttaaccccgggtacagggaaggcagctgggccgtctctgtctgtgtccc

SEQ ID NO: 193439 - DNA, 1937 bp, Homo Sapiens; identical to SEQ ID NO: 180877

SEQ ID NO: 193440 - DNA, 1354 bp, Homo Sapiens; identical to SEQ ID NO: 186072

SEQ ID NO: 193441 - DNA, 3025 bp, Homo Sapiens; identical to SEQ ID NO: 186073
  misc_feature (430)..(742): n is a, c, g, or t
  misc_feature (746)..(774): n is a, c, g, or t
  misc_feature (1162)..(1251): n is a, c, g, or t

SEQ ID NO: 193442 - DNA, 1092 bp, Homo Sapiens
  misc_feature (970)..(1000): n is a, c, g, or t
ctttgtacaaaaaagttgggccttctttaccattggaggatgttgcatgacaggggctgcgtttggtgcaatgaatggtcttcggctaggattgaaggaaacccagaacatggcctggtccaaaccaagaaatgtacagattttgaatatggtgactaggcaaggggcactttgggctaatactctaggttctctggctttgctctatagtgcatttggtgtcatcattgagaaaacacgaggtgcagaagatgaccttaacacagtagcagctggaaccatgacaggcatgttgtataaatgtacaggtggtcttcgagggatagcacgaggtggtctgacaggactaacacttaccagcctctatgcactatataataactgggagcacatgaaaggctccttgctccaacagtcactctgaagattttgccaactcatgaatggaggacacttcagtagtcatctagatccttttataagacagtttggagttattctctctcttctacctacaattagtttgaaaaattggagattttgatttgctgtgatgaaaatcctggatggctgaccaagactggcacttgttccagccattagtgagttgaagccaaagccctttggtgactcactgagtaccatggttctgttctcctctggagatcttgcacgtatctgttttcctcccccatgaactagaaaaccacttactcccagaattcaggtcgtgcttgttagtactatatcaccaagtccattcatttaatgatccaaaactgtaatgttgcactgtattccaaataaagggtaaaaacagaaccaaagttataactccaacacacaaacatagtggttgtctcaatttaaaagtatctacctgggtataaagtgaaaggtacccttggcattttttgtcccagtgggcaaaacaacatcttcgtgtttgtgttaaaatgagctacttggnnnnnnnnnnnnnnnnnnnnnnnnnnnnnnnacctgccttggacctcccagagtgctgggattacaggcgtgagcgaccgtgcctggccagagctagatgtttttcaaggaagccttgggaaa

SEQ ID NO: 193443 - DNA, 954 bp, Homo Sapiens
ttgggcgtgtgaactaggcgctggcaacgcggggttacccgctgttattgaggagtaacggcccagcggaccacccaggcttgaggcagcggcgggaaccactcggtttgctgcgataccatggaaggaggcgggggaagcggcaacaaaaccacagggggattggccggctttttcggagccggcggagcaggttactcgcacgcggatttggctggcgtcccgctaactggtatgaaccctctgtctccttatttaaatgtggatccacgatacctcgtgcaggatacagatgagtttattttacctaccggagctaataaaacccggggcagatttgagctggccttctttacgattggaggatgttgcatgacaggggctgcgtttggtgcaatgaatggtcttcggctaggattgaaggaaacccagaacatggcctggtccaaaccaagaaatgtacagattttgaatatggtgactaggcaaggggcactttgggctaatactctaggttctctggctttgctctatagtgcatttggtgtcatcattgagaaaacacgaggtgcagaagatgaccttaacacagtagcagctggaaccatgacaggcatgttgtataaatgtacaggtggtcttcgagggatagcacgaggtggtctgacaggactaacacttaccagcctctatgcactatataataactgggagcacatgaaaggctccttgctccaacagtcactctgaagattttgccaactcatgaatggaggacacttcagtagtcatctagatccttttataagacagtttggagttattctctctcttctacctacattagtttgaaaaattggagattttgatttgctgtgatgaaaatcctggatggctgaccaagactggcacttgttccacccattagtgagttgaagccaagccctttggtga

SEQ ID NO: 193444 - DNA, 1775 bp, Homo Sapiens; identical to SEQ ID NO: 186074

SEQ ID NO: 193445 - DNA, 877 bp, Homo Sapiens
ttggcttaccttctctgtcccaacaacttctgtaaaatctgtaacatgagattgtttctgagggttaaatgagcatagcacagtggggacactgtcaggcacacactacttgccagatgtcgagtattcatctttattgaaataggactgtggtaagccactttatggctctcgattttgtatgagaaaatcatgcttagtgccttgttagtaaaagaaagaaaacctgaaagtccctgccatggaaggaagaaatagcggggagaaaagggagttggtaagtttcagcatttcagagcttggaggggcaagttaggtttctattttatggagaaggaggtggaggcaggatgggtcctaaggtgtcattcaaaacacacagccataactctttattgagagtagagctagggccccagggattgctgtgatcaagttgcggacaaaaatgaccactcgttggaagacaggagaggagtgtttagttacaaaagcagtcaacaattcaggtgtatctatattcagacagcaaataaaagttgttcaacttggttgctaatgggacccactctactgaggctttatgtagaactcatagaggaagctggcttcgaggaatgaactaccctgtgcttttcttaggactaaaatctcaggaagctggtgatgaatgaaaaccttagtcccattggcactgcacgaggggccaggagagcagcagcatcataagtcacagggtggggcagccaacgcaggggcattctgagctgttggggaggggtggcaggcagggtggggcactgtgaggtgtcggggagggcattgtgaagtgtggggtggggcattgtgtgccacatgcctgggctcccacctgggg

SEQ ID NO: 193446 - DNA, 446 bp, Homo Sapiens
ttgggtgacatttttcttttaaaaacttgcctcacccaacaaagctaggaattttcttagaatgtaagaacttgccttttcctgccctttttaactgtgggttattacagagatatcaaagacacgacggtgggcactctgtcccagcggatcacaaaccaggtccatggtttgaagggactgaactccaagcttctggatatcaggagctacctggaaaaagtcgccacaggcaagctgcccatcaaccaccagatcatctaccagctgcaggacgtcttcaacctgctgccagatgtcagcctgcaggagttcgtcaaggccttttacctgaagaccaatgaccagatggtggtagtgtacttggcctcgctgatccgttccgtggtcgccctgcacaacctcatcaacaacaagattgccaaccgggatgcagagaagccaac

SEQ ID NO: 193447 - DNA, 723 bp, Homo Sapiens
ggtttcatacaacacagtatcaaaaagtaaaaggaacacactaaatgcacaagctggtggcaagtaagtccacagcctattgtgataggtccatccagcatcaatcagatttcttctcatctgttatctcaaggttatttacagatgtgttgactaacaagagtctctcatgggaggatgggcaggcttcaatcattggtttcgggatctgtctgcgccatgtaggcatccaactcagcatccaggtgtccttttgttttcgacatatatgcatccaattggttgtccagctgctccttggtcaatacagggcgagcaagggcacctctccctcgtccacggcctcggcctcggcctccaaagccccctcttccccgacctatcataccccgacctcggagtgacatcccgcccctaagtagggttctggtggcacgtcccccacgtagtcctcctctgggcaagcctctctggattatgggtaggcctcgtcctccgattgctcccctggccagggcccctatgggtcggcctaaccgtgcctggatgttactcttacccaggcgctgctttaagctcttctggaagaaaaggtgttaggggattgagatcaaaaaagcaatccaacaggatttggcaactcaaagtgcagagaaaaagaagcaagtgagatgctggtgtgaagggagataaacctgttgtgggtgtcaaaaggatccccaa

SEQ ID NO: 193448 - DNA, 806 bp, Homo Sapiens
gattccgccacgacccctagctccacgccttagccccctctcccaggacctccacgacctcgaacaccacctcttttaagcccattcggggagctacggctcgtccacctcggagcaggttttgacctcggagtgacatcccgcccctaagtagggttctggtggcacgtcccccacgtagtcctcctctgggcaagcctctctggattatgggtaggcctcgtcctccgattgctcccctggccagggcccctatgggtcggcctaaccgtgcctggatgttactcttacccaggcgctgctttaagctctgcttaagttttaatgctgcctggacagagggtctattctccatctgctgggccagtcttctgtttctggcactggctagctgctgttgttgctgcatcgaagcccgaatattcactggcgtcggctgtttgttcttcagcatattagtaaagcgctcatttagagacatcttggtggtgctttttagcacaactttcggcgctgactgtgcagccatcttcgaatcccgagaatcgaaggaaacagacgccagtgctcctcccggggctgccaccacggctccggcaggcgggccggggaccggccgaacctgagttgacggtggaggggctcgggttagctagatgggcggttggttagatgcgtaagcggtagtatgcgagctcagttcgttgttgctggttggctgtctagtcggccgatccgtctgctcacccggcctgccctttcccccctttcgtctgcagcggccgccagctcctgctcggtgccaa

SEQ ID NO: 193449 - DNA, 1318 bp, Homo Sapiens; identical to SEQ ID NO: 180879

SEQ ID NO: 193450 - DNA, 853 bp, Homo Sapiens; identical to SEQ ID NO: 186079

SEQ ID NO: 193451 - DNA, 1233 bp, Homo Sapiens
ccaactttgtacaaaaaagttggcttgcctggaggcctacggggcccctgagcaggtcgatgacttctggagcacggccctgcaggccaagtcagtagctgtcaagaccacacgatttgcctcattccctgactacctggtcatccagatcaagaagttcaccttcggcttagactgggtgcccaagaaactggatgtgtccatcgagatgccagaggagctcgacatctcccagttgaggggcacagggctgcagcccggagaggaggagctgccagacattgccccacccctggtcactccggatgagcccaaagcgcccatgctggatgaatcagtcatcatccagctggtggagatgggattccctatggacgcctgccgcaaagctgtctactacacgggcaacagcggggctgaggccgccatgaactgggtcatgtcacacatggatgatccagattttgcaaaccccctcatcctgcctggctctagtgggccgggctccacaagcgcagcagccgacccccctcctgaggactgtgtgaccaccattgtctccatgggcttctcccgggaccaggccttgaaagcgctgcgggccacgaacaatagtttagaacgggctgtggactggatcttcagtcacattgacgacctggatgctgaagctgccatggacatctcagagggccgctcagctgccgactccatctctgagtctgtgccagtgggacctaaagtccgggatggtcctggaaagtatcagctctttgccttcattagtcacatgggcacctctaccatgtgtggtcactacgtctgccacatcaagaaagaaggcagatgggtgatctacaatgaccagaaagtgtgtgcctccgagaagccgcccaaggacctgggctacatctacttctaccagagagtggccagctaagagcctgcctcaccccttaccaatgagggcaggggaagaccacctggcatgagggagaggggctgagggatggacttcagcccctctgctctgtaccctttttccttttgtccccggcagcagggaagaagctggaggccgtgggagaatggctgggcagagcagaggggcagcgatagactctggggatggagcaggacggggacgggaggggccgggcacctgtctgtaaggagactttgttgctcccctgcccccggaaatccaagtgctctgcttctctgtgtcgcccc

SEQ ID NO: 193452 - DNA, 1123 bp, Homo Sapiens
ttggggagaagctgctgccggtgtcatggcggagctgagtgaggaggcgctgctgtcagtattaccgacgatccgggtccctaaggctggagaccgggtccacaaagacgagtgcgccttctccttcgacacgccggagtctgaggggggcctctacatctgtatgaacacgtttctgggctttgggaaacagtatgtggagagacatttcaataagaccggccagcgagtctacttgcacctccggcggacccggcgcccgaaagaggaggaccctgctacaggcactggagacccaccccggaagaagcccacgcggctggctattggtgttgaaggcggatttgaccttagcgaggagaagtttgaattagacgaggatgtgaagattgtcattttgccagattacctggagattgcccgggatggactggggggactgcctgacattgtcagagatcgggtgaccagtgcagtggaggccctactgtcggccgactcagcctcccgcaagcaggaggtgcaggcatgggatggggaagtacggcaggtgtctaagcatgccttcagcctcaagcagttggacaaccctgctcgaatccctccctgtggctggaagtgctccaagtgtgacatgagagagaacctgtggctcaacctgactgatggctccatcctctgtgggcgacgctacttcgatggcagtgggggcaacaaccacgctgtggagcactaccgagagacaggctacccgttagctgtcaagctgggcaccatcacccctgatggagctgacgtgtactcatatgatgaggatgacatggtcctggaccccagcctggctgagcacctgtcccacttcggcatcgacatgctgaagatgcagaagacagacaagacgatgactgagttggagatagacatgaaccagcggattggtgaatgggagctgatccaggagtcagtgtgccactcaagcccctgtttgggcctggctacacaggcatccggaacctgggtaacagctgctacctcaactctgtggtccaggtgctcttcagcatccctgacttccagaggaagtatgtggataagctggagaagatcttccagaatgccccga

SEQ ID NO: 193453 - DNA, 722 bp, Homo Sapiens
ctttgtacaaaaaagttggggcctaagggtgacaagatgcgagacgagttatagggcctcagggtgcacacaggatggcaggaggcatccaaaggctcctgagacacatgggtgctattggggttgggggggaggtgaggtaccagccttggatactccatggggtgggggtggaaaagcagaccggggttcccgtgtgcctgagcggaccttcccagctagaattcactccacttggacatgggccccagataccatgatgctgagcccggaaactccacatcctgtgggacctgggccatagtcattctgcctgccctgaaagtcccagatcaagcctgcctcaatcagtattcatatttatagccaggtaccttctcacctgtgagaccaaattgagctaggggggtcagccagccctcttctgacactaaaacacctcagctgcctccccagctctatcccaacctctcccaactataaaactaggtgctgcagcccctgggaccaggcacccccagaatgacctggccgcattgaggcggattgagaaggagctcccaggaggggcttctgggaagactctggtcaagaagcatcgtgtctggcgttgtggggatgaactttttgttttgtttcttccttttttagttcttcaaagatagggagggaagggggaacatgagcctttgttgctatcaatccaagaacttatttgtaca

SEQ ID NO: 193454 - DNA, 1320 bp, Homo Sapiens
ttggcggaagcgtttccaactttccagaagtttctcgggacgggcaggagggggtggggactgccatatatagatcccgggagcaggggagcgggctaagagtagaatcgtgtcgcggctcgagagcgagagtcacgtcccggcgctagcccagcccgacccaggcccaccgtggtgcacgcaaaccacttcctggccatgcgctccctcctgcttctcagcgccttctgcctcctggaggcggccctggccgccgaggtgaagaaacctgcagccgcagcagctcctggcactgcggagaagttgagccccaaggcggccacgcttgccgagcgcagcgccggcctggccttcagcttgtaccaggccatggccaaggaccaggcagtggagaacatcctggtgtcacccgtggtggtggcctcgtcgctggggctcgtgtcgctgggcggcaaggcgaccacggcgtcgcaggccaaggcagtgctgagcgccgagcagctgcgcgacgaggaggtgcacgccggcctgggcgagctgctgcgctcactcagcaactccacggcgcgcaacgtgacctggaagctgggcagccgactgtacggacccagctcagtgagcttcgctgatgacttcgtgcgcagcagcaagcagcactacaactgcgagcactccaagatcaacttccgcgacaagcgcagcgcgctgcagtccatcaacgagtgggccgcgcagaccaccgacggcaagctgcccgaggtcaccaaggacgtggagcgcacggacggcgccctgttagtcaacgccatgttcttcaagccacactgggatgagaaattccaccacaagatggtggacaaccgtggcttcatggtgactcggtcctataccgtgggtgtcatgatgatgcaccggacaggcctctacaactactacgacgacgagaaggaaaagctgcaaatcgtggagatgcccctggcccacaagctctccagcctcatcatcctcatgccccatcacgtggagcctctcgagcgccttgaaaagctgctaaccaaagagcagctgaagatctggatggggaagatgcagaagaaggctgttgccatctccttgcccaagggtgtggtggaggtgacccatgacctgcagaaacacctggctgggctgggcctgactgaggccattgacaagaacaaggccgacttgtcacgcatgtcaggcaagaaggacctgtacctggccagcgtgttccacgccaccgcctttgagttggacacagatggcaacccctttgaccaggacatctaccgggcgcga

SEQ ID NO: 193455 - DNA, 989 bp, Homo Sapiens
ctttaaaaaccaactttgtacaaaaaagttggcgcggctcgagagcgagagtcacgtcccggcgctagcccagcccgacccaggcccaccgtggtgcacgcaaaccacttcctggccatgcgctccctcctgcttctcagcgccttctgcctcctggaggcggccctggccgccgaggtgaagaaacctgcagccgcagcagctcctggcactgcggagaagttgagccccaaggcggccacgcttgccgagcgcagcgccggcctggccttcagcttgtaccaggccatggccaaggaccaggcagtggagaacatcctggtgtcacccgtggtggtggcctcgtcgctggggctcgtgtcgctgggcggcaaggcgaccacggcgtcgcaggccaaggcagtgctgagcgccgagcagctgcgcgacgaggaggtgcacgccggcctgggcgagctgctgcgctcactcagcaactccacggcgcgcaacgtgacctggaagctgggcagccgactgtacggacccagctcagtgagcttcgctgatgacttcgtgcgcagcagcaagcagcactacaactgcgagcactccaagatcaacttccgcgacaagcgcagcgcgctgcagtccatcaacgagtgggccgcgcagaccaccgacggcaagctgcccgaggtcaccaaggacgtggagcgcacggacggcgccctgttagtcaacgccatgttcttcaagccacactgggatgagaaattccaccacaagatggtggacaaccgtggcttcatggtgactcggtcctataccgtgggtgtcatgatgatgcaccggacaggcctctacaactactacgacgacgagaaggaaaagctgcaaatcgtggagatgcccctggcccacaagctctccagcctcatcatcctcatgccccatcacgtggagcctctcgagcgccttgaaaagctgctaaccaaagagcagctgaa

SEQ ID NO: 193456 - DNA, 1592 bp, Homo Sapiens; identical to SEQ ID NO: 186083
  misc_feature (155)..(175): n is a, c, g, or t
  misc_feature (842)..(869): n is a, c, g, or t
  misc_feature (984)..(1005): n is a, c, g, or t
  misc_feature (1007)..(1102): n is a, c, g, or t

SEQ ID NO: 193457 - DNA, 706 bp, Homo Sapiens
accaaaactagctttaatttgtccaaaagccacacagagttgtgtagaaactgatcctgggagggaagctgagagagtccatgatgcgcagggccaaggtgcctctagaagttctccagcaagcccaggatgcgcttttgctcgttctcccggaactccgggctccggccgtccccgatgttctctgcatactccttgatgatatgcctgacaattttgatggagcttcctcgcatgtttaggatctggtgaaccctctggcgaatctgggggacattggcattgcagatctcggccatgatgtagcagatgtgctggagaacaaagagccccgcatccaggcgccggaggtagaactcctcctcggtgtcattgtcgatgatctctcctcgccggaccatgtcgtgtttttccccttcaatcttcttgtccgccacctgcattgcacccagatatttaaaatgcaactccattagtctgtcaaccttctcactgtcattttcagtgaatttattcagaagccgggtccgctgctgccctctcaggttccgcaggagggaagccaggatcgaacagacatgctcttcatgttccttctcagtggttcccactttcttgatcttcctgggagatttcataaagaggggaaagatccaacttttttgtacaaagttccctttataagaaaagcattgctcatcaattt

SEQ ID NO: 193458 - DNA, 2398 bp, Homo Sapiens; identical to SEQ ID NO: 186086

SEQ ID NO: 193459 - DNA, 1583 bp, Homo Sapiens; identical to SEQ ID NO: 186094
  misc_feature (140)..(153): n is a, c, g, or t
  misc_feature (501)..(518): n is a, c, g, or t
  misc_feature (1351)..(1362): n is a, c, g, or t

SEQ ID NO: 193460 - DNA, 1480 bp, Homo Sapiens; identical to SEQ ID NO: 180882
  misc_feature (1030)..(1054): n is a, c, g, or t

SEQ ID NO: 193461 - DNA, 1301 bp, Homo Sapiens; identical to SEQ ID NO: 180883
  misc_feature (381)..(405): n is a, c, g, or t

SEQ ID NO: 193462 - DNA, 1886 bp, Homo Sapiens; identical to SEQ ID NO: 186096
  misc_feature (1768)..(1783): n is a, c, g, or t

SEQ ID NO: 193463 - DNA, 2864 bp, Homo Sapiens; identical to SEQ ID NO: 186100

SEQ ID NO: 193464 - DNA, 1066 bp, Homo Sapiens; identical to SEQ ID NO: 180888

SEQ ID NO: 193465 - DNA, 896 bp, Homo Sapiens
  misc_feature (709)..(719): n is a, c, g, or t
  misc_feature (722)..(722): n is a, c, g, or t
ttggcaataactcctgtagcggtggtcggctgttgggtgtggagtttcccagcgcccctcgggtccgaccctttgagcgttctgctccggcgccagcctacctcgctcctcggcgccatgaccacaaccaccaccttcaagggagtcgaccccaacagcaggaatagctcccgagttttgcggcctccaggtggtggatccaatttttcattaggttttgatgaaccaacagaacaacctgtgaggaagaacaaaatggcctctaatatctttgggacacctgaagaaaatcaagcttcttgggccaagtcagcaggtgccaagtctagtggtggcagggaagacttggagtcatctggactgcagagaaggaactcctctgaagcaagctccggagacttcttagatctgaagggagaaggtgatattcatgaaaatgtggacacagacttgccaggcagcctggggcagagtgaagagaagcccgtgcctgctgcgcctgtgcccagcccggtggccccggccccagtgccatccagaagaaatccccctggcggcaagtccagcctcgtcttgggttagctctgactgtcctgaacgctgtcgttctgtctgtttcctccatgcttgtgaactgcacaacttgagcctgactgtacatctcttggatttgtttcattaaaaagaagcactttatgtactgctgtcnnnnnnnnnnnctntttgaagaacaggtttctctctgtccttgactcttgggtctgtgggccatggcatgagtgttttctagtagtagattggagggaaagctttgtgacacttagtactgtgtttttaagaaaaaataatttggttccagatgtgttaaaaggatcttttgtactgaggtttttaac

SEQ ID NO: 193466 - DNA, 901 bp, Homo Sapiens
  misc_feature (626)..(642): n is a, c, g, or t
actttgtacaaaaaagttggcgctcctcggcgccatgaccacaaccaccaccttcaagggagtcgaccccaacagcaggaatagctcccgagttttgcggcctccaggtggtggatccaatttttcattaggttttgatgaaccaacagaacaacctgtgaggaagaacaaaatggcctctaatatctttgggacacctgaagaaaatcaagcttcttgggccaagtcagcaggtgccaagtctagtggtggcagggaagacttggagtcatctggactgcagagaaggaactcctctgaagcaagctccggagacttcttagatctgaagggagaaggtgatattcatgaaaatgtggacacagacttgccaggcagcctggggcagagtgaagagaagcccgtgcctgctgcgcctgtgcccagcccggtggccccggccccagtgccatccagaagaaatccccctggcggcaagtccagcctcgtcttgggttagctctgactgtcctgaacgctgtcgttctgtctgtttcctccatgcttgtgaactgcacaacttgagcctgactgtacatctcttggatttgtttcattaaaaagaagcactttatgtactgctgtcnnnnnnnnnnnnnnnnngaagaacaggtttctctctgtccttgactcttgggtctgtgggccatggcatgagtgttttctagtagtagattggagggaaagctttgtgacacttagtactgtgtttttaagaagaaataatttggttccagatgtgttagaggatcttttgtactgaggtttttaacactttacctgggtttaccaagcctcaactggacagaccataaacagtccacaggcaccgttcctgccaggccccaacccacagggagtc

SEQ ID NO: 193467 - DNA, 820 bp, Homo Sapiens; identical to SEQ ID NO: 186102
  misc_feature (155)..(166): n is a, c, g, or t
  misc_feature (431)..(478): n is a, c, g, or t

SEQ ID NO: 193468 - DNA, 933 bp, Homo Sapiens; identical to SEQ ID NO: 186105
  misc_feature (178)..(229): n is a, c, g, or t

SEQ ID NO: 193469 - DNA, 1345 bp, Homo Sapiens
ccaactttgtacaaaaaagttggggcctcgggatgtctctggcagatgagctcttagctgatctcgaagaggcagcagaagaggaggaaggaggaagctatggggaggaagaagaggagccagcgatcgaggatgtgcaggaggagacacagctggatctttccggggattcagtcaagaccatcgccaagctatgggatagtaagatgtttgctgagattatgatgaagattgaggagtatatcagcaagcaagccaaagcttcagaagtgatgggaccagtggaggccgcgcctgaataccgcgtcatcgtggatgccaacaacctgaccgtggagatcgaaaacgagctgaacatcatccataagttcatccgggataagtactcaaagagattccctgaactggagtccttggtccccaatgcactggattacatccgcacggtcaaggagctgggcaacagcctggacaagtgcaagaacaatgagaacctgcagcagatcctcaccaatgccaccatcatggtcgtcagcgtcaccgcctccaccacccaggggcagcagctgtcggaggaggagctggagcggctggaggaggcctgcgacatggcgctggagctgaacgcctccaagcaccgcatctacgagtatgtggagtcccggatgtccttcatcgcacccaacctgtccatcattatcggggcatccacggccgccaagatcatgggtgtggccggcggcctgaccaacctctccaagatgcccgcctgcaacatcatgctgctcggggcccagcgcaagacgctgtcgggcttctcgtctacctcagtgctgccccacaccggctacatctaccacagtgacatcgtgcagtccctgccaccggatctgcggcggaaagcggcccggctggtggccgccaagtgcacactggcagcccgtgtggacagtttccacgagagcacagaagggaaggtgggctacgaactgaaggatgagatcgagcgcaaattcgacaagtggcaggagccgccgcctgtgaagcaggtgaagccgctgcctgcgcccctggatggacagcggaagaagcgaggcggccgcaggtgaggggccctgggggtccggtaggcatgggggtcatggaggggagaagccggcgtcctcctcccagccgactccctggcgccgcccacccacccgtccccaggtaccgcaagatgaaggagcggctggggctgacggagatccggaagcaggccaaccgtatgagcttcggagagatcggaggaggacgcctaccaggagacctgggattcagcctgggccacctgggcaagtcgggc

SEQ ID NO: 193470 - DNA, 860 bp, Homo Sapiens; identical to SEQ ID NO: 180889

SEQ ID NO: 193471 - DNA, 1458 bp, Homo Sapiens; identical to SEQ ID NO: 180892
  misc_feature (938)..(951): n is a, c, g, or t
  misc_feature (955)..(971): n is a, c, g, or t

SEQ ID NO: 193472 - DNA, 1418 bp, Homo Sapiens; identical to SEQ ID NO: 180893

SEQ ID NO: 193473 - DNA, 1376 bp, Homo Sapiens; identical to SEQ ID NO: 186111
  misc_feature (571)..(621): n is a, c, g, or t
  misc_feature (871)..(927): n is a, c, g, or t

SEQ ID NO: 193474 - DNA, 1441 bp, Homo Sapiens; identical to SEQ ID NO: 186112
  misc_feature (636)..(690): n is a, c, g, or t
  misc_feature (932)..(982): n is a, c, g, or t

SEQ ID NO: 193475 - DNA, 1953 bp, Homo Sapiens; identical to SEQ ID NO: 186114

SEQ ID NO: 193476 - DNA, 917 bp, Homo Sapiens; identical to SEQ ID NO: 180894
  misc_feature (199)..(215): n is a, c, g, or t

SEQ ID NO: 193477 - DNA, 1013 bp, Homo Sapiens
ttggcttgctgaggccttctctttgctgtctcctaggactacgcccaagcaaggtttgatgcctatttccaccagaagaggaagcttggggtgtgactgtggggaggactccatccacctcatcactggactgcatggggaggcagcagagcggggtcccctctgtgcttcgactactgctcctgtggcaggaggctttgggtggctcactactgaacacatgtgtatgatactaaagacggtattaaaatggagcgacgtttatttcatctcttgtttacgatttcactaggactcagaaacgagatcgggaagcagaaatatagtgcaatagtgcaacatctctgaatccttttaatctagagaaggcatttcatatttgggggctaaggtttccagtcagatgaggcaaacagcaagagtaagcagtgttacttgcaggtactttggttaatgttgatttaaattttcatgaatgtgctggtgaacactgtgaccaggcttttgtagatggcgatgtgttatagacggtgctcactcccaagggacagcaagtgagcagagatgtactgcaaagtcgccagtcactgctgcaaggtggcctctgcctggggcctccagaagctgctcctttaccctcttggtcccatggctgaagctggagcagcggattgctctggagcagccaaggccgccagcgtgtggagcagagctctcccctcctgctgggcgtgtgtgacactgatgagtttcactgtactgcatgtgacttctcccctgcccttcctcctgatggagtgtgcagacagccatgcgtggccacgggggcagtgtgaggacctccctgtctcccggctcccctcccaggggagccagctgcttgacctagctctttgggcctctcctgccctctgctctgcctggagtgtcggatcctgtgagtaggctgggcctcccctgggcagggttctccaagggcccggtttcccggcccttacctttcctgatgcccc

SEQ ID NO: 193478 - DNA, 1024 bp, Homo Sapiens; identical to SEQ ID NO: 186117
  misc_feature (396)..(406): n is a, c, g, or t

SEQ ID NO: 193479 - DNA, 1406 bp, Homo Sapiens; identical to SEQ ID NO: 186118
  misc_feature (87)..(97): n is a, c, g, or t
  misc_feature (949)..(1011): n is a, c, g, or t
  misc_feature (1326)..(1342): n is a, c, g, or t

SEQ ID NO: 193480 - DNA, 1122 bp, Homo Sapiens; identical to SEQ ID NO: 180896
  misc_feature (167)..(188): n is a, c, g, or t
  misc_feature (853)..(867): n is a, c, g, or t
  misc_feature (898)..(906): n is a, c, g, or t

SEQ ID NO: 193481 - DNA, 1369 bp, Homo Sapiens; identical to SEQ ID NO: 180897
  misc_feature (412)..(421): n is a, c, g, or t

SEQ ID NO: 193482 - DNA, 876 bp, Homo Sapiens; identical to SEQ ID NO: 186121

SEQ ID NO: 193483 - DNA, 1500 bp, Homo Sapiens; identical to SEQ ID NO: 180898
  misc_feature (1114)..(1123): n is a, c, g, or t

SEQ ID NO: 193484 - DNA, 1094 bp, Homo Sapiens; identical to SEQ ID NO: 186122

SEQ ID NO: 193485 - DNA, 746 bp, Homo Sapiens
  misc_feature (231)..(240): n is a, c, g, or t
ttggctcttggctagattgattcagctcagaattttgactttttaaagctaagtccttgtagtcacatggttgacttgaaggatgaggtggtgtgtgcatttatgagcttttcctacccccctgaagaaacttcattggcctcctggttactcaccttgaagagagtaccatccattttagtgaaaaacacatctgtcacctaggacatgacatggttgcagttgacaggnnnnnnnnnntctcatttagttgttttagagttggtggcattcagaatagtccctcttgagaaagaattgtaaccagattccctttaaaaatgagttcccctccctttccccccaaaggactcatcctgaagcagaaggtgtggggggaaggagaaatgtaaaggcttttactttgcataaggatgggggactggggaaaaaggtgaagcgaagcccaaggacaccatgctaagggcaaaagtaagagacagtctcagaactgagagaattgtgtcttctgctttttgaagtagactgtcacactcaggcagcctgtcaatgctgaatgttaggacttctgtctccgctggagacacggcctggtgcaagtcagcgtttagtgtttgacagctttctcagcactccctgactccgtttacctttactccgcatcccattctcttactgcctatctgaagattggatgggcagagtatagtggcggtggttggtcctccccgtatgttgtccattta

SEQ ID NO: 193486 - DNA, 1337 bp, Homo Sapiens; identical to SEQ ID NO: 186123
  misc_feature (1185)..(1206): n is a, c, g, or t

SEQ ID NO: 193487 - DNA, 1774 bp, Homo Sapiens; identical to SEQ ID NO: 186126

SEQ ID NO: 193488 - DNA, 1021 bp, Homo Sapiens
gtacaaaaaagttgggggaaaattggagctcctgctgccactgctcttccggagcctgcagcatggggcccctgccgcgcaccgtggagctcttctatgacgtgctgtccccctactcctggctgggcttcgagatcctgtgccggtatcagaatatctggaacatcaacctgcagttgcggcccagcctcataacagggatcatgaaagacagtggaaacaagcctccaggtctgcttccccgcaaaggactatacatggcaaatgacttaaagctcctgagacaccatctccagattcccatccacttccccaaggatttcttgtctgtgatgcttgaaaaaggaagtttgtctgccatgcgtttcctcaccgccgtgaacttggagcatccagagatgctggagaaagcgtcccgggagctgtggatgcgcgtctggtcaaggaatgaagacatcaccgagccgcagagcatcctggcggctgcagagaaggctggtatgtctgcagaacaagcccagggacttctggaaaagatcgcaacgccaaaggtgaagaaccagctcaaggagaccactgaggcagcctgcagatacggagcctttgggctgcccatcaccgtggcccatgtggatggccaaacccacatgttatttggctctgaccggatggagctgctggcgcacctgctgggagagaagtggatgggccctatacctccagccgtgaatgccagactttaagattgcccggaggaagcaaactcttcgtataaaaaaagcaggccatctgcttaacccttggctccaccataaggcactgggactcggatttctctatctgatagaggtattttctgtggccctgggagctgtctgtctttcccctacccccaaggatgccaggaagacgtccaccattagccatgtggcaacctttacttctatgcctcacaagtgcctttcagagagccccaattctgctttccacaaaataaacctaatgccatcaagcaaacatt

SEQ ID NO: 193489 - DNA, 847 bp, Homo Sapiens
ccaactttgtacaaaaaagttggggcttttccttgtccctgctcggggagcgtgaggcagatcggccggctttgctccaggcctcaggagtggtgcaggttcgcagccctgtcaaccagctccgagccggcagcgaaacctgaagtggaccctgtggaaaatgaagctgtcgccccagaattcaccaaccggaacccccggaacctggagcttttatctgtagccaggaaagagcggggctggcggacggtgtttccctcccgtgagttctggcacaggttgcgagttataaggactcagcatcatgtagaagcacttgtggagcatcagaatggcaaggttgtggtttcggcctccactcgtgagtgggctattaaaaagcacctttatagtaccagaaatgtggtggcttgtgagagtataggacgagtgctggcacagagatgcttagaggcgggaatcaacttcatggtctaccaaccaaccccgtgggaggcagcctcagactcgatgaaacgactacaaagtgccatgacagaaggtggtgtggttctacgggaacctcagagaatctatgaataaatggaagcattaattgttttgaacatgtaaatataaatctgtcagccactacagccatcaaaagagagcatctggaagaacagccagcttggaagttttacagcaataatgttgcagtggaatattatttgtagttaaggtcatcctcctcccctttctgtttttttaaatcaagaactacgtttctgcccctctcttgggcttcaggagcatctaagaaaagcagtcatcaattataatttaccttcaaagggcaaggtcagaa

SEQ ID NO: 193490 - DNA, 358 bp, Homo Sapiens; identical to SEQ ID NO: 186134

SEQ ID NO: 193491 - DNA, 1254 bp, Homo Sapiens; identical to SEQ ID NO: 186138

SEQ ID NO: 193492 - DNA, 822 bp, Homo Sapiens; identical to SEQ ID NO: 186143

SEQ ID NO: 193493 - DNA, 910 bp, Homo Sapiens
  misc_feature (424)..(441): n is a, c, g, or t
gccaactttgtacaaaaaagttggaacaaaaagaaacttttgttcaagctgcatcttcacattgaatgaaagcattcagacgggtgactgctgctgtccacaactgtgggcggaagtgtgccttttcccagtttctcgtccaggaggttgcatagcaaatactcaagtcactgggatatatgctttccaaatgctggcccccatagcacctttccccatgtctttctaccaagcctcttatgtttaatctgtgcagggaagacaagagtagaccatattctctgtgtgctgtgcatgtcctggtgtcactcattgcctcttatctgtcgccattctaatataagtcagcttaatagttgactctgaataatgcaaaacccagcttgcttccagaatggcctaggaccctcctcctcctgccagnnnnnnnnnnnnnnnnnnggttcatgtggcataatcatctttcaaaattaaccaaatgccccagaaaatgatgttaccactaaaatattttctccaagaaggcatactgtaacagaaaagataggtaagatatttttttcccaagaagtaagaattgattgtgctgaatgttcaaactctggaaactgttcacagtatgttgttcttaactgttatttatataaagtgaattattttctctctcaatcatgccatagtggagacttttgtttgtgagtaagtgacagagtaatatgaaataatgtgatatgtcagagtgacatgcagcatcctgagcctgtttttatgttctgtgtacagtggcatttgattgagatcaaagcctgtcacagccctgctgctgggggtgtggggatatgccagagtcctgtgtttgggttttagaagtttactgaatgtttcccacatggagaataatggatgggca

SEQ ID NO: 193494 - DNA, 1901 bp, Homo Sapiens; identical to SEQ ID NO: 180903
  misc_feature (640)..(877): n is a, c, g, or t
  misc_feature (1473)..(1586): n is a, c, g, or t
  misc_feature (1742)..(1762): n is a, c, g, or t

SEQ ID NO: 193495 - DNA, 937 bp, Homo Sapiens
tttgtacaaaaaagttgggcagagctcggagcggcggaggcagagaccgaggctgcaccggcagaggctgcggggcggacgcgcgggccggcgcagccatggtgaagattagcttccagcccgccgtggctggcatcaagggcgacaaggctgacaaggcgtcggcgtcggcccctgcgccggcctcggccaccgagatcctgctgacgccggctagggaggagcagcccccacaacatcgatccaagagggggggctcagtgggcggcgtgtgctacctgtcgatgggcatggtcgtgctgctcatgggcctcgtgttcgcctctgtctacatctacagatacttcttccttgcgcagctggcccgagataacttcttccgctgtggtgtgctgtatgaggactccctgtcctcccaggtccggactcagatggagctggaagaggatgtgaaaatctacctcgacgagaactacgagcgcatcaacgtgcctgtgccccagtttggcggcggtgaccctgcagacatcatccatgacttccagcggggtctgactgcgtaccatgatatctccctggacaagtgctatgtcatcgaactcaacaccaccattgtgctgccccctcgcaacttctgggagctcctcatgaacgtgaagagggggacctacctgccgcagacgtacatcatccaggaggagatggtggtcacggagcatgtcagtgacaggaggccctggggtccttcatctaccacctgtgcaacgggaaagacacctaccggctccggcgccgggcaacgcggaggcggatcaacaagcgtgggggcaagaactgcaatgccatccgccacttcgagaacaccttcgtggtggagacgctcatctgcggggtggtgtgaggccctccttccccaaaacccctgccgtggttcctc

SEQ ID NO: 193496 - DNA, 950 bp, Homo Sapiens; identical to SEQ ID NO: 186157
  misc_feature (680)..(702): n is a, c, g, or t

SEQ ID NO: 193497 - DNA, 896 bp, Homo Sapiens; identical to SEQ ID NO: 186158
  misc_feature (183)..(205): n is a, c, g, or t

SEQ ID NO: 193498 - DNA, 835 bp, Homo Sapiens; identical to SEQ ID NO: 186159
  misc_feature (610)..(632): n is a, c, g, or t

SEQ ID NO: 193499 - DNA, 766 bp, Homo Sapiens; identical to SEQ ID NO: 186163
  misc_feature (59)..(75): n is a, c, g, or t

SEQ ID NO: 193500 - DNA, 773 bp, Homo Sapiens; identical to SEQ ID NO: 180910

SEQ ID NO: 193501 - DNA, 946 bp, Homo Sapiens
actttgtacaaagtatctgggcagaagtaggcacagcatcttgcaactcttcgtaacggcagacgctggccctctcctacgacgcagtgacctccttggttgggtcctctccctagccctggtgcaggccaagcattttatacataccctcgctgccaggctgctcagagtcccgcccacatatgagacaggcactggctgaagacaggcaactctcgtcccaaccatcattcaccctgagtgacgtacttcatcctccaatgactggacaactgcgatgccttttcctcccttttcctgtacactcccagcaacaaactcctcatgataactgcacacaatctgaaaaccactgaaggacaagccaaccacagcagccaagcccactccttgcagcatgggtactggtggcacaccagacagtgacactgccccacaaaggcctgggcccgtgggggctgctgcctggcatgacatctctccagatttctggcttaaaaccaactttccatccgagaagcctcctcagtagttactctgctcatgagacagatctgggctccaagccaggaaaggtgaacagaaaccacaagtgtccagccctcggtgctggagtggacgttaattgtcagccaccagactgtcccggcacctacagagaatgtttcacagttctggcatttaaatcctttgatagtggattgtgctgctgttagccttagtttcagtgctttacaagtctcgcttattatctcattggtatttaggtatacaaaacagttgattattcaccacgccaatatctgggtctctgtatctcatgtagaacataagaaaatgggaactaatagggaacctttattttatagcatgaaaataaacctgggtgctggagtctagcttgtactgtccacatgatttcttctttttgcatgcaaagcttact

SEQ ID NO: 193502 - DNA, 862 bp, Homo Sapiens; identical to SEQ ID NO: 186165

SEQ ID NO: 193503 - DNA, 889 bp, Homo Sapiens; identical to SEQ ID NO: 186168
  misc_feature (185)..(199): n is a, c, g, or t

SEQ ID NO: 193504 - DNA, 559 bp, Homo Sapiens
  misc_feature (258)..(272): n is a, c, g, or t
ctttgtacaaaaaagttggaataagtccatctgatgtattttcggtgtttaaaaaatgagcccagttgctcaactgtttggttgaaaaccttgctcattttttaatgcgaaggctaagtgtcaccccctttctctgcctctggctgggccttgctaagggccaaggaaagaaagacattttttagggggcagccagtccaaatgccaaaagaagaccagttcttgccctgattgtatgaaatttgacattttggcacnnnnnnnnnnnnnnnggccaatcagattttctatgttctaaggacatggctgctgtagaatagcacagacgtggatgataaattatccccagaagcagcatgacagaatgcctcggggagcacttggaagggaaattgcagttctgttgaaatagaggaaaatcccttggtaaagacacagcctgttaggctcgtgtgggcctccagtatgttcaccaggggaatggctgggatttctcggcactctgcatcatccatcttttcttataggtgggaaaataaacaactttgtgatcctcctg

SEQ ID NO: 193505 - DNA, 1732 bp, Homo Sapiens; identical to SEQ ID NO: 186172
  misc_feature (1580)..(1592): n is a, c, g, or t

SEQ ID NO: 193506 - DNA, 1240 bp, Homo Sapiens
ctttgtacaaattggctcgcgctttcgctcgccctctcctcgaggatcgaggggactctgaccacagcctgtggctgggaagggagacagaggcggcggcggctcaggggaaacgaggctgcagtggtggtagtaggaagatgtcgggcgaggacgagcaacaggagcaaactatcgctgaggacctggtcgtgaccaagtataagatggggggcgacatcgccaacagggtacttcggtccttggtggaagcatctagctcaggtgtgtcggtactgagcctgtgtgagaaaggtgatgccatgattatggaagaaacagggaaaatcttcaagaaagaaaaggaaatgaagaaaggtattgcttttcccaccagcatttcggtaaataactgtgtatgtcacttctcccctttgaagagcgaccaggattatattctcaaggaaggtgacttggtaaaaattgaccttggggtccatgtggatggcttcatcgctaatgtagctcacacttttgtggttgatgtagctcaggggacccaagtaacagggaggaaagcagatgttattaaggcagctcacctttgtgctgaagctgccctacgcctggtcaaacctggaaatcagaacacacaagtgacagaagcctggaacaaagttgcccactcatttaactgcacgccaatagaaggtatgctgtcacaccagttgaagcagcatgtcatcgatggagaaaaaaccattatccagaatcccacagaccagcagaagaaggaccatgaaaaagctgaatttgaggtacatgaagtatatgctgtggatgttctcgtcagctcaggagagggcaaggccaaggatgcaggacagagaaccactatttacaaacgagacccctctaaacagtatggactgaaaatgaaaacttcacgtgccttcttcagtgaggtggaaaggcgttttgatgccatgccgtttactttaagagcatttgaagatgagaagaaggctcggatgggtgtggtggagtgcgccaaacatgaactgctgcaaccatttaatgttctctatgagaaggagggtgaatttgttgcccagtttaaatttacagttctgctcatgcccaatggccccatgcggataaccagtggtcccttcgagcctgacctctacaagtctgagatggaggtccaggatgcagagctaaaggcctcctccagagttctgcaagtcgaaaaacccag

SEQ ID NO: 193507 - DNA, 812 bp, Homo Sapiens
  misc_feature (118)..(129): n is a, c, g, or t
ttggagaaaatcagccaaagaaaatccagtagttgttggtgaaaagatccaaaagatttgaactcctgctggaatacaaaattcttgagcatctgcaaactaaaaattgacttgaggnnnnnnnnnnnncctagtcattgggaatgtagagcagtgtatcttgcatgtcatcggaagaatagatttttgttttggttttgttttgaaaatgactctgaacatttatttccattgcaatttctgtggctgaggagacttaaactttacaagtattatccttttaagatcattttaattttagttgagtgcagagggcttttataacaaacgtgcagaaattttggagggctgtgatttttccagtattaaacatgcatgcattaatcttgcagtttattttctcattgtgtatgtatatatcgcttttctctgcagcacgatttctcttttgataatgccctttagggcacaactagttatcagtaactgaatgtatcttaatcattatggctgcttctgttttttcattaacaaaggttattcatatgttagcatatagtttctttgcacccactatttatgtctgaatcatttgtcacaagagagtgtgtgctgatgagattgtaagtttgtgtgtttaaacttttttttgagcgagggaagaaaaagctgtatgcatttcattgctgtctacaggtttctttcagattatgttcatgggtttgtgtgtatacaatatgaagaatgatctgaagtaattgtgctgtatttatgtttattcaccagtctttgattaaataaaaaggaaacca

SEQ ID NO: 193508 - DNA, 925 bp, Homo Sapiens
ttggattcctgcctttctttatttcctggataacttgattgtcttctatgtcctgtcctatcttcaaccagccatggctgttatcttctcaaattttagcattataacaacagctcttctattcaggatagtgctgaagaggcgtctaaactggatccagtgggcttccctcctgactttatttttgtctattgtggccttgactgccgggactaaaactttacagcacaacttggcaggacgtggatttcatcacgatgcctttttcagcccttccaattcctgccttcttttcagaagtgagtgtcccagaaaagacaattgtacagcaaaggaatggacttttcctgaagctaaatggaacaccacagccagagttttcagtcacatccgtcttggcatgggccatgttcttattatagtccagtgttttatttcttcaatggctaatatctataatgaaaagatactgaaggaagggaaccagctcactgaaagcatcttcatacagaacagcaaactctatttctttggcattctgtttaatgggctgactctgggccttcagaggagtaaccgtgatcagattaagaactgtggatttttttatggccacagtgcattttcagtagcccttatttttgtaactgcattccagggcctttcagtggctttcattctgaagttcctggataacatgttccatgtcttgatggcccaggttaccactgtcattatcacaacagtgtctgtcctggtctttgacttcaggccctccctggaatttttcttggaagccccatcagtccttctctctatatttatttataatgccagcaagcctcaagttccggaatacgcacctaggcaagaaaggatccgagatctaagtggcaatctttgggagcgttccagtggggatgga

SEQ ID NO: 193509 - DNA, 1367 bp, Homo Sapiens; identical to SEQ ID NO: 186180
  misc_feature (80)..(91): n is a, c, g, or t

SEQ ID NO: 193510 - DNA, 1495 bp, Homo Sapiens; identical to SEQ ID NO: 186181
  misc_feature (57)..(68): n is a, c, g, or t
  misc_feature (1312)..(1343): n is a, c, g, or t

SEQ ID NO: 193511 - DNA, 1069 bp, Homo Sapiens; identical to SEQ ID NO: 186182
  misc_feature (800)..(812): n is a, c, g, or t

SEQ ID NO: 193512 - DNA, 976 bp, Homo Sapiens
  misc_feature (803)..(814): n is a, c, g, or t
aaagcagggaaacggctgagatagtttaattacaccaactctactatgcagcatccctttatcaaaaggaaaaatataaagtctataaaaaatattttagtattgcaaactgctgcaataatttattgtaggcaaatggtagctataaagagggtccttgacccctaaaagaaaagaaaaagtacagcaagtttctaattagtagaactaactagttgtttttttgttgggagagcggtataggaaaggagaatacattttctcccatctcagaaagatttttaaaaatgcagtttgcttttgtgtaggtggctaaaatatctgatgactaaccactgcaaatgaaatttacggagacaaaggataagtgtaacaaaaaagctaagtgtggaatatagatgctagttagtcaaaaagtgtaaaagggacctgagaggaggacaacttttttgtagattcatctaatcaatcttgtattttcaaatctagtcaatataccaaagtcgactccaaaccatgttggcaggaaagcatattctacatcccttctatctttattccattttctatccccatattatggagaaatggcaaatctgcaacactctgaaaagaaacaatagcgcatttgagactggtgattgtaggtgtctcactctctgttccctggcatcccaaatgctgacactagttggtataaagtaagcctctttcagaaatgacattttgttactcctctttttgggaaaaaagaattctttgaaaaaattgataagccatgtttgtgaaacacaaactgttcnnnnnnnnnnnnccagcaaaacgtcattctttccaagagccatcatgcatttctgacaataaacaatgaatagggtaagccttcgattctagcttctgaggcacacaggataggaattactctttacctgaagatgattctctaaagataggatttggccaacttttttgtaca

SEQ ID NO: 193513 - DNA, 1547 bp, Homo Sapiens
tgtacaaaaaagttggcacacaagaggaccttgaaaaaagaaacaggctctggcccacccatatctggagcagtattacgacccgagtgactagcccatcgccaaagcaccattcaagttcgacatggaattggatgacttgcctaaggaaaagctcaaagaactaatttttgaagagactgctagattccagccaggatacagatcttaaatttgtcaggacaagggctcagaggactggacgtgctcagacatcggtgttcttcttcccagttcttgacccctggtcctgtctccagcccgtcttggcttatccactttgactcctttgagccttttggaggggcggtttctggtagttgtggcttttatgctttcaaagaatttcttcagtccagagaattcctcctggcagccctgtgtgtgtcacccattggtgacctgcggcagtatgtacttcagtgcacctactgcttactgttgctttagtcactaattgctttctggtttgaaagatgcagtggttcctccctctcctgaatccttttctacatgatgccctgctgaccatgcagccgcaccagagagagattcttccccaattggctctagtcactggcatctcactttatgatagggaaggctactacctagggcactttaagtcagtgacagccccttatttgcacttcaccttttgaccataactgtttccccagagcaggagcttgtggaaataccttggctgatgttgcagcctgcagcaagtgcttccgtctccggaatccttggggagcacttgtccacgtcttttctcatatcatggtagtcactaacatatataaggtatgtgctattggcccagcttttagaaaatgcagtcatttttctaaataaaaaggaagtactgcacccagcagtgtcactctgtagttactgtggtcacttgtaccatatagaggtgtaacacttgtcaagaagcgttatgtgcagtacttaatgtttgtaagacttacaaaaaaagatttaaagtggcagcttcactcgacatttggtgagagaagtacaaaggttgcagtgctgagctgtgggcggtttctggggatgtcccagggtggaactccacatgctggtgcatatacgcccttgagctacttcaaatgtgggtgtttcagtaaccacgttccatgcctgaggatttagcagagaggaacactgcgtctttaaatgagaaagtatacaattctttttccttctacagcatgtcagcatctcaagttcatttttcaacctacagtataacaatttgtaataaagcctccaggagctcatgacgtgaagcactgttctgtcctcaagtactcaaatatttctgatactgctgagtcagactgtcagaaaaagctagcactaactcgtgtttggagctctatccatattttactgatctctttaagtatttgttcctgccactgtgtactgtggagttgactcggtgttctgtcccagtgcggtgcctcctcttgacttccccactgctctctgtg

SEQ ID NO: 193514 - DNA, 1558 bp, Homo Sapiens
  misc_feature (1499)..(1512): n is a, c, g, or t
ttggggcatgagccaccacgcctggctccctgttcttttcaatgtctccgtgccatcagtcagcagtgcttacatgtttagcatattgtcatgcagtttctcttctgttcccacgagatatttttgggcaaaaaattgacaaaagtacatgtgtttttccccacctatcccttagaaaacctaatgtgtactgctatttttaaaaccaaaaagagacagcgtgacgatgcgtaaagcatttttcttagcctttcctttgtcttgatctgttaatgagaacaaaactgccagactcaaaatactctactattgtgctgaaagaaatacaatttagattgcacaaaatttgaaaatataactcagctgtcttttaaaagagttgtgttgttatctacaagactattagcagtcttttttcagagcaaattttaacagctagttgtgagtggtttaaaatatagaaaattattaaaatcttagtttgaggggttttatagtgggagaaaaaacaggaccaaagtttatgtgccttcttcagtagtcttaattgaccttttcttcctatttgagactaaagtagtatcagtattctggttttcaggaaatatgtactatatagttttaaaagaatgttgtcccaccaactattcatccaagcaaagaattgtaactataaataaagtctcagttacacttttgcctttatcacataatattcattgtagagcattgtgcaggtccaagaatagagctgctcaaaatctttgtggtagtttccttagtttttgtaacctgaggcatatgttccagagaacagggatatttgtctggtccagtgaccttggtgatcatagtcataattgaaagatgcctatggcatgcttaaatcagcattgtcaactgatttgttgttgtattattttcacttcttggatctatgtagtagttgtaataacaaatatttaaatagctatttttttgatgccattaaaaaaatcatactctggccttttttcccccttactgttgtttcccagatcttttaaaaattcatcccatatccagaaagtaccagttataaagattgctgaccaagcaaagttttgcatcaaagtgtcacctcattgctctgaccaaagactgactgttgtggttttaactcctctctgtaaagcattttgcattttccccaagctcctttctgaaagaagaaccagtgcagagcggcctttactttcaatttctactgctgaatagactacttagagaaaatgtgagtttcagtgtgaacagaatggattaggatgacgagtttgatgggcattttcagtactgtatctaagaaaataaaaatagcacagctaggagcctctgacattgtctggtgttttacgtggtctgttcatcaaatttcccctttttcagtttttaagaaatgttcgtctaacagaagaaaaatgctgtaaatatttgtaacaacattttttttaaacaagccnnnnnnnnnnnnnnggtttttgggaacaaatgaacttataaaagtggttttatataaaac

SEQ ID NO: 193515 - DNA, 1501 bp, Homo Sapiens; identical to SEQ ID NO: 186191
  misc_feature (327)..(390): n is a, c, g, or t
  misc_feature (923)..(969): n is a, c, g, or t

SEQ ID NO: 193516 - DNA, 1060 bp, Homo Sapiens; identical to SEQ ID NO: 186192
  misc_feature (101)..(118): n is a, c, g, or t
  misc_feature (705)..(735): n is a, c, g, or t
  misc_feature (764)..(827): n is a, c, g, or t

SEQ ID NO: 193517 - DNA, 1337 bp, Homo Sapiens
tatgacagagtcatgatgagaccactatacagccattacggaatgaactagatccatacgtcaacatagcacaactgaagggcaaaatagagtgtgaacaagcaagtttcaagatttctttaagtgtgaccgcaacaagggaaaacatggcttatactgtggaatgcctgcggggtgatgttgatattctaatggagttcctgctcaatgtcaccacagcaccagaatttcgtcgttgggaagtagctgaccttcagcctcagctaaagattgacaaagctgtggcctttcagaatccgcagactcatgtcattgaaaatttgcatgcagcagcttaccggaatgccttggctaatcccttgtattgtcctgactataggattggaaaagtgacatcagaggagttacattacttcgttcagaaccatttcacaagtgcaagaatggctttgattggacttggtgtgagtcatcctgttctaaagcaagttgctgaacagtttctcaacatgaggggtgggcttggtttatctggtgcaaaggccaactaccgtggaggtgaaatccgagaacagaatggagacagtcttgtccatgctgcttttgtagcagaaagtgctgtcgcgggaagtgcagaggcaaatgcatttagtgttcttcagcatgtcctcggtgctgggccacatgtcaagaggggcagcaacaccaccagccatctgcaccaggctgttgccaaggcaactcagcagccatttgatgtttctgcatttaatgccagttactcagattctggactctttgggatttatactatctcccaggccacagctgctggagatgttatcaaggctgcctataatcaagtaaaaacaatagctcaaggaaacctttccaacacagatgtccaagctgccaagaacaagctgaaagctggatacctaatgtcagtggagtcttctgagtgtttcctggaagaagtcgggtcccaggctctagttgctggttcttacatgccaccatccacagtccttcagcagattgattcagtggctaatgctgatatcataaatgcggcaaagaagtttgtttctggccagaagtcaatggcagcaagtggaaatttgggacatacaccttttgttgatgagttgtaatactgatgcacacattacaggagagagctgaacgttctctcagcccagagcagcaaacacatgaaagtcagaagtctctaatatatcatttgtcttttttccagtgaggtaaaataaggcataaatgcaggtaattattcccagctgacctaaagtcaataaaacattctgtttaagtgtttt

SEQ ID NO: 193518 - DNA, 973 bp, Homo Sapiens
ttggctcccggcctccgccaccatcttgctttcctttaatccggcagtgaccgtgtgtcagaacaatcttgaatcatgaagctactaaccagagccggctctttctcgagattttattccctcaaagttgcccccaaagttaaagccacagctgcgcctgcaggagcaccgccacaacctcaggaccttgagtttaccaagttaccaaatggcttggtgattgcttctttggaaaactattctcctgtatcaagaattggtttgttcattaaagcaggcagtagatatgaggacttcagcaatttaggaaccacccatttgctgcgtcttacatccagtctgacgacaaaaggagcttcatctttcaagataacccgtggaattgaagcagttggtggcaaattaagtgtgaccgcaacaagggaaaacatggcttatactgtggaatgcctgcggggtgatgttgatattctaatggagttcctgctcaatgtcaccacagcaccagaatttcgtcgttgggaagtagctgaccttcagcctcagctaaagattgacaaagctgtggcctttcagaatccgcagactcatgtcattgaaaatttgcatgcagcagcttaccggaatgccttggctaatcccttgtattgtcctgactataggattggaaaagtgacatcagaggagttacattacttcgttcagaaccatttcacaagtgcaagaatggctttgattggacttggtgtgagtcatcctgttctaaagcaagttgctgaacagtttctcaacatgaggggtgggcttggtttatctggtgcaaaggccaactaccgtggaggtgaaatccgagaacagaatggagacagtcttgtccatgctgcttttgtagcagaaagtgctgtcgcgggaagtgcagaggcaaatgcatttagtgttcttcagcatgtcctcggtgctgggccacatgtca

SEQ ID NO: 193519 - DNA, 3096 bp, Homo Sapiens; identical to SEQ ID NO: 186193

SEQ ID NO: 193520 - DNA, 1808 bp, Homo Sapiens; identical to SEQ ID NO: 186196
  misc_feature (267)..(280): n is a, c, g, or t

SEQ ID NO: 193521 - DNA, 1339 bp, Homo Sapiens; identical to SEQ ID NO: 186197
  misc_feature (309)..(364): n is a, c, g, or t
  misc_feature (872)..(885): n is a, c, g, or t

SEQ ID NO: 193522 - DNA, 1243 bp, Homo Sapiens; identical to SEQ ID NO: 186198
  misc_feature (88)..(101): n is a, c, g, or t
  misc_feature (1018)..(1031): n is a, c, g, or t

SEQ ID NO: 193523 - DNA, 983 bp, Homo Sapiens; identical to SEQ ID NO: 186201

SEQ ID NO: 193524 - DNA, 2136 bp, Homo Sapiens; identical to SEQ ID NO: 186202

SEQ ID NO: 193525 - DNA, 603 bp, Homo Sapiens
  misc_feature (73)..(83): n is a, c, g, or t
  misc_feature (172)..(181): n is a, c, g, or t
ttggcagtgatcctaattgtatcacattataagaaagcactctgtggatcaacataagtgggtacacaagaannnnnnnnnnncttggtgtatgtaagcacatttgttcctttatatctgtttacaaaactgtgaatcaaaaagacaaaactttcttcctagtttttgtaannnnnnnnnngaactagcatgactgtagggttgagctacagtcaacaaaaattgggctaagtcacttttccccaggaaagaatatttccctctcctgcatcaagtctgcgtggccatcctccccccaccatccaagactattaggttttgtccctgcacccttcactggcatcctcaatcattaaccttctgaaagctcacagtacacattagtatgtataactggctttaccaaattgaatgaaaaggagcttgtgcaaaaaaatttaaaaatggatgtcaagatgttatgtaaaagatgagtgtaattgtgaaatgttctatacactatcaaatatataaagctttctatattgaatgtacattatacagatcattcatatgtgtacataaaattttaaaaataaagggaattgactgctttgttaatga

SEQ ID NO: 193526 - DNA, 1614 bp, Homo Sapiens; identical to SEQ ID NO: 186204
  misc_feature (176)..(184): n is a, c, g, or t
  misc_feature (1299)..(1321): n is a, c, g, or t

SEQ ID NO: 193527 - DNA, 1327 bp, Homo Sapiens
ttggcttgggtccttgatcctgagctgaccgggtagccatggccttgcggctcctgaagctggcagcgacgtccgcgtccgcccgggtcgtggcggcgggcgcccagcgcgtgagaggaattcatagcagtgtgcagtgcaagctgcgctatggaatgtggcatttcctacttggggataaagcaagcaaaagactgacagaacgcagcagagtgataactgtagatggcaatatatgtactggaaaaggcaaacttgcaaaagaaatagcagagaaactaggcttcaagcactttcctgaagcggggattcattatccagacagtaccacaggagatgggaagcccctcgccaccgactataatggcaactgtagtttggagaaattttacgatgatccgagaagcaatgatggcaacagttaccgcctgcagtcctggttgtacagcagtcgcctgctgcagtactcagatgccttggagcacttgctgaccacaggacaaggtgttgtgttggagcgctccatcttcagtgactttgtgttcctggaggcgatgtacaaccagggattcatccgaaagcagtgtgtggaccactacaacgaggtgaagagcgtcaccatctgcgattacctgcccccccacctggtgatttacatcgatgtgcccgttccagaggtccagaggcggattcagaagaaaggagatccacatgaaatgaagatcacctctgcctatctacaggacattgagaatgcctataagaaaacctttctccctgagatgagtgaaaaatgtgaggttttacaatattctgcaagggaagctcaagattcaaaaaaggtggtagaggacattgaatacctgaagttcgataaagggccgtggctcaagcaggacaatcgcactttataccacctgcgattactggttcaggataagtttgaggtgctgaattacacaagcattcctatctttctcccggaagtcaccattggagctcatcagactgaccgtgtcttacatcagttcagagagctgccgggccgcaagtacagccctgggtacaacaccgaggtgggagacaagtggatctggctgaagtgaacgggccgccttctgctccagctgcatcacagtgatggccaagctgcatcagccgcactctcctggacgccatatatctttaagatcgggggagggtaaataatgcaaaaattgcacagtggaagaaggggtctcacaaaaagcaatccatcctgtagtataggtaatggaattgggggaagcagcttccattctgggatgtttggaaccctttagctttg

SEQ ID NO: 193528 - DNA, 1327 bp, Homo Sapiens; identical to SEQ ID NO: 186208
  misc_feature (575)..(595): n is a, c, g, or t

SEQ ID NO: 193529 - DNA, 943 bp, Homo Sapiens; identical to SEQ ID NO: 186209

SEQ ID NO: 193530 - DNA, 1237 bp, Homo Sapiens
  misc_feature (295)..(354): n is a, c, g, or t
  misc_feature (456)..(499): n is a, c, g, or t
ttggctttagtagaaacagacaaaagtaaggaaacgataataggacaagcatacttgaaaatttctgaatacttaaacaaaagcgcaacatcttgaaaaccagtctagtcattgaaacctatgaaatgacactgaaagatcctgggctgcttcttaaataagtagatcagcaagacttgtttcagagtgacagtggagtcgttaccgctggaggactaaagggccctgtggcagctgtcactggaactttgcctcttgatcaggaaaaatgcttcaccagtccgtaaagccaagnnnnnnnnnnnnnnnnnnnnnnnnnnnnnnnnnnnnnnnnnnnnnnnnnnnnnnnnnnnngactatatattttaaaaaaatctaagcagggggacatgcaaaaacaatcatcatccacttggatgtcattttatagattaacactgtgtgcttttgtatggnnnnnnnnnnnnnnnnnnnnnnnnnnnnnnnnnnnnnnnnnnnntcatttgcacttacgtgaaacacaaactttgctctacaaaatttcgtgtttcttagtgattttaaaatgcatgtattgcatgtaaaggaaaaccattacaattaatgtttatcacacctttatcttggtctttgttgatttgggttttgttggggtttttgttactgtttttaaattacagtaggcttctatatatcctggatttctgaactggtcttgttgacaaggattcccaagaaatggatcttttcactggctgactctcccatatctgcaagagattctgcaggaactgggtgtgcacacggtgttgtagccagttcaggtactgaatatttaggatttggtgaagttcactgtattgctatatttttgtagataaataaaactcaataaattgttaatcattctctttttgctgtatagaattgcttatatcactctttctttcatgacattggttaacatttaaatgttcctcctgtacttgtgttgtctgtgaccgcttatagagttttattgttattggtgtttacctgaatacctatgcgtacacacacacatatttccttaatacttctgaactcattatcttttagaataataatactactacactttaccagcaattaacttctccctacccaaaatgtttttcttcctgtctgaaaatggaactaatttgtcttattcgtgcttatatctgtattaaatgcaataaagttagtttttgaaatg

SEQ ID NO: 193531 - DNA, 648 bp, Homo Sapiens; identical to SEQ ID NO: 186214
  misc_feature (111)..(124): n is a, c, g, or t

SEQ ID NO: 193532 - DNA, 1870 bp, Homo Sapiens; identical to SEQ ID NO: 186216

SEQ ID NO: 193533 - DNA, 1290 bp, Homo Sapiens; identical to SEQ ID NO: 186217

SEQ ID NO: 193534 - DNA, 892 bp, Homo Sapiens
ttgggcccattgacgtccagcgaagcgaggagcagcgatggacggtcgggtgcagctgataaaggccctcctggccttgccgatccggcctgcgacgcgtcgctggaggaacccgattccctttcccgagacgtttgacggcgataccgaccgactcccggagttcatcgtgcagacgggctcctacatgttcgtggacgagaacacgttctccagcgacgccctgaaggtgacgttcctcatcacccgcctcacagggcccgccctgcagtgggtgatcccctacatcaagaaggagagccccctcctcaatgattaccggggctttctggccgagatgaagcgagtctttggatgggaggaggacgaggacttctaggccgggagaccctcgggcctgggggcgggtgctctggggagggtccgctgtgttactggccgccgccagggtcgccaccggcgccctccctccgcgcctccctccccctcgagccgccgcgatgtcccctgcgctcctgttccctcccgcgtagtgcttgcctttgttccaggaatagcgctccaggctcctgctgccgcccctgggcctcactctggagcgagccgccgccctctccttccagccagccagcccctcccatgtacatttggacgctgtcctgcgctccagctgcaagctgggctcctgttacacactggacagaccacccactgccgccgctgccaagccctctcctccccaccagactgccagacgactacatcattctgcccacagacctgcgctgccacagccatcgccatccatcgcatcccaccgacagactgctgctcctagtgatctggactcacctcggaggtatctgggctggccacagtccctggacagtga

SEQ ID NO: 193535 - DNA, 1579 bp, Homo Sapiens; identical to SEQ ID NO: 186223
  misc_feature (119)..(129): n is a, c, g, or t
  misc_feature (1346)..(1369): n is a, c, g, or t

SEQ ID NO: 193536 - DNA, 1323 bp, Homo Sapiens
  misc_feature (127)..(137): n is a, c, g, or t
  misc_feature (423)..(432): n is a, c, g, or t
  misc_feature (898)..(921): n is a, c, g, or t
aattttaccagtaagaaagccgatagttagttcaattcaaattggagttcataagttagtaatttaaatcgtagacaaagttacagaaagtgcatcttcttattttccatcttcatacaatgttaannnnnnnnnnnggtgtttataccttttaaaaaataaaaacagccaaatacttaagcaatatgtacatttaaatttttggtggtggtttgtgttttaaaagaaacagcttccttacgatttgcctcaagttctggtggaaatgcttacaggaactagctaataaacaaaaaacaagagaagcacattcaaaatactgatttactttggtagcaaatggtttttctttgaagactaatgaagatagacaagacccattaaggtgaagtggactatttcaaatattcaacagtttacatnnnnnnnnnntcttttaagagctaagcgtctgtatccacggatagcaatgcaatacctagtttatgatgacttgaaacaaaacaaatgcccataaggaaaaaagctgtattttatctaaatttactttcagtcaatagttcagtaacattttcttcccaatacaatactccctctctctataaggctgttcctgggagccagacaagtttaggtaataagggagttaagagagttaactgcttgcagttttaaatagacagtaactttgcttccctcttaatgtgctaatagttgtgtctaaaaaaaatatgcaattcttaaaaaggtaccatttctgatttctttattatctgtaacctttggaaactaatcacatgaaactacaaaattagcaaatgtcttgaaatctgtatataaaacataaattacctctaatttcaaactctcatttattagtgtaccactcaatcttttnnnnnnnnnnnnnnnnnnnnnnnngcggctccaaagatagtcttataccattctttaaaaaaggaaactgttccttttaactttacacccaccccacaccccaatttcaaaacatcatttaattgtcttggtcatggacatttccaagatgagattttatatttcgctcccacagcttctggttatcagaaaacccatgctttcctttattgaaggagtttggtccagctgatgttggtgtatcccttccaatattcttcatcctcatctttgcttctggaggcatttcctctggttcactatcttcatcttcattaaaagctgctgctactgaaagagtttttggagcaagagttggaacagtttctttaggcttacttgatccaagtttgatggatatggctgatgctttctttgtcgtcccaa

SEQ ID NO: 193537 - DNA, 846 bp, Homo Sapiens; identical to SEQ ID NO: 186224
  misc_feature (42)..(51): n is a, c, g, or t

SEQ ID NO: 193538 - DNA, 1203 bp, Homo Sapiens
  misc_feature (363)..(372): n is a, c, g, or t
  misc_feature (658)..(668): n is a, c, g, or t
  misc_feature (927)..(984): n is a, c, g, or t
actttgtacaaaaaagttggagataataaagaaatcagaaatggtacctttttaagaattgcatatttttttagacacaactattagcacattaagagggaagcaaagttactgtctatttaaaactgcaagcagttaactctcttaactcccttattacctaaacttgtctggctcccaggaacagccttatagagagagggagtattgtattgggaagaaaatgttactgaactattgactgaaagtaaatttagataaaatacagcttttttccttatgggcatttgttttgtttcaagtcatcataaactaggtattgcattgctatccgtggatacagacgcttagctcttaaaagannnnnnnnnnatgtaaactgttgaatatttgaaatagtccacttcaccttaatgggtcttgtctatcttcattagtcttcaaagaaaaaccatttgctaccaaagtaaatcagtattttgaatgtgcttctcttgttttttgtttattagctagttcctgtaagcatttccaccagaacttgaggcaaatcgtaaggaagctgtttcttttaaaacacaaaccaccaccaaaaatttaaatgtacatattgcttaagtatttggctgtttttattttttaaaaggtataaacaccnnnnnnnnnnnttaacattgtatgaagatggaaaataagaagatgcactttctgtaactttgtctaaggatttaaattactaacttatgaactccaatttgaattgaacttaactatcggctttcttactggtaaaattatatggtttattttaaatgcgtacatattgaccaatggcctctgaaaaagcacattttagatactgaaattgaaggaaagaaaatgcatcttcaaacattttttggaatctcaccacatatactttgttannnnnnnnnnnnnnnnnnnnnnnnnnnnnnnnnnnnnnnnnnnnnnnnnnnnnnnnnnaaatgtgacagttaaacacatctttaaaagcatagtcacagacaaaagcatacagtataaaaatttccttgaaaactcctacaatattatatttggaggcagcttcagactgttttattggtggtagctgcttgctgaggtcttttagttggtaataactccagagaagcagcctgtgtatattccctacactttgttcactagcatttaagtttagaa

SEQ ID NO: 193539 - DNA, 895 bp, Homo Sapiens
  misc_feature (229)..(252): n is a, c, g, or t
gttttaaatagacagtaactttgcttccctcttaatgtgctaatagttgtgtctaaaaaaatatgcaattcttaaaaaggtaccatttctgatttccttattatctgtaacctttggaaactaatcacatgaaactacaaaattagcaaatgtcttgaaatctgtatataaaacataaattacctctaatttcaaactctcatttattagtgtaccactcaatcttttnnnnnnnnnnnnnnnnnnnnnnnngcggctccaaagatagtcttataccattctttaaaaaaggaaactgttccttttaactttacacccaccccacaccccaatttcaaaacatcatttaattgtcttggtcatggacatttccaagatgagattttatatttcgctcccacagcttctggttatcagaaaacccatgctttcctttattgaaggagtttggtccagctgatgttggtgtatcccttccaatattcttcatcctcatctttgcttctggaggcatttcctctggttcactatcttcatcttcattaaaagctgctgctactgaaagagtttttggagcaagagttggaacagtttctttaggcttacttgatccaagtttgatggatatggctgatgctttctttgtcgtctgactacctatggcaaatccaaacttggagatctttgtaggctttgttgggaggtcggcagcttcttcttcagctgatcgcttctcagcgctgcgactggaactttcccctccattactggaagaaacagtcttagttttcacaggtttttctgcttcttcttcaggtcctccggcggctccagctcgctgcgacttttcaggcttctcgtctcccgccttcccgtccgccattttccccgccaa

SEQ ID NO: 193540 - DNA, 1692 bp, Homo Sapiens; identical to SEQ ID NO: 186227

SEQ ID NO: 193541 - DNA, 1693 bp, Homo Sapiens; identical to SEQ ID NO: 186228

SEQ ID NO: 193542 - DNA, 1924 bp, Homo Sapiens; identical to SEQ ID NO: 186230

SEQ ID NO: 193543 - DNA, 938 bp, Homo Sapiens; identical to SEQ ID NO: 186233

SEQ ID NO: 193544 - DNA, 748 bp, Homo Sapiens
  misc_feature (518)..(546): n is a, c, g, or t
ttggcgaagagagtttggcgcgatgtctcacaccattttgctggtacagcctaccaagaggccagaaggcagaacttatgctgactacgaatctgtgaatgaatgcatggaaggtgtttgtaaaatgtatgaagaacatctgaaaagaatgaatcccaacagtccctctatcacatatgacatcagtcagttgtttgatttcatcgatgatctggcagacctcagctgcctggtttaccgagctgatacccagacataccagccttataacaaagactggattaaagagaagatctacgtgctccttcgtcggcaggcccaacaggctgggaaataattgtgttggaagcactgggggggttggggtgggcttggaacacaggtgtgtacagcgtgctgtagtggaagttttgtatcatagtaatcctgtttccactttgttatactctagccaagattgactgtattagatgaaatgtgaggatcttgttcaatcggaaacccccgttacctcctcnnnnnnnnnnnnnnnnnnnnnnnnnnnnnacttaaacatttttatgatgatttagatggaagttgttcttcgtcacttaatgttggttccagtccttcaactgttcatatctactttataacattcacatactaacccttcttcaagatggggtggggggtggaaatgcagtttagccatgtcctcaagataaagtcttggtaaaaataaataaatgtcctttagttataa

SEQ ID NO: 193545 - DNA, 705 bp, Homo Sapiens
  misc_feature (558)..(586): n is a, c, g, or t
ttggtaagctcgtgtaacggcggcggtgtcggcagctgctgtagcgaagagagtttggcgcgatgtctcacaccattttgctggtacagcctaccaagaggccagaaggcagaacttatgctgactacgaatctgtgaatgaatgcatggaaggtgtttgtaaaatgtatgaagaacatctgaaaagaatgaatcccaacagtccctctatcacatatgacatcagtcagttgtttgatttcatcgatgatctggcagacctcagctgcctggtttaccgagctgatacccagacataccagccttataacaaagactggattaaagagaagatctacgtgctccttcgtcggcaggcccaacaggctgggaaataattgtgttggaagcactgggggggttggggtgggcttggaacacaggtgtgtacagcgtgctgtagtggaagttttgtatcatagtaatcctgtttccactttgttatactctagccaagattgactgtattagatgaaatgtgaggatcttgttcaatcggaaacccccgttacctcctcnnnnnnnnnnnnnnnnnnnnnnnnnnnnnacttaaacatttttatgatgatttagatggaagttgttcttcgtcacttaatgttggttccagtccttcaactgttcctatctactttataacattcacatactaacccttcttcaaaa

SEQ ID NO: 193546 - DNA, 690 bp, Homo Sapiens
  misc_feature (87)..(115): n is a, c, g, or t
gtagatatgaacagttgaaggactgggaaccaacattaagtgacgaagaacaacttccatctaaatcatcataaaaatgtttaagtnnnnnnnnnnnnnnnnnnnnnnnnnnnnngaggaggtaacgggggtttccgattgaacaagatcctcacatttcatctaatacagtcaatcttggctagagtataacaaagtggaaacaggattactatgatacaaaacttccactacagcacgctgtacacacctgtgttccaagcccaccccaacccccccagtgcttccaacacaattatttcccagcctgttgggcctgccgacgaaggagcacgtagatcttctctttaatccagtctttgttataaggctggtatgtctgggtatcagctcggtaaaccaggcagctgaggtctgccagatcatcgatgaaatcaaacaactgactgatgtcatatgtgatagagggactgttgggattcattcttttcagatgttcttcatacattttacaaacaccttccatgcattcattcacagattcgtagtcagcataagttctgccttctggcctcttggtaggctgtaccagcaaaatggtgtgagacatcgcgccaaactctcttcgctacagcagctgccgacaccgccgccgttacacgagcttaacccaacttttttgtacaaagt

SEQ ID NO: 193547 - DNA, 1631 bp, Homo Sapiens; identical to SEQ ID NO: 186237
  misc_feature (47)..(60): n is a, c, g, or t
  misc_feature (645)..(658): n is a, c, g, or t

SEQ ID NO: 193548 - DNA, 1482 bp, Homo Sapiens; identical to SEQ ID NO: 186239

SEQ ID NO: 193549 - DNA, 926 bp, Homo Sapiens
ctttgtacaaaaaagttggcagctctccgtgcctccggtgtgggtcgacaagtgcccccaatgatttatggtacaacttcattgaactgccctaccacggggaaagcatcagcatgctgattgcactgccgactgagagctccactccgctgtctgccatcatcccacacatcagcaccaagaccatagacagctggatgagcatcatggtgcccaagagggtgcaggtgatcctgcccaagttcacagctgtagcacaaacagatttgaaggagccgctgaaagttcttggcattactgacatgtttgattcatcaaaggcaaattttgcaaaaataacaaggtcagaaaacctccatgtttctcatatcttgcaaaaagcaaaaattgaagtcagtgaagatggaaccaaagcttcagcagcaacaactgcaattctcattgcaagatcatcgcctccctggtttatagtagacagaccttttctgtttttcatccgacataatcctacaggtgctgtgttattcatggggcagataaacaaaccctgaagagtatacaaaagaaaccatgcaaagcaacgactactttgctacgaagaaagactcctttcctgcatctttcatagttctgttaaatatttttgtacatcgcttctttttcaaaactagttcttaggaacagactcgatgcaagtgtttctgttctgggaggtattggagggaaaaaacaagcaggatggctggaacactgtactgaggaatgaatagaaaggcttccagatgtctaaaagattctttaaactactgaactgttacctaggttaacaaccctgttgagtatttgctgtttgtccagttcaggaatttttgttttgttttgtctatatgtgcggcttttcagaagaaatttaatcagtgtgacag

SEQ ID NO: 193550 - DNA, 1995 bp, Homo Sapiens; identical to SEQ ID NO: 186245
  misc_feature (901)..(1214): n is a, c, g, or t
  misc_feature (1748)..(1773): n is a, c, g, or t

SEQ ID NO: 193551 - DNA, 1229 bp, Homo Sapiens; identical to SEQ ID NO: 186246

SEQ ID NO: 193552 - DNA, 1156 bp, Homo Sapiens; identical to SEQ ID NO: 180928
  misc_feature (598)..(606): n is a, c, g, or t
  misc_feature (672)..(692): n is a, c, g, or t

SEQ ID NO: 193553 - DNA, 1134 bp, Homo Sapiens; identical to SEQ ID NO: 180929
  misc_feature (55)..(75): n is a, c, g, or t
  misc_feature (141)..(149): n is a, c, g, or t

SEQ ID NO: 193554 - DNA, 2151 bp, Homo Sapiens; identical to SEQ ID NO: 180930
  misc_feature (1596)..(1616): n is a, c, g, or t
  misc_feature (1681)..(1764): n is a, c, g, or t

SEQ ID NO: 193555 - DNA, 941 bp, Homo Sapiens
actttgtacaaaaaagttggcaaggtcgtattacagaggtgcagcaggagctttactagtttacgatattacacggagagatacattcaaccacttgacaacctggttagaagatgcccgccagcattccaattccaacatggtcattatgcttattggaaataaaagtgatttagaatctagaagagaagtaaaaaaagaagaaggtgaagcttttgcacgagaacatggactcatcttcatggaaacgtctgctaagactgcttccaatgtagaagaggcatttattaatacagcaaaagaaatttatgaaaaaattcaagaaggagtctttgacattaataatgaggcaaatggcattaaaattggccctcagcatgctgctaccaatgcaacacatgcaggcaatcagggaggacagcaggctgggggcggctgctgttgagtctgtttttactgtctagctgcccaacggggcctactcacttattctttcaccccctctcctcctgctcagctgagacatgaaactatttgaaatggctttatgtcacagaagactttaatccgtcaaattcttgtataactttgaataaatggttaatgttcacttaaaagacagattttggagattgtattcatatctatttgcatttgatttctaggtcaattgatgtgattatttttgttaaatgttgtcttgtgcccttaactacgaactgaattgtattaaacactacaaagtcatcttgagtattttaaatcggtttgtgtagttaggtttcccaacatctgtggttacctaatgtttaatattatagaactgtcctcagaaactttgtcattttcacggctataaggaaacagaaggactcttttaattctgtatttatcattaactttcctgtaatatatagtttaaataacctgcttgggtgtaa

SEQ ID NO: 193556 - DNA, 1048 bp, Homo Sapiens
tttgtacaaaaaagttggatattgaattggttcctccatatatgattgcatcaaaagaagctgttcgtgaaggatctccagcaaactggaaaagaaaagagaagttgcctcaggttacgaggtcttggcacaattatatgtgtaattgtgttatccaggattttcaagcttcggtacttcaagtgtcagattcaacttatgatgaacaagtggctgcacagatgccaactgttcattatgaattccccaatggctacaattgtgattttggtgcagagcggctaaagattccagaaggattatttgacccttccaatgtaaaggggttatcaggaaacacaatgttaggagtcagtcatgttgtcaccacaagtgttgggatgtgtgatattgacatcagaccaggtctctatggcagtgtaatagtggcaggaggaaacacactaatacagagttttactgacaggttgaatagagagctgtctcagaaaactcctccaagtatgcggttgaaattgattgcaaataatacaacagtggaacggaggtttagctcatggattggcggctccattctagcctctttgggtacctttcaacagatgtggatttccaagcaagaatatgaagaaggagggaagcagtgtgtagaaagaaaatgcccttgagaaagagttcccaagcttctaccttccttttgtcaccttacgtttcatagctttagtatactcaggaaaagaatgaccatcttttgtagaatgtttatacatttttgcatatttcaatttccacttaaattttttaaagctttaactggctctataaattaagtttgtgctttccttgaaatgcacttattcttattacaagcattttataattttgtataaatgtctattttctctaaatattttgctttcagtaaaatgctttccaactctgtttagtgtattaattaccagtggattggtagaactgctttttattgactagtaaaagttactgcctatgcttttaccttagcttaacggaattaaattaaaaatta

SEQ ID NO: 193557 - DNA, 737 bp, Homo Sapiens
ctttgtacaaaaaagttggcaatgttaggagtcagtcatgttgtcaccacaagtgttgggatgtgtgatattgacatcagaccaggtctctatggcagtgtaatagtggcaggaggaaacacactaatacagagttttactgacaggttgaatagagagctgtctcagaaaactcctccaagtatgcggttgaaattgattgcaaataatacaacagtggaacggaggtttagctcatggattggcggctccattctagcctctttgggtacctttcaacagatgtggatttccaagcaagaatatgaagaaggagggaagcagtgtgtagaaagaaaatgcccttgagaaagagttcccaagcttctaccttccttttgtcaccttacgtttcatagctttagtatactcaggaaaagaatgaccatcttttgtagaatgtttatacatttttgcatatttcaatttccacttaaattttttaaagctttaactggctctataaattaagtttgtgctttccttgaaatgcacttattcttattacaagcattttataattttgtataaatgtctattttctctaaatattttgctttcagtaaaatgctttccaactctgtttagtgtattaattaccagtggattggtagaactgctttttattgactagtaaaagttactgcctatgctttttttccttaggcttacagaattaaataaaaattagcccttcc

SEQ ID NO: 193558 - DNA, 956 bp, Homo Sapiens
tttgtacaaaaaagttgggctccggggtgtgtggacgccgctttgttgcctgaggtgggtggcggtggaagttaagggagtcaggggctatcgctcctcgagactcgcagtcgcggccactgcagtcacttcgccagttagcccttagggtaggagtcgcgccggcagcagccatgagcggcggcgtgtacgggggagatgaagttggagcccttgtttttgacattggatcctatactgtgagagctggttatgctggtgaggactgccccaaggtggattttcctacagctattggtatggtggtagaaagagatgacggaagcacattaatggaaatagatggcgataaaggcaaacaaggcggtcccacctactacatagatactaatgctctgcgtgttccgagggagaatatggaggccatttcacctctaaaaaatgggatggttgaagactgggatagtttccaagctattttggatcatacctacaaaatgcatgtcaaatcagaagccagtctccatcctgttctcatgtcagaggcaccgtggaatactagagcaaagagagagaaactgacagagttaatgtttgaacactacaacatccctgccttcttcctttgcaaaactgcagttttgacagcatttgctaatggtcgttctactgggctgattttggacagtggagccactcataccactgcaattccagtccacgatggctatgtccttcaacaaggcattgtgaaatcccctcttgctggagactttattactatgcagtgcagagaactcttccaagaaatgaatattgaattggttcctccatatatgattgcatcaaaagaagctgttcgtgaaggatctccagcaaactgggaaaagaaaagagaagttgcctcaggttacgaggtcttggcacaattatatgtgtaatttgtgttatccagg

SEQ ID NO: 193559 - DNA, 2267 bp, Homo Sapiens; identical to SEQ ID NO: 186247
  misc_feature (1381)..(1422): n is a, c, g, or t
  misc_feature (1704)..(1802): n is a, c, g, or t

SEQ ID NO: 193560 - DNA, 1835 bp, Homo Sapiens; identical to SEQ ID NO: 180933
  misc_feature (211)..(220): n is a, c, g, or t
  misc_feature (1482)..(1516): n is a, c, g, or t

SEQ ID NO: 193561 - DNA, 1398 bp, Homo Sapiens; identical to SEQ ID NO: 180934
  misc_feature (161)..(186): n is a, c, g, or t
  misc_feature (230)..(250): n is a, c, g, or t
  misc_feature (656)..(666): n is a, c, g, or t

SEQ ID NO: 193562 - DNA, 781 bp, Homo Sapiens; identical to SEQ ID NO: 186252
  misc_feature (287)..(311): n is a, c, g, or t
  misc_feature (355)..(375): n is a, c, g, or t

SEQ ID NO: 193563 - DNA, 2231 bp, Homo Sapiens; identical to SEQ ID NO: 186253

SEQ ID NO: 193564 - DNA, 1464 bp, Homo Sapiens; identical to SEQ ID NO: 186254
  misc_feature (1328)..(1341): n is a, c, g, or t

SEQ ID NO: 193565 - DNA, 1789 bp, Homo Sapiens; identical to SEQ ID NO: 186256
  misc_feature (356)..(366): n is a, c, g, or t

SEQ ID NO: 193566 - DNA, 1024 bp, Homo Sapiens
ctttgtacaaaaaagttgggttatcaacaccttgtaaggaaaatacagtgtctgagttttcatcggtcttcacatgctgctatatattccacagagttccttgcatgtactgagcttttgttttagatggaatagcacaaggagaaaaatctttaaacttagtgctttgtctattctttatttctctcagggtggccagtattttgacttatttatcctgcttgaaagctacttgagatgtgtactgctattctaaacacgtgatctagtttctttcatctctggcataagattatataacttaatgttaagtgtcttgaggcataaaagacaaaatgtggcttattttaggatctgttttttcatcgaggtctcgggtatcctttcaaagatagtgagaagcagacactgctccttgtgcagctctggtacctcctgcccactgctgtcacttcaagccactggcaatgcttctgtcctcgtgtcttggaggaaaatcacctggggggaggggacttcttgtggtaagagcaagtgcaggtatgaaatgcgaagattgccccagctaaaagtggacaagtccgctttgtgagatgaatacttcctgagaaacttgacaagtatctctccattttaccattatgaaaactatcattaaaaaaaacagtttagatgccttctccttttgagggaaaaagggtgctttttattgtataaagcagcgtcttatgtattttgatataccattgtttgaacttccgtctttagctgatagattctcaaatatccttgattttggatgttcagtatgtttgtgagagaggtttctgggaagactctctttttgccctcgggaaaaagcaaaatatcaatgtttgggtgactgtgtaaagctcagtgtgtaaaaacatctttttgtctaggttttctttctgctctttattgaagacaaacactcaccaaaagaaaaataaaagttttcagagaactaattttcttggccaggagtatacttaatattttg

SEQ ID NO: 193567 - DNA, 977 bp, Homo Sapiens
  misc_feature (579)..(587): n is a, c, g, or t
tataatggccaactttgtacaaaaaagttggctcctgtgaaaaagcttgtggtgaaggggggcaaaaaaaagaagcaagttctgaagttcactcttgattgcacccaccctgtagaagatggaatcatggatgctgccaattttgagcagtttttgcaagaaaggatcaaagtgaacggaaaagctgggaaccttggtggaggggtggtgaccatcgaaaggagcaagagcaagatcaccgtgacatccgaggtgcctttctccaaaaggtatttgaaatatctcaccaaaaaatatttgaagaagaataatctacgtgactggttgcgcgtagttgctaacagcaaagagagttacgaattacgttacttccagattaaccaggacgaagaagaggaggaagacgaggattaaatttcatttatctggaaaattttgtatgagttcttgaataaaacttgggaaccaaaatggtggtttatccttgtatctctgcagtgtggattgaacagaaaattggaaatcatagtcaaagggcttcccttggttcgccactcatttatttgtaacttgacttcnnnnnnnnnctgcttaaaaatttcaattctcgtggtaataccagagtagaaggagagggtgactttaccgaactgacagccattggggaggcagatgcgggtgtggaggtgtgggctgaaggtagtgactgtttgattttaaaaagtgtgactgtcagttgtatctgttgcttttctcaatgattcaagatacaaatgggcttctctcattcattaaaagaaaacgcgacatctttctaagattctctgtgggaaaatgactgtcaataaaatgcgggtttctgggccattcgtcttactttcattttttgattacaaatttctcttgacgcacacaattatgtctgctaatcctcttcttcctagagagagaaactgtgctccttcagtgttgctgcc

SEQ ID NO: 193568 - DNA, 903 bp, Homo Sapiens
  misc_feature (588)..(596): n is a, c, g, or t
ttggcgctcacctccctttctaactccgctgccgccatggctcctgtgaaaaagcttgtggtgaaggggggcaaaaaaaagaagcaagttctgaagttcactcttgattgcacccaccctgtagaagatggaatcatggatgctgccaattttgagcagtttttgcaagaaaggatcaaagtgaacggaaaagctgggaaccttggtggaggggtggtgaccatcgaaaggagcaagagcaagatcaccgtgacatccgaggtgcctttctccaaaaggtatttgaaatatctcaccaaaaaatatttgaagaagaataatctacgtgactggttgcgcgtagttgctaacagcaaagagagttacgaattacgttacttccagattaaccaggacgaagaagaggaggaagacgaggattaaatttcatttatctggaaaattttgtatgagttcttgaataaaacttgggaaccaaaatggtggtttatccttgtatctctgcagtgtggattgaacagaaaattggaaatcatagtcaaagggcttcccttggttcgccactcatttatttgtaacttgacttcnnnnnnnnnctgcttaaaaatttcaattctcgtggtaataccagagtagaaggagagggtgactttaccgaactgacagccattggggaggcagatgcgggtgtggaggtgtgggctgaaggtagtgactgtttgattttaaaaagtgtgactgtcagttgtatctgttgcttttctcaatgattcaggggatacaaatgggcttctctcattcattaaaagaaaacgcgacatctttctaagattctctgtgggaaatgactgtcaataaaatgcgggtttctgggccattcgtcttactttcattttttgatta

SEQ ID NO: 193569 - DNA, 1541 bp, Homo Sapiens
  misc_feature (200)..(208): n is a, c, g, or t
ttggggacgaagaagaggaggaagacgaggattaaatttcatttatctggaaaattttgtatgagttcttgaataaaacttgggaaccaaaatggtggtttatccttgtatctctgcagtgtggattgaacagaaaattggaaatcatagtcaaagggcttcccttggttcgccactcatttatttgtaacttgacttcnnnnnnnnnctgcttaaaaatttcaattctcgtggtaataccagagtagaaggagagggtgactttaccgaactgacagccattggggaggcagatgcgggtgtggaggtgtgggctgaaggtagtgactgtttgattttaaaaagtgtgactgtcagttgtatctgttgcttttctcaatgattcagggatacaaatgggcttctctcattcattaaaagaaaacgcgacatctttctaagattctctgtgggaaaatgactgtcaataaaatgcgggtttctgggccattcgtcttactttcattttttgattacaaatttctcttgacgcacacaattatgtctgctaatcctcttcttcctagagagagaaactgtgctccttcagtgttgctgccataaaggggtttggggaatcgattgtaaaagtcccaggttctaaattaactaaatgtgtacagaaatgaacgtgtaagtaatgtttctacaggtctttgcaacaaactgtcactttcgtctccagcagagggagctgtaggaatagtgcttccagatgtggtctcccgtgtggggcccagcaatgggggcccctgatgccaagagctctggaggttcttgaaagaggggacacgaaggaggagtgactgggaagcctcccatgccaaggaggtgggaggtgccctggaaatagctgcctcatgccacttaggccatgactggatttaatgtcagtggtgtgccacagtgcagaggctagacaactgaaaggggctaccaaggctgggaaaaaaatgcaattgttgctgtgagtgactttgaaagactctggtgccttgtggtgcccttctgaaattcaaacagtaatgcaaaagtgtctgcattagaatttacggtgtctaaaattcatgtttttaaaagagcttgcctacagatggtttccacacttgaaattgtgccctgcgagttgcatagctggaagttcaatgctcagtcctaccttggctcccattaaacatttggtgctctgtggattgagttgaacgtgttgaggctttgcaatttcacttgtgttaaaggctctggcatttttccatttctatgcaaatttctttgaagcagaattgcttgcatatttcttctctgccgtcacagaaagcagagtttctttcaaacttcactgaggcatcagttgctctttggcaatgtcccttaaccatgattattaactaagtttgtggcttgagtttacaaattctacttgttgcattgatgttcccatgtagtaagtcatttttagtttggttgtgaaaaaaccctgggctgaagttggcatttcagtt

SEQ ID NO: 193570 - DNA, 979 bp, Homo Sapiens
ctttgtacaaaaaagttgggttttagtaagaccattattgtgaagcctatgcacttcaaatgaccaaattagatttcaacacagatgaagaaaagaagatggttgaagaagtattcagtaatgcaattgattgcttatccgatgaagataaaaaactccctcaggtagaacatgtacttcctcttttgaagaggggaattggtattcaccatggtggtttacttcctattttgaaagaaactatagaaattctcttttctgaaggattgataaaggccttatttgccacggagacctttgctatgggaattaacatgccagctagaactgttttatttacaaatgcccgcaaatttgatgggaaggatttccgatggatttcttctggtgaatacattcagatgtctggtcgtgctggaaggagaggaatggatgatagaggaattgtaattcttatggtagatgaaaagatgagcccaacaattggaaaacaattacttaagggctccgctgatcctctaaatagtgctttccatttgacctacaacatggttttgaacttactacgtgtagaagaaattaatcctgagtacatgttggaaaaatccttctaccagtttcagcattatagagcaattccaggagtagtagagaaggtaaagaattcagaagaacagtataataaaatagtaattcccaatgaagaaagtgtggttatctattataagattagacagcagcttgccaaattgggtaaagaaattgaagaatatattcacaaaccaaaatactgcttaccttttctacaaccaggtcgtttggtaaaggtaaagaatgaaggagatgactttggctggggagtagtggtgaatttctcaaaaaagtcaaatgttaagcctaactctggtgaactggatcctttgtatgtagtagaagtacttctgcgctgtagcaaagagagcttgaaaaattcagctac

SEQ ID NO: 193571 - DNA, 998 bp, Homo Sapiens; identical to SEQ ID NO: 186263

SEQ ID NO: 193572 - DNA, 702 bp, Homo Sapiens; identical to SEQ ID NO: 180937
  misc_feature (82)..(97): n is a, c, g, or t
  misc_feature (105)..(134): n is a, c, g, or t
  misc_feature (136)..(150): n is a, c, g, or t

SEQ ID NO: 193573 - DNA, 1260 bp, Homo Sapiens; identical to SEQ ID NO: 180939
  misc_feature (362)..(385): n is a, c, g, or t
  misc_feature (785)..(793): n is a, c, g, or t
  misc_feature (997)..(1040): n is a, c, g, or t

SEQ ID NO: 193574 - DNA, 952 bp, Homo Sapiens; identical to SEQ ID NO: 180940

SEQ ID NO: 193575 - DNA, 1937 bp, Homo Sapiens; identical to SEQ ID NO: 180941

SEQ ID NO: 193576 - DNA, 1317 bp, Homo Sapiens; identical to SEQ ID NO: 186268
  misc_feature (381)..(394): n is a, c, g, or t
  misc_feature (972)..(980): n is a, c, g, or t

SEQ ID NO: 193577 - DNA, 872 bp, Homo Sapiens
  misc_feature (442)..(450): n is a, c, g, or t
ttggcttaaaagtattgaaagacaatactgctgttatatagcaagacataaacagattataaacatcagagccatttgcttctcagtttacatttctgatacatgcagatagcagatgtctttaaatgaaatacatgtatattgtgtatggacttaattatgcacatgctcagatgtgtagacatcctccgtatatttacataacatatagaggtaatagataggtgatatacatgatacattctcaagagttgcttgaccgaaagttacaaggaccccaacccctttgtcctctctacccacagatggccctgggaatcaattcctcaggaattgccctcaagaactctgcttcttgctttgcagagtgccatggtcatgtcattctgaggtcacataacacataaaattagtttctatgagtgtataccatttaaagaannnnnnnnncagtaaaagggaatattacaatgttggaggagagataagttatagggagctggatttcaaaacgtggtccaagattcaaaaatcctattgatagtggccattttaatcattgccatcgtgtgcttgtttcatccagtgttatgcactttccacagttggacatggtgttagtatagccagacgggtttcattattatttctctttgctttctcaatgttaatttattgcatggtttattctttttctttacagctgaaattgctttaaatgatggttaaaattacaaattaaatgttaatttttatcaatgtgattgtaattaaaatattttgatttaaataacaaaaataataccagattttagccgtggaaaatgttttttgatcatttgcagttaaagactttaaataatcaaatgtta

SEQ ID NO: 193578 - DNA, 975 bp, Homo Sapiens; identical to SEQ ID NO: 186269
  misc_feature (203)..(211): n is a, c, g, or t
  misc_feature (890)..(908): n is a, c, g, or t

SEQ ID NO: 193579 - DNA, 631 bp, Homo Sapiens
  misc_feature (207)..(215): n is a, c, g, or t
ttggcattctcaagagttgcttgaccgaaagttacaaggaccccaacccctttgtcctctctacccacagatggccctgggaatcaattcctcaggaattcccctcaagaactctgcttcttgctttgcagagtgccatggtcatgtcattctgaggtcacataacacataaaattagtttctatgagtgtataccatttaaagaannnnnnnnncagtaaaagggaatattacaatgttggaggagagataagttatagggagctggatttcaaaacgtggtccaagattcaaaaatcctattgatagtggccattttaatcattgccatcgtgtgcttgtttcatccagtgttatgcactttccacagttggacatggtgttagtatagccagacgggtttcattattatttctctttgctttctcaatgttaatttattgcatggtttattctttttctttacagctgaaattgctttaaatgatggttaaaattacaaattaaattgttaatttttatcaatgtgattgtaattaaaaatattttgatttaaataacaaaaataataccagattttaagccgtggaaaatgttcttgatcatttgcagttaaggactttaaataaat

SEQ ID NO: 193580 - DNA, 1215 bp, Homo Sapiens; identical to SEQ ID NO: 186270
  misc_feature (237)..(250): n is a, c, g, or t
  misc_feature (828)..(836): n is a, c, g, or t

SEQ ID NO: 193581 - DNA, 1125 bp, Homo Sapiens; identical to SEQ ID NO: 186271
  misc_feature (334)..(342): n is a, c, g, or t
  misc_feature (920)..(933): n is a, c, g, or t

SEQ ID NO: 193582 - DNA, 1540 bp, Homo Sapiens; identical to SEQ ID NO: 186272
  misc_feature (579)..(592): n is a, c, g, or t
  misc_feature (1170)..(1178): n is a, c, g, or t

SEQ ID NO: 193583 - DNA, 910 bp, Homo Sapiens
  misc_feature (161)..(174): n is a, c, g, or t
  misc_feature (752)..(760): n is a, c, g, or t
tacaaaaaagttggtacaaagacaccacctcccaaaccaatttttttcctgcgaagtttaatgatccacaagtgtatatatgaaattctcctccttccttgcccccctctctttcttccctctttcccctccagacattctagtttgtggagggttatttnnnnnnnnnnnnnnggaagatggtcaagtttgtaaaatatttgtttgtgctttttccccctccttacctgaccccctacgagtttacaggtctgtggcaatactcttaaccataagaattgaaatggtgaagaaacaagtatacactagaggctcttaaaagtattgaaagacaatactgctgttatatagcaagacataaacagattataaacatcagagccatttgcttctcagtttacatttctgatacatgcagatagcagatgtctttaaatgaaatacatgtatattgtgtatggacttaattatgcacatgctcagatgtgtagacatcctccgtatatttacataacatatagaggtaatagataggtgatatacatgatacattctcaagagttgcttgaccgaaagttacaaggaccccaacccctttgtcctctctacccacagatggccctgggaatcaattcctcaggaattgccctcaagaactctgcttcttgctttgcagagtgccatggtcatgtcattctgaggtcacataacacataaaattagtttctatgagtgtataccatttaaagaannnnnnnnncagtaaaagggaatattacaatgttggaggagagataaattatagggagctggatttcaaaacgtggtccaagattcaaaaatcctattgatagtggccattttaatcattgccatcgtgtgcttgtttcatccagtgttatgcactttc

SEQ ID NO: 193584 - DNA, 1749 bp, Homo Sapiens; identical to SEQ ID NO: 186275

SEQ ID NO: 193585 - DNA, 1399 bp, Homo Sapiens; identical to SEQ ID NO: 180946
  misc_feature (444)..(472): n is a, c, g, or t

SEQ ID NO: 193586 - DNA, 2216 bp, Homo Sapiens; identical to SEQ ID NO: 186278
  misc_feature (1052)..(1106): n is a, c, g, or t
  misc_feature (1596)..(1632): n is a, c, g, or t

SEQ ID NO: 193587 - DNA, 1259 bp, Homo Sapiens; identical to SEQ ID NO: 180947

SEQ ID NO: 193588 - DNA, 454 bp, Homo Sapiens; identical to SEQ ID NO: 180948

SEQ ID NO: 193589 - DNA, 1163 bp, Homo Sapiens; identical to SEQ ID NO: 186280

SEQ ID NO: 193590 - DNA, 1335 bp, Homo Sapiens
ttgggctgatcctgatacattagttaactgggactttgtggaacaagtgcgcatttgtagccatgaagtgccatcttgcccaatatgcctctatccacctactgcagccaagataacccgttgtggacacatcttctgctgggcatgcatcctgcactatctttcactgagtgagaagacgtggagtaaatgtcccatctgttacagttctgtgcataagaaggatctcaagagtgttgttgccacagagtcacatcagtatgttgttggtgataccattacgatgcagctgatgaagagggagaaaggggtgttggtggctttgcccaaatccaaatggatgaatgtagaccatcccattcatctaggagatgaacagcacagccagtactccaagttgctgctggcctctaaggagcaggtgctgcaccgggtagttctggaggagaaagtagcactagagcagcagctggcagaggagaagcacactcccgagtcctgctttattgaggcagctatccaggagctcaagactcgggaagaggctctgtcgggattggccggaagcagaagggaggtcactggtgttgtggctgctctggaacaactggtgctgatggctcccttggcgaaggagtctgtttttcaacccaggaagggtgtgctggagtatctgtctgccttcgatgaagaaaccacggaagtttgttctctggacactccttctagacctcttgctctccctctggtagaagaggaggaagcagtgtctgaaccagagcctgaggggttgccagaggcctgtgatgacttggagttagcagatgacaatcttaaagaggggaccatttgcactgagtccagccagcaggaacccatcaccaagtcaggcttcacacgcctcagcagctctccttgttactacttttaccaagcggaagatggacagcatatgttcctgcaccctgtgaatgtgcgctgcctcgtgcgggagtacggcagcctggagaggagccccgagaagatctcagcaactgtggtggagattgctggctactccatgtctgaggatgttcgacagcgtcacagatatctctctcacttgccactcacctgtgagttcagcatctgtgaactggctttgcaacctcctgtggtctctaaggaaaccctagagatgttctcagatgacattgagaagaggaaacgtcagcgccaaaagaaggctcgggaggaacgccgccgagagcgcaagatttgagatagaggagaacaagaaacagggcaagtacccagaagtccacattcccctcgagaatctacagcagtttcctg

SEQ ID NO: 193591 - DNA, 1193 bp, Homo Sapiens; identical to SEQ ID NO: 186283
  misc_feature (564)..(587): n is a, c, g, or t

SEQ ID NO: 193592 - DNA, 848 bp, Homo Sapiens; identical to SEQ ID NO: 186291

SEQ ID NO: 193593 - DNA, 1125 bp, Homo Sapiens; identical to SEQ ID NO: 180955
  misc_feature (935)..(945): n is a, c, g, or t

SEQ ID NO: 193594 - DNA, 1131 bp, Homo Sapiens
ctttgtacaaaaaagttggtgccgctgccaccgcaccccgccatggagcggccgtcgctgcgcgccctgctcctcggcgccgctgggctgctgctcctgctcctgcccctctcctcttcctcctcttcggacacctgcggcccctgcgagccggcctcctgcccgcccctgcccccgctgggctgcctgctgggcgagacccgcgacgcgtgcggctgctgccctatgtgcgcccgcggcgagggcgagccgtgcgggggtggcggcgccggcagggggtactgcgcgccgggcatggagtgcgtgaagagccgcaagaggcggaagggtaaagccggggcagcagccggcggtccgggtgtaagcggcgtgtgcgtgtgcaagagccgctacccggtgtgcggcagcgacggcaccacctacccgagcggctgccagctgcgcgccgccagccagagggccgagagccgcggggagaaggccatcacccaggtcagcaagggcacctgcgagcaaggtccttccatagtgacgccccccaaggacatctggaatgtcactggtgcccaggtgtacttgagctgtgaggtcatcggaatcccgacacctgtcctcatctggaacaaggtaaaaaggggtcactatggagttcaaaggacagaactcctgcctggtgaccgggacaacctggccattcagacccggggtggcccagaaaagcatgaagtaactggctgggtgctggtatctcctctaagtaaggaagatgctggagaatatgagtgccatgcatccaattcccaaggacaggcttcagcatcagcaaaaattacagtggttgatgccttacatgaaataccagtgaaaaaaggtgaaggtgccgagctataaacctccagaatattattagtctgcatggttaaaagtagtcatggataactacattacctgttcttgcctaataagtttcttttaatccaatccactaacactttagttatattcactggttttacacagagaaatacaaaataaagatcacacatcaagactatctacaaaaatttattatatatttacagaagaaaagcatgcatatcattaaacaaataaaatactttttatcacaaa

SEQ ID NO: 193595 - DNA, 787 bp, Homo Sapiens
gagcaatgctttcttcccttaatagccaactttgtacaaaaaagttgggggtaaagccggggcagcagccggcggtccgggtgtaagcggcgtgtgcgtgtgcaagagccgctacccggtgtgcggcagcgacggcaccacctacccgagcggctgccagctgcgcgccgccagccagagggccgagagccgcggggagaaggccatcacccaggtcagcaagggcacctgcgagcaaggtccttccatagtgacgccccccaaggacatctggaatgtcactggtgcccaggtgtacttgagctgtgaggtcatcggaatcccgacacctgtcctcatctggaacaaggtaaaaaggggtcactatggagttcaaaggacagaactcctgcctggtgaccgggacaacctggccattcagacccggggtggcccagaaaagcatgaagtaactggctgggtgctggtgagtaccagtaccaagagctggcaagagtttcattcttagcattagacataagcagacctggcaaaggtgcctgatgtaccgccagcctaaaggtgcttgctcttccacatctgtttggaatagccttaccatggagtcgctgctcctctttcagagaaactaaaggaaaagtgctttattgcatgttttgaaaacaaccaatgaattaacaagaactagtattttcctaagagttcaaagcaaaatcctcacacggagctgcgtggcccaagcattgttttaactgattatcgattaataaataccttattttacttg

SEQ ID NO: 193596 - DNA, 1396 bp, Homo Sapiens; identical to SEQ ID NO: 180957
  misc_feature (94)..(115): n is a, c, g, or t
  misc_feature (589)..(719): n is a, c, g, or t

SEQ ID NO: 193597 - DNA, 409 bp, Homo Sapiens
atgagccaccgcacctggccttccctgcttcctctctagaatccaattagggatgtttgttactactcatattgattaaaacagttaacaaacttttttctttttaaaatgtgagatcagtgaactctggttttaagataatctgaaacaaggtccttgggagtaataaaattggtcacattctgtaaagcacattctgtttaggaatcaacttatctcaaattgtaactcggggcctaactatatgagatggctgaaaaaataccacatcgtctgttttcactaggtgatgccaaaatattttgctttatgtatattacagttctttttaaaacactggaagactcatgttaaactctaattgtgaaggcagaatctctgctaatttttcagattaaaattctctttg

SEQ ID NO: 193598 - DNA, 694 bp, Homo Sapiens
ttggctacatgaagcttatatattggtttggcctgaaaggtgaagtggggtaggcagggggcgggcttacaggttatggtggattcaaagactccctgatttgtgattggttaaggaagcaaagctttgtctaaaaacttggggtccgcagaaaggaacattaaggtctggccaggcccctcaggaagaaactgagagcaaagaatggaggtcagagtttagtccctggtgttcccccttatctgacgtctgtgtgaatccatttggtgggggtctgggtttctgaaaagtagctcaggggcacgtgttaaggatgtctctaggtgactctaacttccctggctattgtttgaaactgttatgaccttcttgcttatcagcttgctggtttccttctcggggcgagctgggtgcctggagttttcggtgaaggaaactcaagattctcctttatttctgtgcttgtgggaatccccctggcacaccccaaagaggggtccctgctccgtctcacagggatctttttgtatatttggcttagcatcatacatttgccatgttgtttcatcatctgcctaatttactgtttttgaatatttcatttgtttctaattgttactacagataatgctggggtgagcaactctgtgtacataggtttatctcctattggaatattttctttatataggcg

SEQ ID NO: 193599 - DNA, 1820 bp, Homo Sapiens; identical to SEQ ID NO: 186296
  misc_feature (758)..(793): n is a, c, g, or t
  misc_feature (918)..(956): n is a, c, g, or t

SEQ ID NO: 193600 - DNA, 695 bp, Homo Sapiens; identical to SEQ ID NO: 180958

SEQ ID NO: 193601 - DNA, 1309 bp, Homo Sapiens; identical to SEQ ID NO: 186297
  misc_feature (1147)..(1192): n is a, c, g, or t

SEQ ID NO: 193602 - DNA, 1051 bp, Homo Sapiens; identical to SEQ ID NO: 186298
  misc_feature (565)..(580): n is a, c, g, or t
  misc_feature (904)..(948): n is a, c, g, or t

SEQ ID NO: 193603 - DNA, 1320 bp, Homo Sapiens; identical to SEQ ID NO: 186299
  misc_feature (822)..(847): n is a, c, g, or t
  misc_feature (1075)..(1088): n is a, c, g, or t

SEQ ID NO: 193604 - DNA, 2043 bp, Homo Sapiens; identical to SEQ ID NO: 186304
  misc_feature (935)..(947): n is a, c, g, or t
  misc_feature (949)..(996): n is a, c, g, or t
  misc_feature (1704)..(1732): n is a, c, g, or t

SEQ ID NO: 193605 - DNA, 491 bp, Homo Sapiens
  misc_feature (153)..(180): n is a, c, g, or t
ttggctacactgttcagataaggtcacaatctgatgctgtcagtttgaccgagctggttttgcttatggtcatgctgcaatttgttagaataatagggatcaagttttaaatcctcctccttcccttttttctggagtcttgagggccagagnnnnnnnnnnnnnnnnnnnnnnnnnnnncctgcttgctactgttttgtggtgttgaaaagtggtttaaacctgagactaacttaaacacttccttgaccttcttgttgcctgttcatttttgtgccaaggaagtagctgccccagtgtatgtcttgccttctccgcgtcattgttggaagaggagagatgcatcgagcagtcccagctgcttttcatttattacttcttctttccaggacctgacagaagtcagggaagagtccctgggttatgtccaaacttagcacctgcaattgttgggatgtggatggatgtgtgcataagagagaaagagaata

SEQ ID NO: 193606 - DNA, 2234 bp, Homo Sapiens; identical to SEQ ID NO: 186306
  misc_feature (219)..(228): n is a, c, g, or t

SEQ ID NO: 193607 - DNA, 2968 bp, Homo Sapiens; identical to SEQ ID NO: 186307

SEQ ID NO: 193608 - DNA, 957 bp, Homo Sapiens
ctttgtacaaaaaagttggagcagacattggaatggaaaagttttttaacatcaaatgccggtattccggcctctgcccccacgtggtggtgcttgttgccactgtcagggctctcaagatgcacgggggcggccccacggtcactgctggactgcctcttcccaaggcttacatacaggagaacctggagctggttgaaaaaggcttcagtaacttgaagaaacaaattgaaaatgccagaatgtttggaattccagtagtagtggccgtgaatgcattcaagacggatacagagtctgagctggacctcatcagccgcctttccagagaacatggggcttttgatgccgtgaagtgcactcactgggcagaagggggcaagggtgccttagccctggctcaggccgtccagagagcagcacaagcacccagcagcttccagctcctttatgacctcaagctcccagttgaggataaaatcaggatcattgcacagaagatctatggagcagatgacattgaattacttcccgaagctcaacacaaagctgaagtctacacgaagcagggctttgggaatctccccatctgcatggctaaaacacacttgtctttgtctcacaacccagagcaaaaaggtggccctacaggcttcattctgcccattcgcgacatccgcgccagcgttggggctggttttctgtaccccttagtaggaacgatgagcacaatgcctggactccccacccggccctgtttttatgatattgatttggaccctgaaacagaacaggtgaatggattattctaaacagatcaccatccatcttcaagaagctactttgaaaagtccgggccagtgtctatcaggcccactggggagttggaattataagtaaacccaggagaaagtcaacccctgcccagaaattctgaaactaatagtaggagtttcc

SEQ ID NO: 193609 - DNA, 1093 bp, Homo Sapiens
ataaaagccaactttgtacaaaaaagttggcttccttcgctaacgcctcccggctctcgtcagcctcccgccggccgtctccttaacaccgaacaccatgccttcaattaagttgcagagttctgatggagagatatttgaagttgatgtggaaattgccaaacaatctgtgactattaagaccatgttggaagatttgggaatggatgatgaaggagatgatgacccagttcctctaccaaatgtgaatgcagcaatattaaaaaaggtcattcagtggtgcacccaccacaaggatgaccctcctcctcctgaagatgatgagaacaaagaaaagcgaacagatgatatccctgtttgggaccaagaattcctgaaagttgaccaaggaacactttttgaactcattctggctgcaaactacttagacatcaaaggtttgcttgatgttacatgcaagactgttgccaatatgatcaaggggaaaactcctgaggagattcgcaagaccttcaatatcaaaaatgactttactgaagaggaggaagcccaggtacgcaaagagaaccagtggtgtgaagagaagtgaaatgttgtgcctgacactgtaacactgtaaggattgttccaaatactagttgcactgctctgtttataattgttaatattagacaaacagtagacaaatgcagcagcaagtcaattgtattagcagaatattgtcctcattgcatgtgtagtttgagcacagatcccaaaccttacggccaagtttcttctagtatgatggaaagtttcttttttctttgctctgaataaaactgaactgtgggttctctataagtggcattttgggctttccctcttttttgtaaagcaatgtctgcctagtttattgtccagttaactttagtgaccttttaaaagttggcattgtaaataaaacaacttgcaaaaaagttttctggaatagaattaacaaatattatctttattcatgagttggaaactggaaaaaggcttcttgaagtaaatgttctgagtggagctactaggatgtcttccagcctcctgcagtcaaggataacactgg

SEQ ID NO: 193610 - DNA, 1042 bp, Homo Sapiens
actttgtacaaaaaagttggcgctgcgacgctgtagtggcttcgtcttcggtttttctcttccttcgctaacgcctcccggctctcgtcagcctcccgccggccgtctccttaacaccgaacaccatgccttcaattaagttgcagagttctgatggagagatatttgaagttgatgtggaaattgccaaacaatctgtgactattaagaccatgttggaagatttgggaatggatgatgaaggagatgatgacccagttcctctaccaaatgtgaatgcagcaatattaaaaaaggtcattcagtggtgcacccaccacaaggatgaccctcctcctcctgaagatgatgagaacaaagaaaagcgaacagatgatatccctgtttgggaccaagaattcctgaaagttgaccaaggaacactttttgaactcattctggctgcaaactacttagacatcaaaggtttgcttgatgttacatgcaagactgttgccaatatgatcaaggggaaaactcctgaggagattcgcaagaccttcaatatcaaaaatgactttactgaagaggaggaagcccaggtacgcaaagagaaccagtggtgtgaagagaagtgaaatgttgtgcctgacactgtaacactgtaaggattgttccaaatactagttgcactgctctgtttataattgttaatattagacaaacagtagacaaatgcagcagcaagtcaattgtattagcagaatattgtcctcattgcatgtgtagtttgagcacagatcccaaaccttacggccaagtttcttctagtatgatggaaagtttcttttttctttgctctgaataaaactgaactgtgggttctctataagtggcattttgggctttccctcttttttgtaaagcaatgtctgcctagtttattgtccagttaactttagtgaccttttaaaagttgggcattgtaaataaaacaacttgcaaaaaaagttttctgggatagaattaacaaatattaatcctttattctggagttgggaaa

SEQ ID NO: 193611 - DNA, 832 bp, Homo Sapiens; identical to SEQ ID NO: 180962

SEQ ID NO: 193612 - DNA, 971 bp, Homo Sapiens; identical to SEQ ID NO: 186308

SEQ ID NO: 193613 - DNA, 985 bp, Homo Sapiens
ctttgtacaaaaaagttgggattcctgcatggtcagtgagctgccctttgatgctcatgcccacatcctgcccagagcaggcaccgtagccccagtgccctgtacaaccctgctgccctgtcaaaccctgttcctgaccgatgaggagaagcgtctgctggggcaggaaggggtttccctgccctctcacctgcccctcaccaaggcagaggagagggtcctcaagaaggtcaggaggaaaatccgtaacaagcagtcagctcaggacagtcggcggcggaagaaggagtacattgatgggctggagagcagggtggcagcctgttctgcacagaaccaagaattacagaaaaaagtccaggagctggagaggcacaacatctccttggtagctcagctccgccagctgcagacgctaattgctcaaacttccaacaaagctgcccagaccagcacttgtgttttgattcttcttttttccctggctctcatcatcctgcccagcttcagtccattccagagtcgaccagaagctgggtctgaggattaccagcctcacggagtgacttccagaaatatcctgacccacaaggacgtaacagaaaatctggagacccaagtggtagagtccagactgagggagccacctggagccaaggatgcaaatggctcaacaaggacactgcttgagaagatgggagggaagccaagaccagtgggcgcatccggtccgtgctgcatgcagatgagatgtgagctggaacagaccttcctggcccacttcctgatcacaaggaatcctgggcttccttatggctttgcttcccactgggattcctacttaggtgtctgccctcaggggtccaaatcacttctgacaccccaagagatgtcctttagtctctgcctgaggcctagtctgcatttgtttgcatatatgagagggtacctcaatacttctgttatgtatctgtgattttatttc

SEQ ID NO: 193614 - DNA, 1053 bp, Homo Sapiens
caggtgactccctcagtctggactctaccacttgggtctcccagattttctgttacgtccttgtgggtcaggatatttctggaagtcactccgtgaggctggtaatcctcagacccagcttttggtcgactctggaatggactgaagctgggcaggatgatgagagccagggaaaaaagaagaatcaaaacacaagtgctggtctgggcagctttgttggaagtttgagcaattagcgtctgcagctggcggagctgagctaccaaggagatgttgtgcctctccagctcctggacttttttctgtaattcttggttctgtgcagaacaggctgccaccctgctctccagcccatcaatgtactccttcttccgccgccgactgtcctgagctgactgcttgttacggattttcctcctgaccttcttgaggaccctctcctctgccttggtgaggggcaggtgagagggcagggaaaccccttcctgccccagcagacgcttctcctcatcggtcaggaacagggtttgacagggcagcagggttgtacagggcactggggctacggtgcctgctctgggcaggatgtgggcatgagcatcaaagggcagctcactgaccatgcaggaatcaggcaccataaatgctgggctccactgatctagctggatggagataaggcctacatttggcccagtttccccctgcatcctctccagggcccctgcctcatagacaacctcatagagcataggagaactggttgccctgggggcagggggactgtctggatggcaggggtcctcagagatgccactgtcactgccaggagatgcttctgagcagtacacctcattgggatcaatgaaaagcttcaagaaatcttcaggctcactctcttgaaggcccggaacctctggaggggggcagtggagtcccagctccaggacggatcctgtcgagaagatatcctctgggggctccagccacgcgtccagcaggtcagggattccgagatccaggcttctgttctccaacttttttgtacaaagt

SEQ ID NO: 193615 - DNA, 1049 bp, Homo Sapiens
ttggcaacgggctatgctggcttgacagggctgggctcttcagaacagaagcatggatctcggaatccctgacctgctggacgcgtggctggagcccccagaggatatcttctcgacaggatccgtcctggagctggggctccactgcccccctccagaggttccggtaactaggctacaggaacagggactgcaaggctggaagtccggtggggaccgtggctgtggccttcaagagagtgagcctgaagatttcttgaagcttttcattgatcccaatgaggtgtactgctcagaagcatctcctggcagtgacagtggcatctctgaggactcctgccatccagacagtccccctgcccccagggcaaccagttctcctatgctctatgaggttgtctatgaggcaggggccctggagaggatgcagggggaaactgggccaaatgtaggccttatctccatccagctagatcagtggagcccagcatttatggtgcctgattcctgcatggtcagtgagctgccctttgatgctcatgcccacatcctgcccagagcaggcaccgtagccccagtgccctgtacaaccctgctgccctgtcaaaccctgttcctgaccgatgaggagaagcgtctgctggggcaggaaggggtttccctgccctctcacctgcccctcaccaaggtaacatgcttcccctaagggtatcccaacccaggggcctcaccatgacctctgaggggccaatatcccaggagaagcattggggagttgggggcaggtgaaggacccaggactcacacatcctgggcctccaaggcagaggagagggtcctcagaaggtcaggaggaaaatccgtaacaagcagtcagctcaagacagtcggcggcggaagaagagtacattgatgggctggagagcacggtggcagcctgttctgcacagaaccagaattacagaaaaaagtccaggagctggagaaggcacaacatctccttggtagctcagctccgccagctgcagacgctaattgctcaaactttc

SEQ ID NO: 193616 - DNA, 932 bp, Homo Sapiens; identical to SEQ ID NO: 180963

SEQ ID NO: 193617 - DNA, 1252 bp, Homo Sapiens; identical to SEQ ID NO: 186313

SEQ ID NO: 193618 - DNA, 982 bp, Homo Sapiens
ctttgtacaaaaaagttgggtccacgcttgtcttgggccaagccacagcctttaaacgagacggcgcccagtaacctttggaaacatcagaagctactctccattgacctggacaaggtggtgttacccaactttcgatcgaatcgccctcaagtgaggcccttgtcccctggagagagcggcgcctgggacattcctggagggatcatgcctggccgctacaaccaggaggtgggccagaccattcctgtctttgccttcctgggagccatggtggtcctggccttctttgtggtacaaatcaacaaggccaagagcaggccgaagcggaggaagcccagggtgaagcgcccgcagctcatgcagcaggttcacccgccaaagaccccttcggtgtgaccggcaacctggctgaccgtgagggccagagagagccttcacggacggcgctggtgggtgagccgagctgtggtggcggctggtttaaaagggatccagtttccagctgcaggtttgttagagtctgttctacatgggcctgccctcctgtgatgggcagaggctcctggtacatcgagaagattcctgtggatcccgtcaggagggacttagtggctctgccgccagtgagacttcccgccggcagctgtgcgcaccaaagactcgggagaactggaaaggctgtctggggtcttctgactgcaggggaaggatgtactttccaaacaaatgatacaaccctgaccaagctaaaagacgcttgttaaaggctattttctatatttattgttgggaaaagtcactttaaagacttgtgctatttggaaccaaagctattttttttgtcagtggaatgcagtttttttactattccatcatgagggaacaacatagattccatgatcttttaatgacagtacagactgagatttgaagaaacatgcaccaatctgtaaaacatagacccttcgctttatttttg

SEQ ID NO: 193619 - DNA, 1721 bp, Homo Sapiens; identical to SEQ ID NO: 186314

SEQ ID NO: 193620 - DNA, 716 bp, Homo Sapiens; identical to SEQ ID NO: 180965

SEQ ID NO: 193621 - DNA, 1064 bp, Homo Sapiens
ttggatgagagactcaaccataatagaaagaatggagaactattaaccaccattcttcagtgggctgtgattttcagaggggaatactaagaagtaagtggggaatgttgattagagcctgggctacaatgcctgggaggacaagagctgaatcgctgagagtgatggttttccatactggaacccaaaggtaaagacactcaaggacagacatttttggcagaggtaagatcttctttggtcaccatatttgagttagccctggggaagtggacatttccatgcagaatcctaaagcttcttccaggccatagtgtctgtcccacaccttctggtatctcttgatatgcagcatagatgaaaatggcaagttccctggctttccttctgctcaactttcatgtctccctcctcttggtccagctgctcactccttgctcaggtagggaatgattccatgattccacatttatgtttctgaagcagacaattatctcaattacctaattaagcagacaattacctaaatgccctcttagaacctttaactcattcccatacctggaagtccatcccaacctgaaggatcacctgtcacaaagagacaaatggtccttctgttaggattgtgttcccctctaggttctctgtatctcgccttccctgtctgagaaggacccttcctctcatgaccccaactccaaaaccctctgatggagcttcccccttgtgctgacagctcagttttctgtgcttggaccctctgggcccatcctggccatggtgggtgaagacgctgatctgccctgtcacctgttcccgaccatgagtgcagagaccatggagctgaagtgggtaagttccagcctaaggcaggtggtgaacgtgtatgcagatggaaaggaagtggaagacaggcagagtgcaccgtatcgagggagaacttcgattctgcgggatggcatcactgcagggaaagctgctctccgaatacacaacgtcacagcctctgacagtggaaagtacttgtgttatttccaagatggtgacttctatgaaaaagc

SEQ ID NO: 193622 - DNA, 1053 bp, Homo Sapiens
ttgggatagcctctgctttctttttcctttcttcggaatgagagactcaaccataatagaaagaatggagaactattaaccaccattcttcagtgggctgtgattttcagaggggaatactaagaaatggttttccatactggaacccaaaggtaaagacactcaaggacagacatttttggcagagcatagatgaaaatggcaagttccctggctttccttctgctcaactttcatgtctccctcttcttggtccagctgctcactccttgctcagctcagttttctgtgcttggaccctctgggcccatcctggccatggtgggtgaagacgctgatctgccctgtcacctgttcccgaccatgagtgcagagaccatggagctgaggtgggtgagttccagcctaaggcaggtggtgaacgtgtatgcagatggaaaggaagtggaagacaggcagagtgcaccgtatcgagggagaacttcgattctgcgggatggcatcactgcagggaaggctgctctccgaatacacaacgtcacagcctctgacagtggaaagtacttgtgttatttccaagatggtgacttctacgaaaaagccctggtggagctgaaggttgcagcattgggttctgatcttcacattgaagtgaagggttatgaggatggagggatccatctggagtgcaggtccactggctggtacccccaaccccaaataaagtggagcgacaccaagggagagaacatcccggctgtggaagcacctgtggttgcagatggagtgggcctgtatgcagtagcagcatctgtgatcatgagaggcagctctggtgggggtgtatcctgcatcatcagaaattccctcctcggcctggaaaagacagccagcatatccatcgcagaccccttcttcagagcgcccagccctggatcgcggccctggcaggaccctgcctatctcgttgctgcttctcgcagagccagttacttcttgtggagacacagaagaaaaattgctctgtccagcgagacagaaagagagcgagag

SEQ ID NO: 193623 - DNA, 2084 bp, Homo Sapiens; identical to SEQ ID NO: 186319
  misc_feature (68)..(81): n is a, c, g, or t
  misc_feature (1738)..(1746): n is a, c, g, or t
  misc_feature (1818)..(1826): n is a, c, g, or t

SEQ ID NO: 193624 - DNA, 890 bp, Homo Sapiens
  misc_feature (519)..(528): n is a, c, g, or t
ctttgtacaaaaaagttggatttaaacattacccagcatcattgtttataatcagaaactctggtccttctgtctggtggcacttagagtcttttgtgccataatgcagcagtatggagggaggattttatggagaaatggggatagtcttcatgaccacaaataaataaaggaaaactaagctgcattgtgggttttgaaaaggttattatacttcttaacaattctttttttcagggacttttctagctgtatgactgttacttgaccttctttgaaaagcattcccaaaatgctctattttagatagattaacattaaccaacataattttttttagatcgagtcagcataaatttctaagtcagcctctagtcgtggttcatctctttcacctgcattttatttggtgtttgtctgaagaaaggaaagaggaaagcaaatacgaattgtactatttgtaccaaatctttgggattcattggcaaataatttcagtatggtgtattattaaatagnnnnnnnnnnttttgtttcctaggttgaaggtctaattgatacgtttgacttatgatgaccatttatgcactttcaaatgaatttgctttcaaaataaatgaagagcagctgtccttctttcctcttttaagtgttcagctgtggcatgctcagaggttcctgctggattccagctggagcggtgtgatacccttctttttcagctgttcgtgccttcctttcttgtatccaccaaagtggagacaaatacatgatctcaaagatacacagtacctactttaattccagctgatgggagaccaaagaatttgcaagtggatgggtttggtatcactgtaaataaaagagggcctgggaattcttgcgattcc

SEQ ID NO: 193625 - DNA, 880 bp, Homo Sapiens
  misc_feature (336)..(345): n is a, c, g, or t
tttttatttacagtgataccaaaccatccacttgcaaattctttggtctcccatcagctggaattaagtaggtactgtgtatctttgagatcatgtatttgtctccactttggtggatacaagaaaggaaggcacgaacagctgaaaaagaagggtatcacaccgctccagctggaatccagcaggaacctctgagcatgccacagctgaacacttaaaagaggaaagaaggacagctgctcttcatttattttgaaagcaaattcatttgaaagtgcataaatggtcatcataagtcaaacgtatcaattagaccttcaacctaggaaacaaaannnnnnnnnnctatttaataatacaccacactgaaattatttgccaatgaatcccaaagatttggtacaaatagtacaattcgtatttgctttcctctttcctttcttcagacaaacaccaaataaaatgcaggtgaaagagatgaaccacgactagaggctgacttagaaatttatgctgactcgatctaaaaaaaattatgttggttaatgttaatctatctaaaatagagcattttgggaatgcttttcaaagaaggtcaagtaacagtcatacagctagaaaagtccctgaaaaaaagaattgttaagaagtataataaccttttcaaaacccacaatgcagcttagttttcctttatttatttgtggtcatgaagactatccccatttctccataaaatcctccctccatactgctgcattatggcacaaaagactctaagtgccaccagacagaaggaccagagtttctgattataaacaatgatgctgggtaatgtttaaatgagaacattggatatggatggtcagatgaaagccaa

SEQ ID NO: 193626 - DNA, 882 bp, Homo Sapiens; identical to SEQ ID NO: 180966
  misc_feature (559)..(568): n is a, c, g, or t

SEQ ID NO: 193627 - DNA, 895 bp, Homo Sapiens
ctttgtacaaaaaagttggctttcatctgaccatccatatccaatgttctcatttaaacattacccagcatcattgtttataatcagaaactctggtccttctgtctggtggcacttagagtcttttgtgccataatgcagcagtatggagggaggattttatggagaaatggggatagtcttcatgaccacaaataaataaaggaaaactaagctgcactgtgggttttgaaaaggttattatacttcttaacaattctttttttcagggacttttctagctgtatgactgttacttgaccttctttgaaaagcattcccaaaatgctctattttagatagtttaacattaaccaacataattttttttagatcgagtcagcataaatttctaagtcagcctctagtcgtggttcatctctttcacctgcattttatttggtgtttgtctgaagaaaggaaagaggaaagcaaatacgaattgtactatttgtaccaaatctttgggattcattggcaaataatttcagtgtggtgtattattaaatagaaaaaaaagattttgtttcctaggttgaaggtctaattgatacgtttgacttatgatgaccatttatgcactttcaaatgaatttgctttcaaaataaatgaagagcagctgtccttctttcctcttttaagtgttcagctgtggcatgctcagaggttcctgctggattccagctggagcggtgtgatacccttctttttcagctgttcgtgccttcctttcttgtatccaccaaagtggagacaaatacatgatctcaaagatacacagtacctacttaattccagctgatgggagaccaaagaattttgcaagtggatggtttggtatcactgtaaataaaa

SEQ ID NO: 193628 - DNA, 911 bp, Homo Sapiens; identical to SEQ ID NO: 180967
  misc_feature (555)..(565): n is a, c, g, or t

SEQ ID NO: 193629 - DNA, 860 bp, Homo Sapiens
  misc_feature (531)..(540): n is a, c, g, or t
ttggatctgaccatccatatccaatgttctcatttaaacattacccagcatcattgtttataatcagaaactctggtccttctgtctggtggcacttagagtcttttgtgccataatgcagcagtatggagggaggattttatggagaaatggggatagtcttcatgaccacaaataaataaaggaaaactaagctgcattgtgggttttgaaaaggttattatacttcttaacaattctttttttcagggacttttctagctgtatgactgttacttgaccttctttgaaaagcattcccaaaatgctctattttagatagattaacattaaccaacataattttttttagatcgagtcagcataaatttctaagtcagcctctagtcgtggttcatctctttcacctgcattttatttggtgtttgtctgaagaaaggaaagaggaaagcaaatacgaattgtactatttgtaccaaatctttgggattcattggcaaataatttcagtgtggtgtattattaaatagnnnnnnnnnnttttgtttcctaggttgaaggtctaattgatacgtttgacttatgatgaccatttatgcactttcaaatgaatttgctttcaaaataaatgaagagcagctgtccttctttcctcttttaagtgttcagctgtggcatgctcagaggttcctgctggattccagctggagcggtgtgatacccttctttttcagctgttcgtgccttcctttcttgtatccaccaaagtggagacaaatacatgatctcaaagatacacagtacctacttaattccagctgatgggagacgaaagaatatgcaagtggatggtttggtat

SEQ ID NO: 193630 - DNA, 933 bp, Homo Sapiens; identical to SEQ ID NO: 180968
  misc_feature (571)..(580): n is a, c, g, or t

SEQ ID NO: 193631 - DNA, 901 bp, Homo Sapiens; identical to SEQ ID NO: 186321

SEQ ID NO: 193632 - DNA, 4721 bp, Homo Sapiens; identical to SEQ ID NO: 186323
  misc_feature (4113)..(4131): n is a, c, g, or t

SEQ ID NO: 193633 - DNA, 1343 bp, Homo Sapiens; identical to SEQ ID NO: 186324
  misc_feature (447)..(534): n is a, c, g, or t

SEQ ID NO: 193634 - DNA, 958 bp, Homo Sapiens; identical to SEQ ID NO: 180970

SEQ ID NO: 193635 - DNA, 892 bp, Homo Sapiens
ttggcatttttctaagtggtcacaaatagcctactttttacataaataactggctagacctcgtatttttcactacagaagcctataatctaaagttgccaggatttaaacacattacttttaggttattgtctacatttatcctgagacctcttctcttcttattccaaaatgttgagatactggggagagataccaatatcatcaagccagaccaacagaagttccttcgatttgctcccacgggagttccgtctggtggaagtccatgacccacccctgcaccaaccctcagccaacaagccgaagccccccactatgctggacatcccctcagagccatgtagtctcaccatccatacgattcagttgattcagcacaaccgacgtcttcgcaaccttattgccacagctcaggcccagaatcagcagcagacagaaggtgtaaaaactgaagagagtgaacctcttccctcgtgccctgggtcacctcctctccctgatgacctcctgcctttagattgtaagaatcccaatgcaccattccagatccggcacagtgacccagagagtgacttttatcgtgggaaaggggaacctgtgactgaactcagctggcactcctgtcggcagctcctctaccaggcagtggccacaatcctggcccacgcgggctttgactgtgctaatgagagtgtcctggagaccctaactgatgtggcacatgagtattgccttaagtttaccaagttgctgcgttttgctgtggaccgggaggcccggctgggacagactccttttcctgatgtgatggagcaagtattccatgaagtgggtattggcagtgtgctctccctccagaagttctggcagcaccgcatcaaggactatc

SEQ ID NO: 193636 - DNA, 2183 bp, Homo Sapiens; identical to SEQ ID NO: 186327
  misc_feature (1716)..(1724): n is a, c, g, or t

SEQ ID NO: 193637 - DNA, 1456 bp, Homo Sapiens
ctttgtacaaaaaagttggtgaactggataaatcagcagatttttctcagagcaccagtattggcataaaaaataatatctgtgcttttcttgtgatgggagtttgtgaggttttaatagaatacaatttctccataagtagtttcaggtccagcaatgagtttatgcgctatgcagtgaatgtagctctgcagaaagtacagcagctaaaggaaacagggcatgtgagtggccctgatggccaaaacccagaaaagatctttcagaacctctgtgacataactcgagtcttgctatggagatacacttcaattcctacttcagtggaagagtcgggaaagaaagagaaaggaaagagcatctcactgctgtgcttggagggtttacagaaaatattcagtgctgtgcaacagttctatcagcccaagattcagcagtttctcagagctctggatgtcacagataaggaaggagaagagagagaagatgcagatgtcagtgtcactcagagaacagcattccagatccggcaatttcagaggtccttgttgaatttacttagcagtcaagaggaagattttaatagcaaagaagccctcctgctagtcacggttcttaccagtttgtccaagttactggagccctcctctcctcagtttgtgcagatgttatcctggacatcaaagatttgcaaggaaaacagccgggaggatgccttgttttgcaagagcttgatgaacttgctcttcagcctgcatgtttcgtataagagtcctgtcattctgctgcgtgacttgtcccaggatatccacgggcatctgggagatatagaccaggatgtagaggtggagaaaacaaaccactttgcaatagtgaatttgagaacggctgcccccactgtctgtttacttgttctgagtcaggccgagaaggttctagaagaagtggactggctaatcaccaagcttaagggacaagtgagccaagaaaccttatcagaagagcctcttctcaggcaaccctaccaaatcagcctgttgagaaagctatcatcatgcaactgggaactctgcttacatttttccacgagctggtgcagacagctctgccatcaggcagctgtgtggacaccttgttaaaggacttgtgcaaaatgtacaccacacttacagcccttgtcagatattatctccaggtgtgtcagagctccggaggaattccaaaaaatatggaaaagctggtgaagctgtctggttctcatctgacccccctgtgttattctttcatttcttacgtacagaataagagtaagagcctgaactatacgggagagaaaaaggagaaaccctgctgccgttgccacagccatggccagagttcttcggggaaaccaagccaatccctaacctcatctttgccatagaaacagtatgaaaaaatttctcatccacctttc

SEQ ID NO: 193638 - DNA, 1586 bp, Homo Sapiens; identical to SEQ ID NO: 186338
  misc_feature (1327)..(1340): n is a, c, g, or t

SEQ ID NO: 193639 - DNA, 1318 bp, Homo Sapiens; identical to SEQ ID NO: 186340
  misc_feature (1115)..(1165): n is a, c, g, or t

SEQ ID NO: 193640 - DNA, 1373 bp, Homo Sapiens
  misc_feature (929)..(982): n is a, c, g, or t
ctttgtacaaaaaagttggagaagatccgaggcattgtggaagagagcgtgactggtgttcacaggctgtatcagctctccaaagctgggaagctctgtgttccggccatgaacgtcaatgattctgttaccaaacagaagtttgataacttgtactgctgccgagaatccattttggatggcctgaagaggaccacagatgtgatgtttggtgggaaacaagtggtggtgtgtggctatggtgaggtaggcaagggctgctgtgctgctctcaaagctcttggagcaattgtctacattaccgaaatcgaccccatctgtgctctgcaggcctgcatggatgggttcagggtggtaaagctaaatgaagtcatccggcaagtcgatgtcgtaataacttgcacaggaaataagaatgtagtgacacgggagcacttggatcgcatgaaaaacagttgtatcgtatgcaatatgggccactccaacacagaaatcgatgtgaccagcctccgcactccggagctgacgtgggagcgagtacgttctcaggtggaccatgtcatctggccagatggcaaacgagttgtcctcctggcagagggtcgtctactcaatttgagctgctccacagttcccacctttgttctgtccatcacagccacaacacaggctttggcactgatagaactctataatgcacccgaggggcgatacaagcaggatgtgtacttgcttcctaagaaaatggatgaatacgttgccagcttgcatctgccatcatttgatgcccaccttacagagctgacagatgaccaagcaaaatatctgggactcaacaaaaatgggccattcaaacctaattattacagatactaatggaccatactaccaaggaccagtccacctgaaccacacactctaaagaaatnnnnnnnnnnnnnnnnnnnnnnnnnnnnnnnnnnnnnnnnnnnnnnnnnnnnnnctataatttcattcttgttttttcatctcattatccaagttctgcagaccacacaggaacttgcttcatggctctttagatgaaatagaagttcagggttcctcactctagtcactaaagaaggattttactctcccagcccagaaaggtgattctttctttaccatttctggggactttagtcttaattaggtaccttattaacaggaaatgctaaggtaccttctctgtggaacaatctgcaatgtctaaatcgccttaaaagagcccatttcttagctgctgaaatcagtgctcttttcacttcttccgagaagcacggatggtacctacccggcaggtaggttagatgtgggtggtgcatgttatttcccttaaaattccagccctg

SEQ ID NO: 193641 - DNA, 3172 bp, Homo Sapiens; identical to SEQ ID NO: 186343
  misc_feature (373)..(397): n is a, c, g, or t
  misc_feature (1769)..(1779): n is a, c, g, or t

SEQ ID NO: 193642 - DNA, 1818 bp, Homo Sapiens; identical to SEQ ID NO: 186347
  misc_feature (858)..(866): n is a, c, g, or t
  misc_feature (1670)..(1709): n is a, c, g, or t

SEQ ID NO: 193643 - DNA, 1020 bp, Homo Sapiens
tgtacaaaaaagttggctcaatactgccttttatttttacttgtagaaactgaaggctcagaagaggatgataaagaaaatgataagaccgaagaaatgccaaatgattcagtccttgaaaacaagtctcttcaagaaaatgaggaggaggagattgggaacctagagcttgcctgggatatgctggatttagcaaagatcatttttaaaaggcaagaaacaaaagaagcacagctttatgctgcccaggcacatcttaaactcggagaagttagtgttgaatctgaaaactatgtgcaagctgtggaggagttccagtcctgccttaacctgcaggaacagtacctggaagcccacgaccgtctccttgcagagacccactaccagctgggcttggcttatgggtacaactctcagtatgatgaggcagtggcacagttcagcaaatctattgaagtcattgagaacagaatggctgtactaaacgagcaggtgaaggaggctgaaggatcgtctgctgaatacaagaaagaaattgaggaactaaaggaactgctacccgaaattagagagaagatagaagatgcaaaggagtctcagcgtagtgggaatgtagctgaactggctctgaaagctactctggtggagagttctacttcaggtttcactcctggtggaggaggctcttcagtctccatgattgccagtagaaagccaacagacggtgcttcctcatcaaattgtgtgactgatatttcccaccttgtcagaaagaagaggaaaccagaggaagagagtccccggaaagatgatgcaaagaaagccaaacaagagccggaggtgaacggaggcagtggggatgctgtccccagtggaatgaagtttcggaaaacatggaagaggaggctgagaatcaagcttgaaagcgggcagctagtgggagggggacagtgggaggctggagctacagttgaaagcactgcatgttaagaagggggcaccagcccctcctcccaaggg

SEQ ID NO: 193644 - DNA, 1086 bp, Homo Sapiens; identical to SEQ ID NO: 186348

SEQ ID NO: 193645 - DNA, 1684 bp, Homo Sapiens; identical to SEQ ID NO: 180976

SEQ ID NO: 193646 - DNA, 897 bp, Homo Sapiens; identical to SEQ ID NO: 180977

SEQ ID NO: 193647 - DNA, 893 bp, Homo Sapiens
ctttgtacaaaaaagttgggtactgttaaggtttttgatcaattttccttcttttaggcaagaaacaaaagaagcacagctttatgctgcccaggcacatcttaaactcggagaagttagtgttgaatctgaaaactatgtgcaagctgtggaggagttccagtcctgccttaacctgcaggaacagtacctggaagcccacgaccgtctccttgcagagacccactaccagctgggcttggcttatgggtacaactctcagtatgatgaggcagtggcacagttcagcaaatctattgaagtcattgagaacagaatggctgtactaaacgagcaggtgaaggaggctgaaggatcgtctgctgaatacaagaaagaaattgaggaactaaaggaactgctacccgaaattagagagaagatagaagatgcaaaggagtctcagcgtagtgggaatgtagctgaactggctctgaaagctactctggtggagagttctacttcaggtttcactcctggtggaggaggctcttcagtctccatgattgccagtagaaagccaacagacggtgcttcctcatcaaattgtgtgactgatatttcccaccttgtcagaaagaagaggaaaccagaggaagagagtccccggaaagatgatgcaaagaaagccaaacaagagccggaggtgaacggaggcagtggggatgctgtccccagtggaaatgaagtttcggaaaacatggaggaggaggctgaaaatcaagctgaaagccgggcagcagtggagggacagtggaggctggagctacagttgaaagcactgcatgttaagaggggcacagccctcctcccaaaggaaagtgttttgtaataatgtaatttttcactttgga

SEQ ID NO: 193648 - DNA, 925 bp, Homo Sapiens
ttgggtccctgagtgagtctctggcgtcccaaattgcctgtttttctcgcaggctctattccgttcgctggttcgccacctcaggggaacgatggccatggagtccacagccactgccgccgtcgccgcggagctggtttctgccgacaaaattgaagatgttcctgctccttctacatctgcagataaagtggagagcaaccattaatctgctttctgtcactgaagatgggttgcattttgtagaatattatctaaatagaatcatacatctggatgtggatagtgaagctaagaaactattgggtttaggacagaaacatctggtgatgggggatattccagcagctgtcaatgcattccaggaagcagctagtcttttaggtaagaagtatggagagacagctaatgagtgtggagaagccttctttttctatgggaaatcacttctggagttggcaagaatggagaatggtgtgttgggaaacgccttggaaggtgtgcatgtggaagaggaagaaggagaaaaaacagaagatgaatctctggtagaaaataatgataacatagatgaaactgaaggctcagaagaggatgataaagaaaatgataagaccgaagaaatgccaaatgattcagtccttgaaaacaagtctcttcaagaaaatgaggaggaggagattgggaacctagagcttgcctgggatatgctggatttagcaaagatcatttttaaaaggcaagaaacaaaagaagcacagctttatgctgcccaggcacatcttaaactcggagaagttagtgttgatctgaaaactatgtgcaagctgtggaggagttccagtcctgccttaacctgcaggaacagtacctggaagcccacgaccgtctcctttgcagagacccactaccagctgggcctggg

SEQ ID NO: 193649 - DNA, 929 bp, Homo Sapiens
tgtacaaaaaagttgggtccctgagtgagtctctggcgtcccaaattgcctgtttttctcgcaggctctattccgttcgctggttcgccacctcaggggaacgatggccatggagtccacagccactgccgccgtcgccgcggagctggtttctgccgacaaaattgaagatgttcctgctccttctacatctgcagataaagtggagagtctggatgtggatagtgaagctaagaaactattgggtttaggacagaaacatctggtgatgggggatattccagcagctgtcaatgcattccaggaagcagctagtcttttaggtaagaagtatggagagacagctaatgagtgtggagaagccttctttttctatgggaaatcacttctggagttggcaagaatggagaatggtgtgttgggaaacgccttggaaggtgtgcatgtggaagaggaagaaggagaaaaaacagaagatgaatctctggtagaaaataatgataacatagatgaaactgaaggctcggaagaggatgataaagaaaatgataagactgaagaaatgccaaatgattcagtccttgaaaacaagtctcttcaagaaaatgaggaggaggagattgggaacctagagcttgcctgggatatgctggatttagcaaagatcatttttaaaaggcaagaaacaaaagaagcacagctttatgctgcccaggcacatcttaaactcggagaagttagtgttgaatctgaaaactatgtgcaagctgtggaggagttccagtcctgccttaacctgcaggaacagtacctggaagcccacgaccgtctccttgcagagacccactaccagctgggcttggcttatgggtacaactctcagtatgatgaggcagtggcacagttcagcaaatctattgaaggtcatt

SEQ ID NO: 193650 - DNA, 1631 bp, Homo Sapiens; identical to SEQ ID NO: 186351
  misc_feature (1156)..(1174): n is a, c, g, or t

SEQ ID NO: 193651 - DNA, 1117 bp, Homo Sapiens
gagtaagtttttggcatccacatccagggcgtgagcagcagtcagcatttgctttttgtactcttgctggagagctggtcatgacatactgctgggccagtttcatcttgttgatgagctcaccccaggtcagagttcaatagcttctgtgccatctcaatctctcggtgggtgctggctggtaggaggggaatggtctcatccacagtggccaataatgtcctcagggccaagccgacttccttcaccatagggacatactcctctggtggggctggctggattttactggacatctcgatgacagctttcaccaggcccgtcacattctcgtacaccttatcattcgaccggtccaggttggcagtaggaggggggctgatttcctggggctgaagcttgacaccctcgttgtagctgtcagcagggctgctgaggctggcaaggcttcccagatgaccgggagctccagggcgaggcggtttctttggtggagctgcaggatctggtttacccacaggctgatatatatgttggtttccaatcggaccctgaagacttccatcctccctgtcaatactgcctcgagagagtctcacatcaggtttcagaaatctttcctctttttccagccagcgctgatcttcttccatttcctgttgctgtcggattagacgctcttccatcagatgggttggcaacacttgcccaatccctcgcaggtccaatactgtagagtcctccacattgggctgccacattgctatctcctgaggtctatgattccatgaatctgtttggtccaaaagagatgcctgacctggatagatgctgccagccatggctgtgattccatgtgaccagggtagccagaaacctggtaatgattggtttgtaccatgtgctgtgggctgggataaaatccttcgctggacctcggactgggataacccggtctgctgggcttgggcggtgcttcatcagaccctccggagtcccaggacactgtggcctgtcttctggactccatcctcatgcgctcttcttgctgagccttctcttcctccaggattgtgcactgcttgactactcagaagccaacttttttgtacaaagt

SEQ ID NO: 193652 - DNA, 1339 bp, Homo Sapiens; identical to SEQ ID NO: 186354
  misc_feature (563)..(606): n is a, c, g, or t
  misc_feature (1041)..(1071): n is a, c, g, or t
  misc_feature (1201)..(1210): n is a, c, g, or t

SEQ ID NO: 193653 - DNA, 1465 bp, Homo Sapiens; identical to SEQ ID NO: 186357
  misc_feature (34)..(42): n is a, c, g, or t

SEQ ID NO: 193654 - DNA, 655 bp, Homo Sapiens; identical to SEQ ID NO: 180979

SEQ ID NO: 193655 - DNA, 1397 bp, Homo Sapiens; identical to SEQ ID NO: 186362
  misc_feature (1103)..(1124): n is a, c, g, or t

SEQ ID NO: 193656 - DNA, 1695 bp, Homo Sapiens; identical to SEQ ID NO: 186363

SEQ ID NO: 193657 - DNA, 984 bp, Homo Sapiens
ctttgtacaaaaaagttggggatgtgtttcacccctgagatgttacagttgaagagcttggttttcattgagcatttctctatttttccagttatccccgaaatttctatgtattatattttttggggaagtgaggtgtgcccagttttttaatctaacaactacttttggggacttgcccacatctctgggatttgaatggggattgtatcccattttactgtcttttaggtttacatttaccacgtttctcttctctgctccccttgcccactggggactcctctttggctccttgaagtttgctgcttagagttggaagtgcagcaggcaggtgatcatgctgcaagttctttctggacctctggcaaagggagtggtcagtgaaggccatcgttaccttgggatctgccaggctggggtgttttcggtatctgctgttcacagctctccactgtaatccgaatactttgccagtgcactaatctctttggagataaaattcattagtgtgttactaaatgttaattttcttttgcggaaaatacagtaccgtgtctgaattaattattaatatttaaaatacttcattccttaactctccctcatttgctttgcccacagcctattcagttcctttgtttggcaggattctgcaaaatgtgtctcacccactactgagattgttcagcccctgatgtatttgtattgatttgtttctggtggtagcttgtcctgaaatgtgtgtagaaagcaagtattttatgataaaaatgttgtgtagtgcatgctctgtgtggaattcagaggaaaacccagattcagtgattaacaatgccaaaaaatgcaagtaactagccattgttcaaatgacagtggtgctaatttctcttttgtggccttttaacttttgttgcccctaaaattccattttattgggaaacccatttttccacctggtctttcttgacagagtttatttct

SEQ ID NO: 193658 - DNA, 1483 bp, Homo Sapiens; identical to SEQ ID NO: 186369
  misc_feature (1213)..(1252): n is a, c, g, or t

SEQ ID NO: 193659 - DNA, 2224 bp, Homo Sapiens; identical to SEQ ID NO: 186370
  misc_feature (165)..(213): n is a, c, g, or t

SEQ ID NO: 193660 - DNA, 306 bp, Homo Sapiens
  misc_feature (23)..(33): n is a, c, g, or t
ttatcccttatataagtgaaagnnnnnnnnnnngcattccagccactcagtggagagagattggagggattaggagcagatgatagggtattattttagggagctactacagaagcttgggccagagatgatggtggcttccacaggatggcagtgagtgccctcactctgctttcttctttgaatccttgcaggtggacaggtagacagcagcccagcccagtgccttgaagagcccaagcagaagaaaggcagacaggaaaaggcctacgctgtcctcaagggagccaacttttttgtacaaag

SEQ ID NO: 193661 - DNA, 1238 bp, Homo Sapiens; identical to SEQ ID NO: 186371

SEQ ID NO: 193662 - DNA, 1186 bp, Homo Sapiens; identical to SEQ ID NO: 186373

SEQ ID NO: 193663 - DNA, 1550 bp, Homo Sapiens; identical to SEQ ID NO: 180982
  misc_feature (161)..(169): n is a, c, g, or t
  misc_feature (1046)..(1124): n is a, c, g, or t

SEQ ID NO: 193664 - DNA, 1695 bp, Homo Sapiens; identical to SEQ ID NO: 180983
  misc_feature (504)..(545): n is a, c, g, or t
  misc_feature (1421)..(1429): n is a, c, g, or t
  misc_feature (1590)..(1606): n is a, c, g, or t

SEQ ID NO: 193665 - DNA, 1011 bp, Homo Sapiens
ttggctctctgctcggccgcgggctcccggaggactgcaggcaggatgacgcaaaacacggtgattgtgaatggagttgctatggcctctaggccatcccagcccacccacgtcaacgtccacatccaccaggagtcagctttgacacaactgctgaaagctggaggttctctgaagaagtttctttttcaccctggggacactgtgccttccacagccaggattggttatgagcagctggctctaggggtgactcagatattgctgggggttgtgagttgtgttcttggagtgtgtctcagcttggggccctggactgtgctgagtgcctcaggctgtgccttctgggcggggtctgtggtgatcgcagcaggagctggggccattgtccatgagaagcacccgggcaaacttgctggctatatatccagcctgctcaccctggcaggctttgctacagctatggctgctgttgtcctctgcgtgaatagcttcatctggcaaactgaaccctttttatacatcgacactgtgtgtgatcgctcagaccctgtcttccctaccactgggtacagatggatgcggcgaagtcaagagaaccaatggcagaaggaggagtgtagagcttacatgcagatgctgaggaagttgttcacagcaatccgtgccctgttcctggctgtctgtgtcttgaaggtcattgtgtccttggtttccttgggagtaggtcttcgaaacttgtgtggccagagctcccagcccctgaatgaggaaggatcagagaagaggctactgggggagaattcagtgcccccttcgccctctagggagcagacctccactgccattgtcctgtgagctgccaaagaccccacggggtgcccgcatgtccctgtctagggcagcccagggcccccactcctggctcctcacacttgcctcccctatggccgctctccagaccctcctcctttcttctctcacatccgcacctgctgttcccactcgggg

SEQ ID NO: 193666 - DNA, 1759 bp, Homo Sapiens; identical to SEQ ID NO: 186374
  misc_feature (1583)..(1599): n is a, c, g, or t
  misc_feature (1678)..(1690): n is a, c, g, or t

SEQ ID NO: 193667 - DNA, 1770 bp, Homo Sapiens; identical to SEQ ID NO: 180984
  misc_feature (1610)..(1629): n is a, c, g, or t

SEQ ID NO: 193668 - DNA, 2065 bp, Homo Sapiens; identical to SEQ ID NO: 186376

SEQ ID NO: 193669 - DNA, 2072 bp, Homo Sapiens; identical to SEQ ID NO: 186378

SEQ ID NO: 193670 - DNA, 1584 bp, Homo Sapiens; identical to SEQ ID NO: 186379

SEQ ID NO: 193671 - DNA, 1029 bp, Homo Sapiens; identical to SEQ ID NO: 186380

SEQ ID NO: 193672 - DNA, 1851 bp, Homo Sapiens; identical to SEQ ID NO: 186383

SEQ ID NO: 193673 - DNA, 1135 bp, Homo Sapiens
ttggggaagaagaacctgatcctgaagagtggcagctcagtggtgattctaccttgaataccaatgacctaacacacttaagagtacaggtggtagatgaagaaggggaccaacaacatcaagaaggaaaaagacttcggagggtagcttgcacctgtcccaactgtaaagaaggtggtggaagaggtaccaatcttgggaaaaagaagcaacacatttgtcatataccaggatgtggtaaagtctatgggaagacctcacatctgagagctcatctgcgttggcattctggagaacgcccttttgtttgtaactggatgtactgtggtaaaagatttactcgaagtgatgaattacagaggcacagaagaacacatacaggtgagaagaaatttgtttgtccagaatgttcaaaacgctttatgagaagtgaccaccttgccaaacatattaaaacacaccagaataaaaaaggtattcactctagcagtacagtgctggcatctgtggaagctgcgcgagatgatactttgattactgcaggaggaacaacgcttatccttgcaaatattcaacaaggttctgtttcagggataggaactgttaatacttccgccaccagcaatcaagatatccttaccaacactgaaatacctttacagcttgtcacagtttctggaaatgagacaatggagtaaatattacacaaatacttattcattgtggttatttttatacagtagtgagaagaatattgttcctaagttcttagatatctttttattgatgtgcaaaaatttttggattgacagtaacttggttatacatgacactgaaatgccttactttgtatgatattccatagtatattaaaaatggtaaaattgcatgggttttgtaggtacttttggaatctagaagaaatgaaattttaccaagttatataaagagaaaattgaatttaacaatgcgaatggtagtctaaccaaatgcatcaatcctgtgtggtttagtgtaaaaatgagaacatgttggtatttatctattgtaagataaaaagctggtgggtgaagaaatcatgttatgataaaaattttgtaattttcttgatgactggaatttttattatgcataa

SEQ ID NO: 193674 - DNA, 1746 bp, Homo Sapiens; identical to SEQ ID NO: 186389
  misc_feature (1358)..(1381): n is a, c, g, or t
  misc_feature (1483)..(1534): n is a, c, g, or t

SEQ ID NO: 193675 - DNA, 937 bp, Homo Sapiens; identical to SEQ ID NO: 186395

SEQ ID NO: 193676 - DNA, 2541 bp, Homo Sapiens; identical to SEQ ID NO: 186396
  misc_feature (281)..(295): n is a, c, g, or t

SEQ ID NO: 193677 - DNA, 1352 bp, Homo Sapiens
  misc_feature (164)..(173): n is a, c, g, or t
  misc_feature (406)..(415): n is a, c, g, or t
ttagtacattttgatgagtgcataacaagtttctgttggtttgtatttttggggggagccaagaaaaaaggcaagattctccaattgcacaaattgcactatttgtgttcccagcattaacaggcagaaacagtaacacttaaacaaaatgtgcagcagaagannnnnnnnnnactcaaaggacctgaattcagtgggcatgtccttttaagttcactttgtcgtagatagtttaagatatggtcatttctcagtccttaattctccaagtctagatttataaattaacaatgtgaatcctgttgtgaaattggggaaataatgtccacctcaatttaactgataaccaaagatgcttttcacatcaaagaaatgatcaaaaaggctgtgtcacattccaaagccnnnnnnnnnnttaacaagaatgcaaacacgatgaataatgtaccactgccaagactttgccaacagtggagcttcagcgacgctgtcctgtgaagcggccctccatttgcccggttcctcttccagagccaagtttctgtgccatgccaccccttggaggaggtcctcttccatcacgatcacgcatcattccaccacccacaattccacgtggaccaccgggacctcgatcattgcgcctaatatccctgcgatcatcaccaccacctctggtttctcgctctcttgcagctcttgtttttttctcttccacatttaaacgtacttcccctcgaaacataatcggttttgcaattaagattctctgaactggttcagagtcatcaaaaaccacaaaaccaaaatttggaagctttcccccaacacccttggtattgatgcgaagttccacaacgtttccaaaactcatgaagaattcctttagctcattttcatcaatatcatgtggcaagttaccaacaaaaagttgatgactatctggatagcgaattattctacggttgtcagagtcattctgttccatatctcctctgcctggtcttggtcctctaggaggaaaaccaggtcgttctctaggtcgttgttcacgcacacgaggtggctgagattgaacttctggtttagcttcgactcttggctttggtggttcttgtggcagagaaacaggttctgccggaggaggagtagtagatttctcctctagttcttctaagttcttctcctccacttgtggtttcagctcttcagtctttgtttcagattctggctcaggttcaggttcatgagaggattcttccaaaggctcctctatgccattagtcacagggtgagcttcatagtaaccactgttagcattttctccaacttttttgtacaaagttggctat

SEQ ID NO: 193678 - DNA, 667 bp, Homo Sapiens
  misc_feature (107)..(161): n is a, c, g, or t
ctttgtacaaaaaagttggctttattaataccacttttaaagaagcagttgttttattgtcaatgttttttttcccccaagcatattttcttgtatttctgtttccnnnnnnnnnnnnnnnnnnnnnnnnnnnnnnnnnnnnnnnnnnnnnnnnnnnnnnnatttccaattcaggatattgccctgccatccatgaaaactgttctggcaccaaaagtaatgacaaatgttaagtgtaataatagaaaagtagagcaaagagccattcagcttcagtctttacataccatgaataaaacattaaaacatcatatggagaagtttacatggtgattgttcacctgcagtactgtggagttttaacattttgtcctcttttcagtgaaacagagtaaaaatattcatctaccattactgttatttgctgattttgttttattttttgatggtaatattctatccttatgacactattgcaaccaaattggctttaccatcttggctttagtatgtatagaagacaatggattaccatctttattgctgtaatgtgttaagcattatatgctagtagaatctagtttaattgtttcaggtggaaagtattctttgagtttccatattgaatgtgttttggactaaacaaacaataaactactgatgtctg

SEQ ID NO: 193679 - DNA, 2328 bp, Homo Sapiens; identical to SEQ ID NO: 186398
  misc_feature (1632)..(1641): n is a, c, g, or t
  misc_feature (1874)..(1883): n is a, c, g, or t

SEQ ID NO: 193680 - DNA, 564 bp, Homo Sapiens
tttgtacaaaaaagttggggcagctttcctgggggactagagctccttctggccatgttatatgaaatgtaattcttattttataaataatgtgatgtaaatgtaactggtgccccctccccgatgtgactgagggtgagtgagtggtggcggggctgctccttcccacccctcagaacagctctgatcctcgttaatacctggctgcgtgtgcagctgaggagggaaaaaacaaacaagcctaaatacctgttaggattggagggtctgggtgggcctgggcctagcaatcaagcttctacctgtaccttatgtaaggtagaccctcctagtgtcagtacctgagctagtttacctcagttccgcaggcaggacagccggtccgggaaccctgagtgagaatgagtgtggatgtgtacagtacacgcactggacggcagcgggaggctgggactttccattacaaatagagacttcattcctgttgagtctagttggaatttttagtatgaatgtgagatttttcttttttgaaggttgacattaagccaacttttttgtaca

SEQ ID NO: 193681 - DNA, 2655 bp, Homo Sapiens; identical to SEQ ID NO: 186399
  misc_feature (2260)..(2322): n is a, c, g, or t

SEQ ID NO: 193682 - DNA, 1720 bp, Homo Sapiens; identical to SEQ ID NO: 186406
  misc_feature (460)..(543): n is a, c, g, or t

SEQ ID NO: 193683 - DNA, 1157 bp, Homo Sapiens; identical to SEQ ID NO: 186407

SEQ ID NO: 193684 - DNA, 2194 bp, Homo Sapiens; identical to SEQ ID NO: 186408
  misc_feature (1678)..(1705): n is a, c, g, or t

SEQ ID NO: 193685 - DNA, 781 bp, Homo Sapiens
  misc_feature (319)..(377): n is a, c, g, or t
ttgggtaaaaataagtggcatccataggatcatgatttttaatttgttgcctctgaagatttcactccatcaagatctgccaatcttcaatattctggctaaatcttggtatgtggtttttaaacagtcactccgtttcaaagtctgtctttccttatagaatgtggaaattatttctccataccttgtgattttgacctgagtgctaagagaatcactctccttacctagttatctacaaatgttcattccagaaatgtttagttactgaattgaatgaagacatctcagtacactcttttaggtcatagtagttgcnnnnnnnnnnnnnnnnnnnnnnnnnnnnnnnnnnnnnnnnnnnnnnnnnnnnnnnnnnnctaatgttaggagatatagtcctagatatttccatgggccagtgtgatgacttttttttaaatgaggttcagtaccataatgtttatttactggaagataatgcatttataagcattttaaaattctgtaaagtgggttagaaatatttataattttacaggcaggacagcatttgacttttatttaaaaggcggcactacttatgtaaatctgagctgtgggatatttcttgctttaagagagagacagaatctctcactgaaactcatggtcatgattttgtataatatagttcatactgtgtctgtgagtttcttcagttacaaatgggcatttagtatagttatattgactataacatgtaagtaaatagctttctactgaccctaagttatcaaggtgg

SEQ ID NO: 193686 - DNA, 970 bp, Homo Sapiens
actttgtacaaaaaagttggtgttcttgaagacaggaggaggctcccgctgttaataaatattgtttcattcttctctcttcctgtcaccttctgccaagacattgatggcttctgacatcttatttggtgtctcaaagctgtatttccaagacagtggtacaaggtgacccttaattacccgtatcatggttcttgaccagcacattcaatcctccaacctaccctactgccatgaccttccgcacatctctaagttttatctttgcaatactcaaggttctcggaaatttgctaatggttgtgataaaccatacagcttgagccagtgaggcagattgggctggtgccttcgtctgagttttcctgctttcctgcctcgtgcagattctgaggtatatctgctgccttggaagacataagaagcagtgatactccctggctcggttattttctccatacaatgcacacatggtacaatgatagaaggcaaaattgccactgtcttcttttttttctcatatatctaaggaagatatatcaggttgtgcctcatgtaccgcttctagtgaaatgtagaggaaggctcaaaggagtcaacatttagatctggaagggacaagtcatgccttgggcctagaataccctgatgagaaaagagaagaggaagggaggccatatctacaacacagcctctcggcactgctgctccttattttaactttgtcttgcattgtcctgtatttatcacagtttctgttgaacagcttttcaagtatttggggagtttatcttgccatcctccccttctggttctctgcacccacctgtcccactgcagttccttccgtgctctgtgactttaagagaagaatgggggaggggtcccggattttatgtttgtttgttttttctccttagcagtaggacttgatattttccgtttggaagactaaagatgataaactggg

SEQ ID NO: 193687 - DNA, 1380 bp, Homo Sapiens; identical to SEQ ID NO: 180996
  misc_feature (181)..(211): n is a, c, g, or t
  misc_feature (1137)..(1203): n is a, c, g, or t
  misc_feature (1306)..(1322): n is a, c, g, or t

SEQ ID NO: 193688 - DNA, 1207 bp, Homo Sapiens; identical to SEQ ID NO: 180997
  misc_feature (62)..(80): n is a, c, g, or t
  misc_feature (1056)..(1086): n is a, c, g, or t

SEQ ID NO: 193689 - DNA, 1560 bp, Homo Sapiens; identical to SEQ ID NO: 180998
  misc_feature (98)..(114): n is a, c, g, or t
  misc_feature (217)..(235): n is a, c, g, or t
  misc_feature (1210)..(1278): n is a, c, g, or t

SEQ ID NO: 193690 - DNA, 1283 bp, Homo Sapiens; identical to SEQ ID NO: 186412
  misc_feature (292)..(319): n is a, c, g, or t
  misc_feature (823)..(850): n is a, c, g, or t
  misc_feature (876)..(936): n is a, c, g, or t
  misc_feature (1159)..(1189): n is a, c, g, or t

SEQ ID NO: 193691 - DNA, 5590 bp, Homo Sapiens; identical to SEQ ID NO: 180999
  misc_feature (461)..(488): n is a, c, g, or t
  misc_feature (3039)..(3070): n is a, c, g, or t
  misc_feature (4482)..(4534): n is a, c, g, or t
  misc_feature (4560)..(4620): n is a, c, g, or t
  misc_feature (4742)..(4759): n is a, c, g, or t
  misc_feature (5040)..(5056): n is a, c, g, or t
  misc_feature (5159)..(5177): n is a, c, g, or t
  misc_feature (5182)..(5226): n is a, c, g, or t

SEQ ID NO: 193692 - DNA, 1086 bp, Homo Sapiens; identical to SEQ ID NO: 186414
  misc_feature (374)..(384): n is a, c, g, or t
  misc_feature (826)..(834): n is a, c, g, or t

SEQ ID NO: 193693 - DNA, 1323 bp, Homo Sapiens
  misc_feature (1239)..(1250): n is a, c, g, or t
ctttgtacaaaaaagttggaggactggaagcttaccccaaaattagacgcaacaaaatctggggaggacagaatggtggaattctagtttataattctggtctaggctgtatagaagacaatgaaatatttgacaatgcaatggctggagtctggattaagacagatagtaatcctacactaagaagaaataaaatccatgatggaagagatggtggcatctgtatatttaatgggggtcgaggtctccttgaagaaaatgatattttcaggaatgctcaagcaggtgttctcatcagcactaatagtcatccaatcttaaggaaaaacagattatttgatggatttgccgcaggtattgaaattacaaatcacgcaactgcaacactagaaggcaatcagatttttaacaaccggtttggaggcttatttttagcatctggtgttaatgtgacaatgaaagataacaaaataatgaacaatcaagatgccatagaaaaggctgttagtagaggccaatgtttatataaaatatcaagttataccagctatcccatgcatgatttctacagatgtcatacttgtaacaccacagatcgaaatgccatatgtgtgaactgcattaagaagtgccatcagggacatgatgtagagtttattagacatgataggtttttctgtgactgtggtgctggaacactgtctaatccttgtacattagctggtgagcctacacatgatacagatacactatatgactctgctccacctatagaatctaatacattgcagcacaactgaattccttccctaaagaaaaagtcctgccattgtaacatcataacttaaaacacttttttggaagaagatttaaaatatttgcccatgctacaggaagagactgtattaaaaatggatacacaaggtcagttgacactatgaagctcaagctaccaaaaagaaagtggcaatatattgactcaggatctcaaagctgggtgttttagcattactgtgtaaagacttgaagggacagaagtgaagaaaataagctgcaattttgtacagataccaacttctgaaaagctggtgtttttacaactagcattgaatgcagtccaatttgcagtagtaatcttcaatagacaagcagctttgttgctgcctttatggacatgggtaccaattgcttttgtaatatggtaaaaatgtgagctagcacttctgcgttccttttgannnnnnnnnnnnaacatgtattcagattgagaaatatgattttaatgctttaatctcatgtagtttgttttaatttcaagcaaaa

SEQ ID NO: 193694 - DNA, 1249 bp, Homo Sapiens
ttggtgaaaatgttggactatatataacagatcatgcacagggaatatatgaggataatgaaatttccaataatgcgttagctgggatttgggttaaaaatcatggaaacccaattattagacggaatcatattcatcatggacgtgatgttggtgtgttcacatttgatcatggcatgggttactttgaaagttgcaatatacacagaaataggatagcaggctttgaagtaaaagcctatgctaaccctacagtggttcgatgtgaaattcaccatgggcagactggaggaatatatgtccatgaaaaaggaagaggacaattcatagagaataaaatctatgcaaacaactttgcaggtgtatggattacctcaaatagtgacccaacaataaggggaaattctatatttaatggaaatcaaggaggagtttacatctttggtgatggacgaggccttattgaaggaaatgacatttatggcaatgcattagcaggaattcaaattaggacaaacagttgtccaattgttcggcataacaaaattcatgatggccagcatggtgggatttatgtgcatgaaaagggacaaggagtaatagaagagaatgaagtttatagtaacactctagctggagtctgggtgacaactggcagcactccagtactgagaagaaaccggatacacagtggcaagcaggttggtgtttatttttatgacaatggacatggagtgctagaagacaatgatatctataatcatatgtattcggggttcagataaggactggaagcaacccccaaattagacgcaacaaaatctggggaggacagaatggtggaattctagtttataattctggtctaggctgtatagaagacaatgaaatatttgacaatgcaatggctggagtctggattaagacagatagtaatcctacactaagaagaaataaaatccatgatggaagagatggtggcatctgtatatttaatgggggtcgaggtattgttgttaattttgcattagtgaaaaatccagttttccattattcttccatatctttaatgatcaatgacattgctaactaagttataaatgagtgaatctcaagtctttttccttatcaagttgaactggtttaggagattagtgcctagagttaagagacaaatgtttacatacttttccttttgtagccactttgagtctgcagttgtcagtaagcctttttaaagatagaattt

SEQ ID NO: 193695 - DNA, 1409 bp, Homo Sapiens; identical to SEQ ID NO: 186416

SEQ ID NO: 193696 - DNA, 1982 bp, Homo Sapiens; identical to SEQ ID NO: 186417

SEQ ID NO: 193697 - DNA, 1629 bp, Homo Sapiens
ttgggccatcccctcgagaagtgactgttacagaacggctcctcctggatggcccaccacctcattcaccagagactcctcaatttccccccacaactggagctgtactgtacactgttaagagaaaccaggttgggcctgaggttcgctcctgccccaaggcatcccccagacttcagaaagagagggagggccaaaaggcagtgagtgagtcagaggctttgatgctggtctgggatgcatcagaaactgagaaattgcctggtaccgtggaaccccctgcttccttcctgagtcctgtttcctcaaagaccagagatgcagggagaagacatgtgtccgggaaaccagacactcaagagagatggctgccctcaagcagagctcgggtgaagacaagagacaggacgtgccctgtccatgaatctccatcaggaattgacacctcagagacttctcccaaagcccctagagggggtttggctaaagacagtggaacacaggccaagggtccagagggggagcagcagccaaaggccgcagaacctacggtgtgtgccaacaacagcaaggtcagctccactggggaaaaggttgtcctgtggacaaggtaggtaagggtggatgacgtgtgtttggaaaagagcatagaccacatccatgtggctctctagggttaatcatgatacctgggttacagggaagctgaccgtgtgatcctcaccatgtgccaggagcaaggggcacagccacagactttcaacatcatctcccagcagctgggaaataagacccctgctgaggtttcccaccgttttcgagaactcatgcagctcttccacactgcctgtgaagccagctctgaggatgaggatgatgcaaccagtaccagcaatgcagaccagctgtctgaccatggggaccttctgtctgaagaggagctggatgaatgagactctgggaatcatctacacaggaccaaacccaacaggcgccctggcaccggggagggggtagttgtactctgcttgtacagtccttgagcccagtttacagatctggagagcaggaggccaggacaaggacaaaggctggaggatggagtaggacccaggggctctgccatcctaggcatcattcaaggtcttttatgaagactttacagatgtcctctgtaaatagcatcgagagtggagttcagctcctttctctacttttttttggtctgatggcacatatttattgttctgtggtctaatcacagtgtttctaaatgtaaaaagtgcatatgttggtgtagctagtcccgcgacattgagctcctctgcatgaagacactgggctcctgcatccagctgtttttattgcaaactagctcctttctcccacactgggaactttagtccacgaggctgtcaccaccctggtagcactgggccaggctttgtagctcctgcagcagctctgctacgtcatcgtgctccactccagcatccatgaagctggcccagcgccgcaagtcgagtttggtgaggtctctggccaaggcttccagggtctgggtgcgggacgaagaggaacacagtgccccaaacactgggatgctctccactgctgtggagggagagg

SEQ ID NO: 193698 - DNA, 1184 bp, Homo Sapiens
  misc_feature (176)..(187): n is a, c, g, or t
ttgattttaaaattcctatcttctaagtaatcaaatacagcaaaattaaactattctgccaaaccataccagttcagagtctgaaaccggttctttgctttggtgaatgtttggtaaaataaatcactgtttcactccatgagaagttttacatcagagcactcaattcacaggcnnnnnnnnnnnngttactttttaaatgaaagcgtttaaagaacactgctgaataaaaatatgtggtctttacaatgagtaacatatcatctatgaaaacaaaccatttaatcatataaaacaaagaccatatttttaaatcagatcctggacagtttaaacaaaaattttaatttgtggtttatttcataatcccaaactggatctttcatttcttcttctaaacagtccactatgaaacttttcttagaagcaattaacccaaaacaccaaaatcatttccctagcagttgctgctaataaactggaactgtatatcccaagtccaagaaagatgtgcaaatgaaatgcttcttgcttcacccttattatctggagcccctagagtcttattttccttttggacatgaattcaggaacagttcaatatacctatgatgaacgtgggaccgatccttgagcatcgctgcaacagcatcctcatgggtctcaaagtgcacatcagcttctccagtggccttcccactggagctgtattccatggtgattctaacaggcttgagtggagcaaaaaagtttataatgtcttgggcattggcttggaaaggtaatcctctcatgtggacaaaatgcagagaagacgtagttccaaaatcagcagcctctggaagcttttctggcacctccttaggcaattctatttccttctcactttcaaaagctgtcatgggttgaatatcctcatttacttcatgttcttcaaagaccatttctggctcagttatatacttagcagtaggaaaagatgcgattttctttcccttataagaaccgacatgtgttcgaacttcattccttctgcttggaaatatctcgatgtatcgattaccaatttcttccctgtgtttcaacagggcttggttggccatttctggttcttcaaattgcacataggcttcccctgtttttcgcctccctctatagtccatcacccaacttttttgtacaaa

SEQ ID NO: 193699 - DNA, 1597 bp, Homo Sapiens; identical to SEQ ID NO: 186423

SEQ ID NO: 193700 - DNA, 1598 bp, Homo Sapiens; identical to SEQ ID NO: 186427
  misc_feature (1140)..(1187): n is a, c, g, or t
  misc_feature (1437)..(1447): n is a, c, g, or t

SEQ ID NO: 193701 - DNA, 744 bp, Homo Sapiens; identical to SEQ ID NO: 186430
  misc_feature (48)..(63): n is a, c, g, or t
  misc_feature (588)..(622): n is a, c, g, or t

SEQ ID NO: 193702 - DNA, 1896 bp, Homo Sapiens; identical to SEQ ID NO: 181002
  misc_feature (1554)..(1562): n is a, c, g, or t

SEQ ID NO: 193703 - DNA, 2333 bp, Homo Sapiens; identical to SEQ ID NO: 186432

SEQ ID NO: 193704 - DNA, 810 bp, Homo Sapiens
ctttgtacaaaaaagttgggtagctgaggggcagtgtcagcgaggaagcgagatcgtggctggactggagaagatgcctgcccgccgggcttccttatcccaccccagagacatcggctgtgaccagcacaccagctgcccggtggggcagacctgctgcccgagcctgggtgggagctgggcctgctgccagttgccccatgctgtgtgctgcgaggatcgccagcactgctgcccggctggctacacctgcaacgtgaaggctcgatcctgcgagaaggaagtggtctctgcccagcctgccaccttcctggcccgtagccctcacgtgggtgtgaaggacgtggagtgtggggaaggacacttctgccatgataaccagacctgctgccgagacaaccgacagggctgggcctgctgtccctaccgccagggcgtctgttgtgctgatcggcgccactgctgtcctgctggcttccgctgcgcagccaggggtaccaagtgtttgcgcagggaggccccgcgctgggacgcccctttgagggacccagccttgagacagctgctgtgagggacagtactgaagactctgcagccctcgggaccccactcggagggtgccctctgctcaggcctccctagcacctccccctaaccaaattctccctggaccccattctgagctccccatcaccatgggaggtggggcctcaatctaaggccttccctgtcagaagggggttgtggcaaaagccacattacaagctgccatccccctccccgtttcagtggaccctgtggccgggtgct

SEQ ID NO: 193705 - DNA, 925 bp, Homo Sapiens
ttgggtctgagcgctacccggttgctgctgcccaaggaccgcggagtcggacgcaggcagaccatgtggaccctggtgagctgggtggccttaacagcagggctggtggctggaacgcggtgcccagatggtcagttctgccctgtggcctgctgcctggaccccggaggagccagctacagctgctgccgtccccttctggacaaatggcccacaacactgagcaggcatctgggtggcccctgccaggttgatgcccactgctctgccggccactcctgcatctttaccgtctcagggacttccagttgctgccccttcccagaggccgtggcatgcggggatggccatcactgctgcccacggggcttccactgcagtgcagacgggcgatcctgcttccaaagatcaggtaacaactccgtgggtgccatccagtgccctgatagtcagttcgaatgcccggacttctccacgtgctgtgttatggtcgatggctcctgggggtgctgccccatgccccaggcttcctgctgtgaagacagggtgcactgctgtccgcacggtgccttctgcgacctggttcacacccgctgcatcacacccacgggcacccaccccctggcaaagaagctccctgcccagaggactaacagggcagtggccttgtccagctcggtcatgtgtccggacgcacggtcccggtgccctgatggttctacctgctgtgagctgcccagtgggaagtatggctgctgcccaatgcccaacgccacctgctgctccgatcacctgcactgctgcccccaagacactgtgtgtgacctgatccagagtaagtgcctctccaaggagaacgctaccacggacctcctcactaagctgcctgcgcacacagtgggggatgtgaaatgtgacatggaag

SEQ ID NO: 193706 - DNA, 949 bp, Homo Sapiens
tacaaaaaagttggttgaatacagagacgctgtctgcttgctgccttaagacagctagctgaattgctgattaacttttaaaatacccagcttggtttatttttcttagaatctgttgctaagactggggacgctgttttcttttacaaagggaaatctaagttaatttcaaggcattcgaaatggggaaagactattattgcattttgggaattgagaaaggagcttcagatgaagatattaaaaaggcttaccgaaaacaagccctcaaatttcatccggacaagaacaaatctcctcaggcagaggaaaaatttaaagaggtcgcagaagcttatgaagtattgagtgatcctaaaaagagagaaatatatgatcagtttggggaggaagggttgaaaggaggagcaggaggtactgatggacaaggaggtaccttccggtacacctttcatggcgatcctcatgctacatttgctgcatttttcggagggtccaacccctttgaaattttctttggaagacgaatgggtggtggtagagattctgaagaaatggaaatagatggtgatccttttagtgcctttggtttcagcatgaatggatatccaagagacaggaattctgtggggccatcccgcctcaaacaagatcctccagttattcatgaacttagagtatcacttgaagagatatatagtggttgtaccaaacggatgaagatttctcgaaaaaggctaaacgctgatggaaggagttacagatctgaggacaaaattcttaccattgagattaaaaaagggtggaaagaaacaccaaaattacttttcccagagaaagagatgaaacaccaatagtattccagcagacattgtttttatcattaaagacaaagatcatccaaaatttaaaagggatggatcaaatataatttatactgctaaaatta

SEQ ID NO: 193707 - DNA, 1943 bp, Homo Sapiens; identical to SEQ ID NO: 186438
  misc_feature (1502)..(1551): n is a, c, g, or t

SEQ ID NO: 193708 - DNA, 1561 bp, Homo Sapiens
  misc_feature (192)..(242): n is a, c, g, or t
ttggcaatttcatgtgtttaaaaacatcatgggaaaaatgcttagaggttactattttgactacaaagttgagtttttttctgtagttaccataatttcattgaagcaaatgaatgagtttgagaggtttgtttttatagttgtgttgtattacttgtttaataataatctctaattctgtgatcaggtacnnnnnnnnnnnnnnnnnnnnnnnnnnnnnnnnnnnnnnnnnnnnnnnnnnngggccatttctaagcctaccagatctgctttatgaaatccaggggaccaatgcattttatcactaaaactatttttatataattttaagaatataccaaaagttgtctgatttaaagttgtaatacatgatttctcactttcatgtaaggttatccacttttgctgaagatattttttattgaatcaaagattgagttacaattatacttttcttacctaagtggataaaatgtacttttgatgaatcagggaatttttttaaagttggagtttagttctaaattgactttacgtattactgcagttaattccttttttggctagggatggtttgataaaccacaattggctgatattgaaaatgaaagaaacttaaaaggtgggatggatcatgattactgtcgataactgcagataaatttgattagagtaataattttgtcatttaaaaacacagttgtttatactgcccatcctaggatgctcaccttccaagattcaacgtggctaaaacatcttctggtaaattgtgcgtccatattcattttgtcagtagccaggagaaatggggatgggggaaatacgacttagtgaggcatagacatccctggtccatcctttctgtctccagctgtttcttggaacctgctctcctgcttgctggtccctgacgcagagaccgttgcctcccccacagccgtttgactgaaggctgctctggagacctagagtaaaacggctgatggaagttgtgggacccacttccatttccttcagtcattagaggtggaagggaggggtctccaagtttggagattgagcagatgaggcttgggatgcccctgctttgacttcagccatggatgaggagtgggatggcagcaaggtggctcctgtggcagtggagttgtgccagaaacagtggccagttgtatcgcctataagacagggtaaggtctgaagagctgagcctgtaattctgctgtaataatgatagtgctcaagaagtgccttgagttggtgtacagtgccatggccatcaagaatcccagatttcaggttttattacaaaatgtaagtggtcacttggcgattttgtagtacatgcatgagttaccttttttctctatgtctgagaactgtcagattaaaacaagatggcaaagagatcgttagagtgcacaacaaaatcactatcccattagacacatcatcaaaagcttatttttattcttgcactggcagaatcgtaagtcaactgttcttgaccatggcagtgttctggctccaatggtagtgattcccaataatggttctg

SEQ ID NO: 193709 - DNA, 1522 bp, Homo Sapiens; identical to SEQ ID NO: 186441

SEQ ID NO: 193710 - DNA, 2404 bp, Homo Sapiens; identical to SEQ ID NO: 186442
  misc_feature (355)..(415): n is a, c, g, or t
  misc_feature (2171)..(2180): n is a, c, g, or t

SEQ ID NO: 193711 - DNA, 1030 bp, Homo Sapiens
tctgcaactattcccataatctgccacttggaaaattggagcttctgggtctttattaattgccacaattgtcttgctgtctttcatcccagctaaatgttggatggctccagatattccaacagcaatataaagttctggtgctactatttttcccgtctgtccaacttgcatgtcattgggaacaaagccagcatcaacagcagcacgggaagcaccaactgcagcatgtagttgatctgccaagtcatataacaacttaaagttctctccactcttcaagcctcgaccaccagataccaccactttggcacctgttagctctggtcgatcactttttgttaatttctggtcaagccactctgatatttccactggtgaagtacttgatgccttttctgaactggcactaccgccacttgttgctgcagcatcaaaggatgttccacggacagaaaacactttcactttctcatcacacttcactgtacatagagcatttcctgcataaatagttctcacaaatgtgtcaggtgacttgattgcaatgatgtcagaaatcggggcaacctcaagtttggctgctactctgggcaaaaggttctttccgaaggcagatgctccagcacagatgtgtgtgtaattgaactgcttctgagttgccaaaatcaatggtgtcagttcctctggaagtaggcctttgtacacatcatgctgagccaccagaacttttgctatgcctgctactttacagagatcttgtgccaccttgtcacatttggttccagctactaagcaggacacttcacctccaaggcgtgtggctgcagtaatggtatttaaagtaatgggtgctagggaatcatttgcatgctcagctattaccagggtactctgaaatcgtagcaatgaggccgcccgccggagctgccccggagccgccgctcggaacatggtctccgcttccgccgcaacctcggccttacagcagccccgtgcccggccaactggcgcggcctcagccagccaa

SEQ ID NO: 193712 - DNA, 1843 bp, Homo Sapiens; identical to SEQ ID NO: 186444
  misc_feature (1705)..(1731): n is a, c, g, or t

SEQ ID NO: 193713 - DNA, 831 bp, Homo Sapiens
ctttgtacaaaaaagttgggacgtcacagtccgtattcgagaaacatcggcatcggggacatgttccacgagaagcacgagagtgaaaacctctactccatcgcctgcgacaagccacagcaggtgcgcaacatgacgctgttctccgacctggtcgctgagaagttcatcgatgacatggaggacgtcctctgcccggaccctcagatcgtgtgcccagaccttccctgccaaacagagctgtccgtggcacagtgcacgcagcggcccgtggacatcgtcttcctgctggacggctccgagcggctgggtgagcagaacttccacaaggcccggcgcttcgtggagcaggtggcgcggcggctgacgctggcccggagggacgacgaccctctcaacgcacgcgtggcgctgctgcagtttggtggccccggcgagcagcaggtggccttcccgctgagccacaacctcacggccatccacgaggcgctggagaccacacaatacctgaactccttctcgcacgtgggcgcaggcgtggtgcacgccatcaatgccatcgtgcgcagcccgcgtggcggggcccggaggcacgcagagctgtccttcgtgttcctcacggacggcgtcacgggcaacgacagtctgcacgagtcggcgcactccatgcgcaagcagaacgtggtacccaccgtgctggccttgggcagcgacgtggacatggacgtgctcaccacgctcagccctgggtgaccgcgccgccgtgttccacgagaaggactatgacaggctggcgcaacccggcttctttgacagtttcatccgctggat

SEQ ID NO: 193714 - DNA, 510 bp, Homo Sapiens
tgtacaaaaaagttggcgaccctctcaacgcacgcgtggcgctgctgcagtttggtggccccggcgagcagcaggtggccttcccgctgagccacaacctcacggccatccacgaggcgctggagaccacacaatacctgaactccttctcgcacgtgggcgcaggcgtggtgcacgccatcaatgccatcgtgcgcagcccgcgtggcggggcccggaggcacgcagagctgtccttcgtgttcctcacggacggcgtcacgggcaacgacagtctgcacgagtcggcgcactccatgcgcaagcagaacgtggtacccaccgtgctggccttgggcagcgacgtggacatggacgtgctcaccacgctcagcctgggtgaccgcgccgccgtgttccacgagaaggactatgacagcctggcgcaacccggcttcttcgaccgcttcatccgctggatctgctagcgccgccgcccgggccccgcaatcgagggtcgtgagcccaccc

SEQ ID NO: 193715 - DNA, 687 bp, Homo Sapiens
ttggcttgagccatgaaaggatgctttgggccccttccctcccaggagggcagcctgtgcagggatggtgctcagcaggtggacagggcctggggcctgtgtcagggtctcaggcctgggagcaccagcagaggagatggcggctcccagcagtgccgcctgaaagtgtcttgggctaaggacccacacccagggctgccctgcagaaacgcccccgcagagcccagtggtctgtgaggttgcaggcagggtgcgaatggaagggcacaggtgcggggctggcacctgcccggtcctgcccacctctcctccgcccagcccgcacctgcgtctccccacagagctgtccgtggcacagtgcacgcagcggcccgtggacatcgtcttcctgctggacggctccgagcggctgggtgagcagaacttccacaaggcccggcgcttcgtggagcaggtggcgcggcggctgacgctggcccggagggacgacgaccctctcaacgcacgcgtggcgctgctgcagtttggtggccccggcgagcagcaggtggccttcccgctgagccacaacctcacggccatccacgaggcgctggagaccacacaatacctgaactccttctcgcacgtgggcgcaggcgtggtgcacgccatcattgccatcgtgcgcagccccgcgtggcgggg

SEQ ID NO: 193716 - DNA, 2673 bp, Homo Sapiens; identical to SEQ ID NO: 186446

SEQ ID NO: 193717 - DNA, 1289 bp, Homo Sapiens
ctttgtacaaaaaagttggcaaaaagcatccccacatattaaaagattcagacagggatctgtgtagaggagtaatttgcagttatttaacataaacctgatttgcagtgatctctaagtaattctgcaaaatccggtattactatgtcaagttattgcttttggtaaattgtctgacccagttattaatgaaagaatatggatttaaaaatttttaaactaaataatttgtgctgtcacagaaatggtattgttgctcttgtttactgggtataatttcccaatgcattgatgtgaagggatagaaaatctaaactaatttagttatccattggggggtgtatttactgtgatgaagatgagacagatgccatcagagctttgtgaatcagctggggtgttttcactgataaacaacacatagcaggtgtgcattcattacaaatatatgtatctgccaaggtggagccactttaaagagtgagttttgtcttgtatctaaagtggatacaagcgtatgtttaaactgcaagatttttacttgctagagaatctgttttaatatagtggtttggcctctgattatttataggttttataaattttagaatcaatttctctttaaggtggctcagatttttcaactcttgtgcacataaaattgagttgaagttcattgtgcctttttttctttatccaaattttgagttaaagcttcatatggtaactgcatcctgttcggacactatagtctaaatttttgaaactgtgtggtgttcgctaaaagtaggaataacaacgtaaaagctaattaaggtcacaaacttcggtgaaacccttaaaagtccaaatcttcttgatattgtgaaccgtaccccttccagtttagtttcttctggactttccttacttaactgacagttaccttttaaaatttgcacacattatgattaaaattgggcctctactgtgatgattcctatttcctctcatgttttaaagtgcaaactaacatttaagtgaacattagcatcaagtagtgcagacacttgtatgcatttccttgattcaatttgtgaccttaccagttttgaattggaattgcaccatttcgtagataaaggaaactaagtatattgctgcacttttagttttcaaacagtgtttaaaatttgcattgttattttttttaaactcagtttaaaaagactaaaacgtttctttcaaagaagcatctaaatgtgttcctaattttgatattgggcttaggttttgtaaccataaaaaaa

SEQ ID NO: 193718 - DNA, 1787 bp, Homo Sapiens; identical to SEQ ID NO: 186449
  misc_feature (83)..(92): n is a, c, g, or t
  misc_feature (261)..(286): n is a, c, g, or t
  misc_feature (1608)..(1617): n is a, c, g, or t

SEQ ID NO: 193719 - DNA, 1304 bp, Homo Sapiens; identical to SEQ ID NO: 186450
  misc_feature (969)..(978): n is a, c, g, or t

SEQ ID NO: 193720 - DNA, 664 bp, Homo Sapiens
ttgggctagatcttcacgaggctgggggcgaagatttcgccatggatgaggatggggacgagagcattcacaaactgaaagaaaaagcgaagaaacggaagggtcgcggctttggctccgaggggtcccgagcgcggatgcgtgaggattatgacagcgtggagcaggatggcgatgaacccggaccacaacgctctgttgaaggctggattctctttgtaactggagtccatgaggaagccaccgaagaagacatacacgacaaattcgcagaatatggggaaattaaaaacattcatctcaacctcgacaggcgaacaggatatctgaaggggtatactctagttgaatatgaaacatacaaggaagcccaggctgctatggagggactcaatggccaggatttgatgggacagcccatcagcgttgactggtgttttgttcggggtccaccaaaagaggtggccgaagacgcagcagaagtccagaccggagacgtcgctgacaggtcctctgttgtccaggtgttctcttcaagattccatttgaccatgcagccttggacaaataggactggggtggaacttgctgtgtttatatttaatctcttaccgtatatgcgtagtatttgagttgcgaataaatgtttccatttttgttttct

SEQ ID NO: 193721 - DNA, 703 bp, Homo Sapiens
ctttgtacaaaaaagttggctctttatttcattggagtcgtatcaacgctatgaacgcaaggctgtgatatggaaccagaaggctgtctgaacttttgaaaccttgtgtgggattgatggtggtgccgaggcatgaaaggctagtatgagcgagaaaaggagagagcgcgtgcagagacttggtggtgcataatggatattttttaacttggcgagatgtgtctctcaatcctgtggctttggtgagagagtgtgcagagagcaatgatagcaaataatgtacgaatgttttttgcattcaaaggacatccacatctgttggaagacttttaagtgagtttttgttcttagataacccacattagatgaatgtgttaagtgaaatgatacttgtactccccctacccctttgtcaactgctgtgaatgctgtatggtgtgtgttctcttctgttactgatatgtaagtgtggcaatgtgaactgaagctgatgggctgagaacatggactgagcttgtggtgtgctttgcaggaggacttgaagcagagttcaccagtgagctcaggtgtctcaaagaagggtggaagttctaatgtctgttagctacccataagaatgctgtttgctgcagttctgtgtcctgtgcttggatgctttttataagagttgtcattgttggaaattcttaaataaaactgattt

SEQ ID NO: 193722 - DNA, 809 bp, Homo Sapiens
  misc_feature (726)..(735): n is a, c, g, or t
ttggcttggggaacttcgttatccgcgatgcgtttcctggcagctacattcctgctcctggcgctcagcaccgctgcccaggccgaaccggtgcagttcaaggactgcggttctgtggatggagttataaaggaagtgaatgtgagcccatgccccacccaaccctgccagctgagcaaaggacagtcttacagcgtcaatgtcaccttcaccagcaatattcagtctaaaagcagcaaggccgtggtgcatggcatcctgatgggcgtcccagttccctttcccattcctgagcctgatggttgtaagagtggaattaactgccctatccaaaaagacaagacctatagctacctgaataaactaccagtgaaaagcgaatatccctctataaaactggtggtggagtggcaacttcaggatgacaaaaaccaaagtctcttctgctgggaaatcccagtacagatcgtttctcatctctaagtgcctcattgagttcggtgcatctggccaatgagtctgctgagactcttgacagcacctccagctctgctgcttcaacaacagtgacttgctctccaatggtatccagtgattcgttgaagaggaggtgctctgtagcagaaactgagctccgggtggctggttctcagtggttgtctcatgtctctttttctgtcttaggtggtttcattaaatgcagcacttggttagcagatgtttaannnnnnnnnnaacaacattaacttgtggcctctttctacacctggaaatttactcttgaataaataaaaactcgtttgtcttgt

SEQ ID NO: 193723 - DNA, 831 bp, Homo Sapiens
  misc_feature (739)..(748): n is a, c, g, or t
caactttgtacaaaaaagttggggaacttcgttatccgcgatgcgtttcctggcagctacattcctgctcctggcgctcagcaccgctgcccaggccgaaccggtgcagttcaaggactgcggttctgtggatggagttataaaggaagtgaatgtgagcccatgccccacccaaccctgccagctgagcaaaggacagtcttacagcgtcaatgtcaccttcaccagcaatattcagtctaaaagcagcaaggccgtggtgcatggcatcctgatgggcgtcccagttccctttcccattcctgagcctgatggttgtaagagtggaattaactgccctatccaaaaagacaagacctatagctacctgaataaactaccagtgaaaagcgaatatccctctataaaactggtggtggagtggcaacttcaggatgacaaaaaccaaagtctcttctgctgggaaatcccagtacagatcgtttctcatctctaagtgcctcattgagttcggtgcatctggccaatgagtctgctgagactcttgacagcacctccagctctgctgcttcaacaacagtgacttgctctccaatggtatccagtgattcgttgaagaggaggtgctctgtagcagaaactgagctccgggtggctggttctcagtggttgtctcatgtctctttttctgtcttaagtggtttcattaaatgcagcacttggttagcagatgtttaannnnnnnnnnaacaacattaacttgtggccctctttctacacctgggaatttactcttgaataaaataaaaaactcgtttgtcttgtcttctg

SEQ ID NO: 193724 - DNA, 910 bp, Homo Sapiens; identical to SEQ ID NO: 186454
  misc_feature (417)..(429): n is a, c, g, or t

SEQ ID NO: 193725 - DNA, 2459 bp, Homo Sapiens; identical to SEQ ID NO: 186459
  misc_feature (94)..(150): n is a, c, g, or t

SEQ ID NO: 193726 - DNA, 1837 bp, Homo Sapiens; identical to SEQ ID NO: 181009
  misc_feature (141)..(150): n is a, c, g, or t
  misc_feature (1421)..(1537): n is a, c, g, or t

SEQ ID NO: 193727 - DNA, 1433 bp, Homo Sapiens; identical to SEQ ID NO: 186462
  misc_feature (333)..(349): n is a, c, g, or t
  misc_feature (453)..(521): n is a, c, g, or t
  misc_feature (940)..(955): n is a, c, g, or t
  misc_feature (1034)..(1042): n is a, c, g, or t

SEQ ID NO: 193728 - DNA, 701 bp, Homo Sapiens
  misc_feature (98)..(117): n is a, c, g, or t
tgggcctgaacataatttcaagaggaggatttataaaaccattttctgtaatcaaatgattggtgtcattttcccatttgccaatgtagtctcacttnnnnnnnnnnnnnnnnnnnngaaatggataatttcatctactgcctttacttggggttaatgtgattcttaaacaccttcatcatggaactctcagagtggggtccgttttggtttcctggtggtgggttttgaaagataagggaaagcacattttgagcatgtctgggtaccatggtgcggatgcttgggaaccagaactgtttcagaggaatctaaagtctgattttagttttcagagacacagcttgttgtaaaacatgagaagacatgatttctaggactcaagcagcaagccaggattctaggttggctgctgtgtcatctttgaagtcaagacaaagctgggctcgaccttcaagggtcctcgttttgataatacttcagaatagggaactcatgtgaatactactatgtagaaataaaacctagaccttgagcgaacatctgtatattggttgaaaacgatagtggtaaccattgatcccccttcatttgatgtttggaaaattccagtaattatcatttttgcaacgaatatggataccacatagtactttggtgttacctgcttttgaaaataaagtctttgggtcaccccggtg

SEQ ID NO: 193729 - DNA, 1191 bp, Homo Sapiens; identical to SEQ ID NO: 186463

SEQ ID NO: 193730 - DNA, 851 bp, Homo Sapiens
ttggggccgcccgcggcccagagtgcgctcgcgccggcaccagctcccggataaacggcgcgccgcgcggagatgacagccgaggagatgaaggcgaccgagagcggggcgcagtcggcgccgctgcccatggagggagtggacatcagccccaaacaggacgaaggcgtgctgaaggtcatcaagagagagggcacaggtacagagatgcccatgattggggaccgagtctttgtccactacactggctggctattagatggcacaaagtttgactccagtctggatcgcaaggacaaattctcctttgacctgggaaaaggggaggtcatcaaggcttgggacattgccatagccaccatgaaggtgggggaggtgtgccacatcacctgcaaaccagaatatgcctacggttcagcaggcagtcctccaaagattccccccaatgccacgcttgtatttgaggtggagttgtttgagtttaagggagaagatctgacggaagaggaagatggcggaatcattcgcagaatacagactcgcggtgaaggctatgctaagcccaatgagggtgctatcgtggaggttgcactggaagggtactacaaggacaagctctttgaccagcgggagctccgctttgagattggcgagggggagaacctggatctgccttatggtctggagagggccattcagcgcatggagaaaggagaacattccatcgtgtacctcaagcccagctatgcttttggcagtgttgggaaggaaaagttccaaatcccaccaaatgctgagctgaaatatgaattacacctcaagagttttgaaaaggccaaggagtcttggga

SEQ ID NO: 193731 - DNA, 746 bp, Homo Sapiens
ccattaaagccaactttgtacaaaaaagttggcgccaccatgccgccctacaccgtggtctatttcccagttcgaggccgctgcgcggccctgcgcatgctgctggcagatcagggccagagctggaaggaggaggtggtgaccgtggagacgtggcaggagggctcactcaaagcctcctgcctatacgggcagctccccaagttccaggacggagacctcaccctgtaccagtccaataccatcctgcgtcacctgggccgcacccttgggctctatgggaaggaccagcaggaggcagccctggtggacatggtgaatgacggcgtggaggacctccgctgcaaatacatctccctcatctacaccaactatgaggcgggcaaggatgactatgtgaaggcactgcccgggcaactgaagccttttgagaccctgctgtcccagaaccagggaggcaagaccttcattgtgggagaccagatctccttcgctgactacaacctgctggacttgctgctgatccatgaggtcctagcccctggctgcctggatgcgttccccctgctctcagcatatgtggggcgcctcagtgcccggcccaagctcaaggccttcctggcctcccctgagtacgtgaacctccccatcaatggcaacgggaaacagtgagggttgggggggactctgagcgggaggcagagtttgccttcctttctccaggaccaataaaatttctaagagag

SEQ ID NO: 193732 - DNA, 490 bp, Homo Sapiens
ctttgtacaaaaaagttgggtcttcgccgccactgcagccctacaccgtggtctatttcccagttcgaggccgctgcgcggccctgcgcatgctgctggcagatcagggccagagctggaaggaggaggtggtgaccgtggagacgtggcaggagggctcactcaaagcctcctgcctatacgggcagctccccaagttccaggacggagacctcaccctgtaccactccaataccatcctgcgtcacctgggccgcacccttgggctctatgggaaggaccagcaggaggcagccctggtggacatggtgaatgacggcgtggaggaccaccgctgcaaatacctctccctcatctacaccaactatgaggccggcaaggatgactatgtgaaggcactgcccgggcaactgaagccttttgagaccctgctgtcccataaccagggaggcaagaccttcattgtgggagaccagatctccttccctga

SEQ ID NO: 193733 - DNA, 1128 bp, Homo Sapiens; identical to SEQ ID NO: 186466
  misc_feature (240)..(258): n is a, c, g, or t
  misc_feature (317)..(346): n is a, c, g, or t
  misc_feature (617)..(629): n is a, c, g, or t

SEQ ID NO: 193734 - DNA, 1347 bp, Homo Sapiens
ttgggataaaagtcatcggtcagaaaatcagcttggattggtgccaagtgttttattgggtaacaccctgggagttttagtagcttgaggcaaggtggaagggctagtgagaccacacaggggtagccccagcagcagcaccctgcaagccagcctggccagctgctcagaccagcttgcagagccgcagccgctgtgggcagggggtgtggcaggagctcccagcactggagacccacggactcaacccagttacctcacatggggccttttctgagcaaggtctcgaaagcgcaggccgccctggctgagcagcaccgccctttcccagctgcactcgccctgtggacagccccgacacaccactttcctgaggctgtcgctcactcagattgtccgtttgctatgccgaatgcagccaaaattcctttttacaatttgtgatgccttaccgatttgatcttaatcctgtatttaaagttttctaacactgccttatactgtgtttctctttttgggggagcttaactgcttgttgctccctgtcgtctgcaccatagtaaatgccacaagggtagtcgaacacctctctggcccctagacctatctggggacaggctggctcagcctgtctccagggctgctgcggcccagccccgagcctgcctccctcttggcctctcatccattggctctgcagggcaggggtgaggcaggtttctgctcataagtgcttttggaagtcacctacctttttaacacagccgaactagtcccaacgcgtttgcaaatattcccctggtagcctacttccttacccccgaatattggtaagatcgagcaatggcttcaggacatgggttctcttctcctgtgatcattcaagtgctcactgcatgaagactggcttgtctcagtgtttcaacctcaccagggctgtctcttggtccacacctcgctccctgttagtgccgtatgacagcccccatcaaatgaccttggccaagtcacggtttctctgtggtcaaggttggttggctgattggtggaaagtagggtggaccaaaggaggccacgtgagcagtcagcaccagttctgcaccagcagcgcctccgtcctagtgggtgttcctgtttctcctggccctgggtgggctagggcctgattcgggaagatgcctttgcagggaggggaggataagtgggatctaccaattgattctggccaaacaatttctaaaatttttttgctttatgtgggaaacagatctaaatcacattttatgctgtattttatatcttatttgtgtttgaaaacgttttgatttttggaaacacatcaaaata

SEQ ID NO: 193735 - DNA, 1670 bp, Homo Sapiens; identical to SEQ ID NO: 186472

SEQ ID NO: 193736 - DNA, 1127 bp, Homo Sapiens; identical to SEQ ID NO: 186474

SEQ ID NO: 193737 - DNA, 887 bp, Homo Sapiens; identical to SEQ ID NO: 186479

SEQ ID NO: 193738 - DNA, 1599 bp, Homo Sapiens; identical to SEQ ID NO: 186480

SEQ ID NO: 193739 - DNA, 1991 bp, Homo Sapiens; identical to SEQ ID NO: 186483

SEQ ID NO: 193740 - DNA, 1167 bp, Homo Sapiens; identical to SEQ ID NO: 186484

SEQ ID NO: 193741 - DNA, 2133 bp, Homo Sapiens; identical to SEQ ID NO: 186488

SEQ ID NO: 193742 - DNA, 1111 bp, Homo Sapiens; identical to SEQ ID NO: 186492

SEQ ID NO: 193743 - DNA, 1029 bp, Homo Sapiens; identical to SEQ ID NO: 181020
  misc_feature (607)..(619): n is a, c, g, or t
  misc_feature (722)..(755): n is a, c, g, or t
  misc_feature (778)..(794): n is a, c, g, or t

SEQ ID NO: 193744 - DNA, 1094 bp, Homo Sapiens
  misc_feature (735)..(759): n is a, c, g, or t
actttgtacaaaaaagttgggataccacttcctggactagcagctggcgtctttaccagggacatccaacgggctcatagagtggtagctgagcttcaggctgggacgtgcttcattaacaactataacgtcagcccagtggagttgccctttggtggatataagaagtcaggatttggcagagagaacggccgtgtgacaatcgaatattattcacagctgaagactgtgtgtgtggagatgggtgatgtggaatctgctttttgaaaacctgcagtgaaacctattgacatggccacgctgtggaatgatgtgaattggccctgtttacagaggcagtacaactgaatgttattttacatccagaattttggcgttcagtataagagaatggttcatgttactctttctctctccatcagcttcctcactgaaaatgtgcattaagtgccttgtagatactaatcaagaaagctgtgattctcctcaaagcgtatttttgtgaaatcttttaagagccagtaacatacttctagagaacaggaaaagagactaggataatacatcttccacacatttggcccactgataatgttaattctctggcgtatttcaaagaacttgttcctggctgatccaagtgcagtggtatttacaactaattgatcacaaccagtttgtagatttctttgttccttctccattcccactgcttcacttgcctagtcttgaagnnnnnnnnnnnnnnnnnnnnnnnnnccttgttcctttataggttcctggtagaatcagtagagatgatttcagctcattgacatttttttaagctatatccccttgtcattccattgagaaagctgacaactgggatagggaggggattagataatagatggggtcaaattctgtgtgaatgtgaacttgcctagtaagcactttgtctctgttcactactgcgatagaggaaatctatctccctatcttgggtccttgaactacagcctgctgtcttacaccagtggagctaccctttaaatgtacaaattacttgtatgctaatgtaatatggtgaaattaaaataaatcacactgtt

SEQ ID NO: 193745 - DNA, 1635 bp, Homo Sapiens; identical to SEQ ID NO: 181021
  misc_feature (1246)..(1255): n is a, c, g, or t
  misc_feature (1451)..(1490): n is a, c, g, or t

SEQ ID NO: 193746 - DNA, 1360 bp, Homo Sapiens; identical to SEQ ID NO: 186495

SEQ ID NO: 193747 - DNA, 1052 bp, Homo Sapiens
gcacctgactgaggcgggaacaggaggggtctgggaaatggtgccactgggcctgggtgccgcacagtctgctccctggggacagaaacccacagggtcgagccctgcaggcctctccttccaggaagggccacaaatagcagccgcctgcctcctcagccccagggagggcacacaggctgggtggcacccagtggccaggccccttagctgggccgcaggcagcactgagccgcctggaggtccgaggtccgtggaggtggggagggggtgcagatgtcctggaggccaaggttcacccctcacatgttggtgctcatccgggactggctgttggctggagtcagctccccctggctcccttctctgggcggggacttgacatggatctggttgcggagcacagctgcccgcagcatcatggccttggcgcggcgctggaactccttgcccatcaacagagacttctcaaaggtggtgctgcgctgatccacgtcccgggcgtataggatcttgctgtgtgagtccacacgggcactgatcagcccctccaggattagctgcgtcagctcgtcctccagggcggccaccgtggtattgaaggctgccgccatcctatgcatgtcggctgacacgtaggggctgaaatactggatgagggcacggttgcgaatctgggtgtacagggtcctgacatggggggccagatacatgtccaggagctgctggagatgacattgcgctgcagctcctgccggtcaaaggtagccaaggcgcacaggccaccgtagatggccacgttgctgggggacagcagctcagggaagtcacagtgatcaaaggaagccagcaggaggcacttggcagcctgcttgtacttcctggcggccagctctgccaagcctgcggcacacttgagcttggtgaggatggcctgggtctggctgtcacgctctcctcgctgctcggcaatctctggggtggactcagccttgctgacgtagctgagcacatgagaccaattctgcaagtagacgctgaccttgtaccaa

SEQ ID NO: 193748 - DNA, 1427 bp, Homo Sapiens; identical to SEQ ID NO: 186499
  misc_feature (675)..(765): n is a, c, g, or t

SEQ ID NO: 193749 - DNA, 915 bp, Homo Sapiens
ctttgtacaaaaaagttgggccaagatgtccagcaagcgggccaaagccaagaccaccaagaagcggccacagcgggccacatccaatgtcttcgcaatgtttgaccagtcccagatccaggagtttaaggaggctttcaacatgattgaccagaaccgtgatggcttcattgacaaggaggacctgcacgacatgctggcctcgctggggaagaaccccacagacgaatacctggagggcatgatgagcgaggccccggggcccatcaacttcaccatgttcctcaccatgtttggggagaagctgaacggcacggaccccgaggatgtgattcgcaacgcctttgcctgcttcgacgaggaagcctcaggtttcatccatgaggaccacctccgggagctgctcaccaccatgggtgaccgcttcacagatgaggaagtggacgagatgtaccgggaggcacccattgataagaaaggcaacttcaactacgtggagttcacccgcatcctcaaacatggcgccaaggataaagacgactaggccaccccagccccctgacaccccagcccccgccagtcacccctccccgcacacacccgtccataccagctccctgcccatgaccctcgctcagggatccccctttgaggggttagggtcccagttcccagtggaagaaacaggccaggagaagtgcgtgccgagctgaggcagatgttcccacagtgaccccagagccctgggctatagtctctgacccctccaaggaaagaccaccttctggggacatgggctggagggcaggacctagaagcaccaagggaaggccccattccggggctgttccccgaggaggaagggaaggggctctgtgtgccccccacgaggaacaggccctgagtcctgggatc

SEQ ID NO: 193750 - DNA, 498 bp, Homo Sapiens
ctttgtacaaaaaagttggcagcccccgccagtcacccctccccgcacacacccgtccataccagctccctgcccatgaccctcgctcagggatccccctttgaggggttagggtcccagttcccagtggaagaaacaggccaggagaagtgcgtgccgagctgaggcagatgttcccacagtgaccccagagccctgggctatagtctctgacccctccaaggaaagaccaccttctggggacatgggctggagggcaggacctagaggcaccaagggaaggccccattccggggctgttccccgaggaggaagggaaggggctctgtgtgccccccaggaggaagaggccctgagtcctgggatcagacaccccttcacgtgtatccccacacaaatgcaagctcaccaaggtcccctctcagtccccttccctacaccctgaccggccactgccgcacacccacccagagcacgccacccgccatgggagtgtgc

SEQ ID NO: 193751 - DNA, 1576 bp, Homo Sapiens; identical to SEQ ID NO: 186503
  misc_feature (1378)..(1387): n is a, c, g, or t

SEQ ID NO: 193752 - DNA, 1629 bp, Homo Sapiens; identical to SEQ ID NO: 186504

SEQ ID NO: 193753 - DNA, 973 bp, Homo Sapiens; identical to SEQ ID NO: 186505

SEQ ID NO: 193754 - DNA, 1445 bp, Homo Sapiens; identical to SEQ ID NO: 181024
  misc_feature (744)..(856): n is a, c, g, or t
  misc_feature (1235)..(1246): n is a, c, g, or t

SEQ ID NO: 193755 - DNA, 1865 bp, Homo Sapiens; identical to SEQ ID NO: 186506

SEQ ID NO: 193756 - DNA, 1466 bp, Homo Sapiens; identical to SEQ ID NO: 186508

SEQ ID NO: 193757 - DNA, 926 bp, Homo Sapiens
taatattgccaataatcattcacatttcacgtggttttagacacgcaggttattcagacagacacagacaacaaaacaagcctcaaagccagaacaaaacaaaacaaaatcgaacataggtataaaaggtaaaatatatgtacaaagtacacagtacgtgaggtatacacggcattctcacaatgcatgttagtagtttgcctaggcatagcccttaaagatgactgcctgtttttgtgccatttctcaaaatacagtatattttgtttacccgtttaaccacctgatttcagcactgtccaagacagttactgatatttcatctgaatttgttttttaatgaaagttgcaatttctccattaagctccatcttttgtaggggagtgagtttccatctctggacatatctaacagaggctggattcccacctacaaaagaagctgaagaggggatttctgccttgggaggtggcagaaagaggaaagagattggaccggatgatttttaaagttccttccaactttgaagatttggggtttgctgtttcactccagaagccgattatacagacgtattcataaaccacacatttgaaatattaacaacccaccatgcaaaactgcagatgtacacacaatgccaaaggcggaccatatctgggaggggttaaagtataattctggaagttagtctgagaatcacaagactatccaaaattcactctcttcaaagcacaaagatgtttaatgtctgctcttgggagaggtgggtgggagcctccttatctttcttctcttagacagaatgctccaccctgagatggtcttggggaaaaagtaaagggtaggtactaacatatttggaaggaacttaaaaaggggaatagtttccccaacttttttgtacaaagttggctttaaaagg

SEQ ID NO: 193758 - DNA, 1494 bp, Homo Sapiens; identical to SEQ ID NO: 186518

SEQ ID NO: 193759 - DNA, 1172 bp, Homo Sapiens; identical to SEQ ID NO: 186523
  misc_feature (918)..(972): n is a, c, g, or t

SEQ ID NO: 193760 - DNA, 2330 bp, Homo Sapiens; identical to SEQ ID NO: 186524
  misc_feature (499)..(580): n is a, c, g, or t
  misc_feature (1505)..(1577): n is a, c, g, or t
  misc_feature (1924)..(1998): n is a, c, g, or t

SEQ ID NO: 193761 - DNA, 3557 bp, Homo Sapiens; identical to SEQ ID NO: 186526
  misc_feature (1622)..(1632): n is a, c, g, or t

SEQ ID NO: 193762 - DNA, 1642 bp, Homo Sapiens; identical to SEQ ID NO: 186528

SEQ ID NO: 193763 - DNA, 1397 bp, Homo Sapiens; identical to SEQ ID NO: 186530

SEQ ID NO: 193764 - DNA, 1652 bp, Homo Sapiens; identical to SEQ ID NO: 186531
  misc_feature (1099)..(1133): n is a, c, g, or t

SEQ ID NO: 193765 - DNA, 2881 bp, Homo Sapiens; identical to SEQ ID NO: 186533

SEQ ID NO: 193766 - DNA, 1673 bp, Homo Sapiens; identical to SEQ ID NO: 186534

SEQ ID NO: 193767 - DNA, 1782 bp, Homo Sapiens; identical to SEQ ID NO: 181029

SEQ ID NO: 193768 - DNA, 813 bp, Homo Sapiens
ttgggttgcagcggcggctgaagcgtctctacccggccgtggacgaacaagagacgccgctgcctcggtcctggagcccgaaggacaagttcagctacatcggcctctctcagaacaacctgcgggtgcactacaaaggtcatggcaaaaccccaaaagatgccgcgtcagttcgagccacgcatccaataccagcagcctgtgggatttattattttgaagtaaaaattgtcagtaagggaagagatggttacatgggaattggtctttctgctcaaggtgtgaacatgaatagactaccaggttgggataagcattcatatggttaccatggggatgatggacattcgttttgttcttctggaactggacaaccttatggaccaactttcactactggtgatgtcattggctgttgtgttaatcttatcaacaatacctgcttttacaccaagaatggacatagtttaggtattgctttcactgacctaccgccaaatttgtatcctactgtggggcttcaaacaccaggagaagtggtcgatgccaattttgggcaacatcctttcgtgtttgatatagaagactatatgcgggagtggagaaccaaaatccaggcacagatagatcgatttcctatcggagatcgagaaggagaatggcagaccatgatacaaaaaatggtttcatcttatttagtccaccatgggtactgtgccacagcagaggcctttgccagatctacagaccagaccgttctagaaaattagcttccattaagaatagacaaagaattcagaaattggtattagc

SEQ ID NO: 193769 - DNA, 1068 bp, Homo Sapiens
actttgtacaaaaaagttgggcaggaaccgcggctgctggacaagaggggtgcggtggatactgacctttgctccggcctcgtcgtgaagacacagcgcatctccccgctgtaggcttcctcccacagaacccgtttcgggcctcagagcgtctggtgagatgctgttgccgctgctgctgctgctacccatgtgctgggccgtggaggtcaagaggccccggggcgtctccctcaccaatcatcacttctacgatgagtccaagcctttcacctgcctggacggttcggccaccatcccatttgatcaggtcaacgatgactattgcgactgcaaagatggctctgacgagccaggcacggctgcctgtcctaatggcagcttccactgcaccaacactggctataagcccctgtatatcccctccaaccgggtcaacgatggtgtttgtgactgctgcgatggaacagacgagtacaacagcggcgtcatctgtgagaacacctgcaaagagaagggccgtaaggagagagagtccctgcagcagatggccgaggtcacccgcgaagggttccgtctgaagaagatccttattgaggactggaagaaggcacgggaggagaagcagaaaaagctcattgagctacaggctgggaagaagtctctggaagaccaggtggagatgctgcggacagtgaaggaggaagctgagaagccagagagagaggccaaagagcagcaccagaagctgtgggaagagcagctggctgctgccaaggcccaacaggagcaggagctggcggctgatgccttcaaggagctggatgatgacatggacgggacggtctcggtgactgagctgcagactcacccggagctggacacagatggggatggggcgttgtcagaagcggaagctcaggccctcctcagtggggacacacagacagacgccacctctttctacgaccgcgtctgggccgccatcagggacaagtaccggtccgaggcactgcccaccgaccttccagcaccttctgcccctgacttgacggagccaaaggagga

SEQ ID NO: 193770 - DNA, 3529 bp, Homo Sapiens; identical to SEQ ID NO: 186538
  misc_feature (3355)..(3363): n is a, c, g, or t

SEQ ID NO: 193771 - DNA, 1525 bp, Homo Sapiens
  misc_feature (1371)..(1396): n is a, c, g, or t
actttgtacaaaaaagttggcggcggggcaggcatgggagccgcgcgctctctcccggcgcccacacctgtctgagcggcgcagcgagccgcggcccgggcgggctgctcggcgcggaacagtgctcggcatggcagggattccagggctcctcttccttctcttctttctgctctgtgctgttgggcaagtgagcccttacagtgccccctggaaacccacttggcctgcataccgcctccctgtcgtcttgccccagtctaccctcaatttagccaagccagactttggagccgaagccaaattagaagtatcttcttcatgtggaccccagtgtcataagggaactccactgcccacttacgaagaggccaagcaatatctgtcttatgaaacgctctatgccaatggcagccgcacagagacgcaggtgggcatctacatcctcagcagtagtggagatggggcccaacaccgagactcagggtcttcaggaaagtctcgaaggaagcggcagatttatggctatgacagcaggttcagcatttttgggaaggacttcctgctcaactaccctttctcaacatcagtgaagttatccacgggctgcaccggcaccctggtggcagagaagcatgtcctcacagctgcccactgcatacacgatggaaaaacctatgtgaaaggaacccagaagcttcgagtgggcttcctaaagcccaagtttaaagatggtggtcgaggggccaacgactccacttcagccatgcccgagcagatgaaatttcagtggatccgggtgaaacgcacccatgtgcccaagggttggatcaagggcaatgccaatgacatcggcatggattatgattatgccctcctggaactcaaaaagccccacaagagaaaatttatgaagattggggtgagccctcctgctaagcagctgccagggggcagaattcacttctctggttatgacaatgaccgaccaggcaatttggtgtatcgcttctgtgacgtcaaagacgagacctatgacttgctctaccagcaatgcgatgcccagccaggggccagcgggtctggggtctatgtgaggatgtggaagagacagcagcagaagtgggagcgaaaaattattggcattttttcagggcaccagtgggtggacatgaatggttccccacaggatttcaacgtggctgtcagaatcactcctctcaaatatgcccagatttgctattggattaaaggaaactacctggattgtagggaggggtgacacagtgttccctcctggcagcaattaagggtcttcatgttcttattttaggagaggccaaattgttttttgtcattggcgtgcacacnnnnnnnnnnnnnnnnnnnnnnnnnnaaggtgtcttataatcttttacctatttcttacaattgcaagatgactggctttactatttgaaaactggtttgtgtatcatatcatatatcatttaagcagtttgaaggcatacttttgcatagaaat

SEQ ID NO: 193772 - DNA, 1672 bp, Homo Sapiens; identical to SEQ ID NO: 181031
  misc_feature (259)..(305): n is a, c, g, or t
  misc_feature (516)..(526): n is a, c, g, or t

SEQ ID NO: 193773 - DNA, 1434 bp, Homo Sapiens; identical to SEQ ID NO: 186542
  misc_feature (1207)..(1224): n is a, c, g, or t

SEQ ID NO: 193774 - DNA, 795 bp, Homo Sapiens
gagcaatgcttttcctataaaggccaactttgtacaaaaaagttggcctgaaaagctgatctcaacagggattcacacagaattaggctgtgtttttgcattagctggtaggtgactttctcaaaattcttaaattcagaaagtatttagtaaacttgaggaaggtatgaaatctggaggaggcatccaggacccaggggtttgatagctttacaggtaggatcataccacaccaaaagagcagtggacaataagactatatgagctatatgaagcttttaggaatcatttaggacagacagagccctaaacaacccattcatgacttaagttgttggctcagtgtatgctggggacaaagaaaaactaacaagccgacctgcctttatgataaattctagtgtgcttacaagggatgacttcctgaggtgtgatctgtccaccttgaagaactccacaactgaagaaggggagctgtgagaacgtggattgttctacaacttgcacagggtaacagaggaagtggctgaggcctagagtcacgttttccagttcccttcgcaaactatatttcttggaacgcgaaaggaagctttacctatttcatagaagacctggaatccataacctcagaaggcaatattattgatagaaaatgtggaaggatcaggaagttcttagattcttggatgacagatgcatgttgatgccctatggagatgtccttgtgttttgaggtcactgaggtaggaagacctgtctactcttggtttcaccactagaacaatcttgggg

SEQ ID NO: 193775 - DNA, 1063 bp, Homo Sapiens
aaagtttgaaggtaaacgaactatgtggttgtctttttataataccaacctttaagcagttggattcattacttgattcttagaaagacacattgataaagtatgtaaagccccaacaaattaagtgcatatataaggtatggactttttaaaatgaaaaactgcaaatatcttacaaataattttgttcattatatctatacaatgcaccattcaattcactcattacaatactttgcaccaaaccttgctatctgcaatcttaacactcctcaaatatgagaaaaacacatagtttccactgttctaagaagcgaaatttataaagtcaacacaatatattatcaaggattataggtctaaaacagtttttaaagacaatttatacacattgaaatgggtgctttgcttaattaaaaagctagaaataaagcttcttgcaatttaataaacaaggttgcagttaacagcagatttttcacattgcaacattcaactatcatcatggagatatcaataaaggtaaagagtggtatatttatttcttctgaaaacactgttgaggaatttaagtgctattgtcttaatatttttataataattaagaaataatttggaaagacattttacttttaaattttttcaacataaggcacatagcaacatttatagtctagaaacaactaaattatgtaataaataattattttttcgatcattatttgccctttacctgaagaaagtaggtaagcagtggagttaaaatatgcctgaattaatgaaaatggttggatttaggaaacacaaataatatttgtgtgcagaaagatattaatttaaaaaagaaaaagaatactttatataaaatatacatcctagagtgttataggtagaaaaaaatgtgaggcacttagatgaaacagtgaaggaggaaagcactgagattatctttttataaaaagcaccaaaccatttattttaacatctgagataaaagcagaggttaacatgataggaaaaactagtttagttgtctaactttgccaacttttttgtacaaagt

SEQ ID NO: 193776 - DNA, 982 bp, Homo Sapiens
tttgtacaaaaaagttggctttttctttttctatattaatatctttctgcacacaaatattatttgtgtttcctaaatccaaccattttcattaattcaggcatattttaactccactgcttacctactttcttcaggtaaagggcaaataatgatcgaaaaaataattatttattacataatttagttgtttctagactataaatgttgctatgtgccttatgttgaaaaaatttaaaagtaaaatgtctttccaaattatttcttaattattataaaaatattaagacaatagcacttaaattcctcaacagtgttttcagaagaaataaatataccactctttacctttattgatatctccatgatgatagttgaatgttgcaatgtgaaaaatctgctgttaactgcaaccttgtttattaaattgcaagaagctttatttctagctttttaattaagcaaagcacccatttcaatgtgtataaattgtctttaaaaactgttttagacctataatccttgataatatattgtgttgactttataaatttcgcttcttagaacagtggaaactatgtgtttttctcatatttgaggagtgttaagattgcagatagcaaggtttggtgcaaagtattgtaatgagtgaattgaatggtgcattgtatagatataatgaacaaaattatttgtaagatatttgcagtttttcattttaaaaagtccataccttatatatgcacttaatttgttggggctttacatactttatcaatgtgtctttctaagaaatcaagtaatgaatccaactgcttaaagttggtattaataaaaagacaaccacatagttcgtttaccttcaaactttaggtttttttaatgatatactgatcttcattaccaataggcaaattaatcaccctaccaactttactgtcctaacatggtttaaaagaaaaaatgacaccatcttttattc

SEQ ID NO: 193777 - DNA, 1106 bp, Homo Sapiens
gagcaatgctttttctataaaagcacaactttgtacaaaaaagttgggaattatttctgtcacagtaaaaataaaatactttgagttttgagctactggattcttattagttccccaaatacaaagttagagaactaaactagtttttcctatcatgttaacctctgcttttatctcagatgttaaaataaatggtttggtgctttttataaaaagataatctcagtgctttcctccttcactgtttcatctaagtgcctcacattttttttctacctataacactctaggatgtatattttatataaagtattctttttcttttttaaattaatatctttctgcacacaaatattatttgtgtttcctaaatccaaccattttcattaattcaggcatattttaactccactgcttacctactttcttcaggtaaagggcaaataatgatcgaaaaaataattatttattacataatttagttgtttctagactataaatgttgctatgtgccttatgttgaaaaaatttaaaagtaaaatgtctttccaaattatttcttaattattataaaaatattaagacaatagcacttaaattcctcaacagtgttttcagaagaaataaatataccactctttacctttattgatatctccatgatgatagttgaatgttgcaatgtgaaaaatctgctgttaactgcaaccttgtttattaaattgcaagaagctttatttctagctttttaattaagcaaagcacccatttcaatgtgtataaattgtctttaaaaactgttttagacctataatccttgataatatattgtgttgactttataaatttcgcttcttagaacagtggaaactatgtgtttttctcatatttgaggagtgttaagattgcagatagcaaggtttggtgcaagtattgtaatgagtgaattgaatggtgcattgtatagatataatgaacaaaattatttgtaaaatatttgcagtttttcattttaaaaagtccataccttatatatgcacttaatttgttggggctttacatactttatcaatgtgtcttctagaaatcaagtaatgatccaactg

SEQ ID NO: 193778 - DNA, 941 bp, Homo Sapiens
ttggccgcttcttcgcagtcttcggccctctcctgtcgccgccatgagcactggcaccttcgtcgtgtcgcagccgctcaattaccgcggcggggcccgcgtggagccggcggacgcctccggtaccgagaaagctttcgagccagcaaccggccgagtgatagctactttcacatgttcaggagaaaaggaagtaaatttggctgttcaaaatgcaaaggctgcttttaaaatatggagtcaaaaatctggcatggagcgttgccgaatccttttggaggctgccaggataataagggaacgggaggatgaaattgctactatggagtgcatcaacaatggcaagtccatctttgaggcccgcttggacatcgacatttcctggcagtgcctggagtattatgcgggcttggctgcatccatggctggtgaacacatccagctcccaggtggatcgtttggttataccagaagagaaccacttggggtatgtgtgggaataggagcatggaactacccctttcagattgcctcttggaagtcggctccagcattagcctgtggtaatgccatggtctttaaaccttctccctttacacctgtttctgcattgctactggctgaaatctacagtgaggctggtgtacctcctgggctcttcaatgtggtgcagggaggggctgccacaggccagtttctgtgtcagcatcccgatgtggccaaagtctccttcactggaagtgtgcccactggcatgaagatcatggagatgtcagctaaaggaatcaaacctgttaccttggaacttggaggcaaatctccactcatcatcttctcagactgtgatatgaacaatgctgtaaagggggcgctgatggccaacttcctcacacaagccaggtttgctgtaatggcacaagagtatttgtgcagaaagaaat

SEQ ID NO: 193779 - DNA, 955 bp, Homo Sapiens; identical to SEQ ID NO: 186550

SEQ ID NO: 193780 - DNA, 1447 bp, Homo Sapiens; identical to SEQ ID NO: 186552

SEQ ID NO: 193781 - DNA, 1397 bp, Homo Sapiens; identical to SEQ ID NO: 186553

SEQ ID NO: 193782 - DNA, 824 bp, Homo Sapiens
  misc_feature (50)..(61): n is a, c, g, or t
  misc_feature (137)..(190): n is a, c, g, or t
  misc_feature (719)..(731): n is a, c, g, or t
tgtacaaaaaagttgggtgtaaattagccttttaaaaaaagcacttcttnnnnnnnnnnnntacatctccctattacctccttgaaagatttacttctgtaggcctttttcaataggctcatgactgcagacaaggnnnnnnnnnnnnnnnnnnnnnnnnnnnnnnnnnnnnnnnnnnnnnnnnnnnnnntttgtaacatttaaaaaagaaacctgaatagcctttaattctttaataatacacttaaattttatgtaaatcggttttcgccacgtgtgtttgttcacattctaaatgacttaatgggattctcacggtctgtgtctttgtgtcacgtgtataaaatgggcttgtgatgtaagcgtttcatctggtcagtggttcctttgatattgtactgctgctgggagtgggctgtggaacctgccttcgggtaactgggttcctcttgggtagattggagagatgggggtgggcgtgggcaaattctcacacatgttttcttaacctatttgcagaaactttcaaaaggcatttgattaaacctcttggcagtacagtattcttgtatttgttaacgtctgtgtttaggtactggtacctttttgttttaaaatgttctaagtgttggctttaaagtgaatttatctttagtatgatagttatatgaaaattataggatttgtgtgcagagaatttttttataaagtgctttgtnnnnnnnnnnnnntgtattctagcttttgcggtacatatgtgtgataactttaatacccatgacagttaagtgcattatttcatcactctaaaaatgctatttttg

SEQ ID NO: 193783 - DNA, 1402 bp, Homo Sapiens; identical to SEQ ID NO: 181034
  misc_feature (171)..(234): n is a, c, g, or t
  misc_feature (451)..(459): n is a, c, g, or t

SEQ ID NO: 193784 - DNA, 1152 bp, Homo Sapiens; identical to SEQ ID NO: 181035
  misc_feature (929)..(937): n is a, c, g, or t

SEQ ID NO: 193785 - DNA, 1313 bp, Homo Sapiens
  misc_feature (1070)..(1124): n is a, c, g, or t
ctttgtacaaaaaagttggggcacactgtcccaccacaactgaaccagaagagagtgaagactcccctcttcccatcctctgtgccaggtgccagactgtgctccttggaacttatggcccaatcttacctgttctccagggactggtcactgcctcaggacccccaagcctatgccctgagccatggctgctgactgactccagccaaggtgcaaagacgagattatgagacaggtcctcaggcctgtgttccaagtactcacaggggctctgggtgcccatcgccgggagtatggttcagctgccaccggcactgtccatttgcctgtctgtcaagctcagagcatggataagccacacagcagggcagtgcaccctggcaccatgcacggccagcaagaatcaaggcccgcagatgctaagagagcctattgtcaggggaaggtccccgctcctgcacactctctgtggatacttgggttgtgggggctctcttggagagtaagtttgtggtttgtttctggtttacagtggtggctgacaccccttgtaagaaagcattcctgggaagtcttctgtgggtccaaacatgttgctccgatcatcacaggagagcaaaaggccctagataccccctttggaatgtgagagtcttgttgtctgatatttgccactgagctggtgaagcccctctaaagagatctcgaccctggggagcagaattcttgtcatctatgaggggtcctgagaaagacttgtcattttttttcctggagttcttcccattgaggtcctaggatttgcacaccactgtcccacaagagctttcctgcctaatgaaaggaggtcttgtggtgtgtgtctcctctcttctctatagttcccgagttggcccccattgcagcccccaccctgtgggtagtcttccagaagtgatgcagtggtgtgagatgccctacaccttgttatttgggagactttgagagtcattcacttccatggtgactagtgtttgttttgcctgattttatattctgtgttgcatttctccccactccctgccctgctnnnnnnnnnnnnnnnnnnnnnnnnnnnnnnnnnnnnnnnnnnnnnnnnnnnnnnnttggccccatggcaggaacagccacttgcatctggtcccggtgccacactgcggtgcttggtgtggttgtggagcctgtccctgcgcgccttgctcccgttgagccacgctgtctggtgggtgattctctgccctgagcaccaccctggactggcccagtctccagaagctggcacaccctgcctgttt

SEQ ID NO: 193786 - DNA, 1658 bp, Homo Sapiens; identical to SEQ ID NO: 186559
  misc_feature (1287)..(1295): n is a, c, g, or t

SEQ ID NO: 193787 - DNA, 1423 bp, Homo Sapiens
ttggggcagatctattgcttgatgatcctctccccccaagaattctaacacaggagctgtcctgaggctctggatgactttattcttcaaatggctttaccctcccagtagctccagggaccctccattttccatatccaggaaaatgtgatgcgccacaggtatcagcgtctggatcgccacttcacgttttagccacaagtgactcagtggaagatccagagtcaacagaggctcgtcaggaagatgtctacagaaaaggtagaccaaaaggaggaagctggggaaaaagaggtgtgtggagaccagatcaaaggaccggacaaagaggaggaaccaccagctgctgcatcccatggccaggggtggcgtccaggtggcagagcagctaggaacgcaaggcctgaacctggggccagacaccctgctctcccggccatggtcaacgaccctccagtacctgccttactgtgggcccaggaggtgggccaagtcttggcaggccgtgcccgcaggctgctgctgcagtttggggtgctcttctgcaccatcctccttttgctctgggtgtctgtcttcctctatggctccttctactattcctatatgccgacagtcagccacctcagccctgtgcatttctactacaggaccgactgtgattcctccaccacctcactctgctccttccctgttgccaatgtctcgctgactaagggtggacgtgatcgggtgctgatgtatggacagccgtatcgtgttaccttagagcttgagctgccagagtcccctgtgaatcaagatttgggcatgttcttggtcaccatttcctgctacaccagaggtggccgaatcatctccacttcttcgcgttcggtgatgctgcattaccgctcagacctgctccagatgctggacacactggtcttctctagcctcctgctatttggctttgcagagcagaagcagctgctggaggtggaactctacgcagactatagagagaactcgtacgtgccgaccactggagcgatcattgagatccacagcaagcgcatccagctgtatggagcctacctccgcatccacgcgcacttcactgggctcagatacctgctatacaacttcccgatgacctgcgccttcataggtgttgccagcaacttcaccttcctcagcgtcatcgtgctcttcagctacatgcagttaacatccgaaaaagagacaattcccggaaggaagtccaacgaaggatctctgctcatcagccagggcctgaaggccaagaggagtcaactccgccatcagatgttacagaggatggtgagagccctgaagatccctcagggacagagggtcagctgtccgaggaggagataccagatcagcagcccctgagcggagaagaggagctagagcctga

SEQ ID NO: 193788 - DNA, 883 bp, Homo Sapiens
ctttgtacaaaaaagttggggcgtcttcgactgcaggaccaatgtcctgggccacctgcagcagggtggcgctccaaccccctttgaccggaactatgggaccaagctgggggtgaaggccatgctgtggttgtcggagaagctgcgcgaggtttaccgcaagggacgggtgttcgccaatgccccagactcggcctgcgtgatcggcctgaagaagaaggcggtggccttcagccccgtcactgagctcaagaaagacactgatttcgagcaccgcatgccacgggagcagtggtggctgagcctgcggctcatgctgaagatgctggcacaataccgcatcagtatggccgcctacgtgtcaggggagctggagcacgtgacccgccgcaccctgagcatggacaagggcttctgaggccagccatgcccacgcccctccccagcccccacccatgccagcgcagcgccagggctcagatggggcctgggctgttgtgtctggagcctgcaggcaggtgggggctgcgtccctgctcagcccatcccctgcctctatccctggccacctgccaggcctccctccggctggtgtcttgagaccagcctgccaggccctccagcaggaggacagagtgccctggggcatccaccttcctgcccaggggacgtggcgctgtcggtgtttggaggctgctgccccctggctttggcgccccatgggccctcagcgtctccccatgctgggctcactacatgggccagcccttgctctacctggcccggtaggctgctggcgcctaggttgtgttgagagggggatgccacttggtccctgcctcactgtgacctgctccctgccctacggtgcagcaccctgttc

SEQ ID NO: 193789 - DNA, 1412 bp, Homo Sapiens
ttggcgacgcggcgcaggcggcgggagtgcgagctgggcccgtgtttcggccgccgccatggccgcggtggacctggagaagctgcgggcgtcgggcgcgggcaaggccatcggcgtcctgaccagcggcggcgacgcgcaaggcatgaacgctgctgtccgggctgtgacgcgcatgggcatttatgtgggtgccaaagtcttcctcatctacgagggctatgagggcctcgtggagggaggtgagaacatcaagcaggccaactggctgagcgtctccaacatcatccagctgggcggcactatcattggcagcgctcgctgcaaggcctttaccaccagggaggggcgccgggcagcggcctacaacctggtccagcacggcatcaccaacctgtgcgtcatcggcggggatggcagcctcacaggtgccaacatcttccgcagcgagtggggcagcctgctggaggagctggtggcggaaggtaagatctcagagactacagcccggacctactcgcacctgaacatcgcgggcctagtgggctccatcgataacgacttctgcggcaccgacatgaccatcggcacggactcggccctccaccgcatcatggaggtcatcgatgccatcaccaccactgcccagagccaccagaggaccttcgtgctggaagtgatgggccggcactgcgggtacctggcgctggtatctgcactggcctcaggggccgactggctgttcatccccgaggctccacccgaggacggctgggagaacttcatgtgtgagaggctgggtgagactcggagccgtgggtcccgactgaacatcatcatcatcgctgagggtgccattgaccgcaacgggaagcccatctcgtccagctacgtgaaggacctggtggttcagaggctgggcttcgacacccgtgtaactgtgctgggccacgtgcagcggggagggacgccctctgccttcgaccggatcctgagcagcaagatgggcatggaggcggtgatggcgctgctggaagccacgcctgacacgccggcctgcgtggtcaccctctcggggaaccagtcagtgcggctgcccctcatggagtgcgtgcagatgaccaaggaagtgcagaaagccatggatgacaagaggtttgacgaggccacccagctccgtggtgggagcttcgagaacaactggaacatttacaagctcctcgcccaccagaagccccccaaggagaagtctaacttctccctggccatcctgaatgtgggggccccggcggctggcatgaatgcggccgtgcgctcggcggtgcggaccggcatctcccatggacacacagtatacgtggtgcacgatggcttcgaaggcctagccagggtcaagtgcagaattatgctgg

SEQ ID NO: 193790 - DNA, 1019 bp, Homo Sapiens
tttgtacaaaaaagttgggtagtggggcctgcggtgggagtgggaaggaaggcggagggaaccatgcgaggttctgagaattgcggcgagggtcgcctcgagagacggtttctgagcaggaattctgaaatccccaccacttcctccctccgggggatttgatcccctatggccaccgctaacagcatcatcgtgctggatgatgatgacgaagatgaagcagctgctcagccagggccctcccacccactccccaatgcggcctcacctggggcagaagcccctagctcctctgagcctcatggggccagaggaagcagtagttcgggcggcaagaaatgctacaagctggagaatgagaagctgttcgaagagttccttgaactttgtaagatgcagacagcagaccaccctgaggtggtcccattcctctataaccggcagcaacgtgcccactctctgtttttggcctcggcggagttctgcaacatcctctctagggtcctgtctcgggcccggagccggccagccaagctctatgtctacatcaatgagctctgcactgttctcaaggcccactcagccaaaaagaagctgaacttggcccctgccgccaccacctccaatgagccctctgggaataaccctcccacacacctctccttggaccccacaaatgctgaaaacactgcctctcagtctccaaggacccgtggttcccggcggcagatccagcgtttggagcagctgctggcgctctatgtggcagagatccggcggctgcaggaaaaggagttggatctctcagaattggatgacccagactccgcatacctgcaagaggcacggttgaagcgtaagctgatccgcctctttgggcgactatgtgagctgaaagactgctcttcactgaccggccgtgtcatagagcagcgcatcccctaccgtggcacccgctacccagaggttaacaggcgcattgagcggctcatcaacaagccagggcctgataccttccc

SEQ ID NO: 193791 - DNA, 786 bp, Homo Sapiens
ctttgtacaaaaaagttggcgcatagtgtcaccatcgttactgtcagaagaacccctggccccctccagcatagatgctgaaagcaatggagaacagcctgaggagctgaccctggaggaagaaagccctgtgtctcagctctttgagctagagattgaagctttgcccctggataccccttcctctgtggagacggacatttcctcttccaggaagcaatcagaggagcccttcaccactgtcttagagaatggagcaggcatggtctcttctacttccttcaatggaggcgtctctcctcacaactggggagattctggtcccccctgcaaaaaatctcggaaggagaagaagcaaacaggatcagggccattaggaaacagctatgtggaaaggcaaaggtcagtgcatgagaagaatgggaaaaagatatgtaccctgcccagcccaccttcccccttggcttccttggccccagttgctgattcctccacgagggtggactctcccagccatggcctggtgaccagctccctctgcatcccttctccagcccggctgtcccaaaccccccattcacagcctcctcggcctggtacttgcaagacaagtgtggccacacaatgcgatccagaagagatcatcgtgctctcagactctgattagctgcctccccttctccctgcctccagaatgttctgggataacatttggaggaaggggggaagcagatgactgatgaacggatggactaagtctaatccccttttggtggtgttttcttt

SEQ ID NO: 193792 - DNA, 1500 bp, Homo Sapiens; identical to SEQ ID NO: 186573
  misc_feature (1233)..(1265): n is a, c, g, or t

SEQ ID NO: 193793 - DNA, 2093 bp, Homo Sapiens; identical to SEQ ID NO: 186575
  misc_feature (237)..(256): n is a, c, g, or t
  misc_feature (457)..(471): n is a, c, g, or t
  misc_feature (1984)..(2010): n is a, c, g, or t

SEQ ID NO: 193794 - DNA, 1374 bp, Homo Sapiens; identical to SEQ ID NO: 186577
  misc_feature (476)..(490): n is a, c, g, or t
  misc_feature (1081)..(1142): n is a, c, g, or t

SEQ ID NO: 193795 - DNA, 1266 bp, Homo Sapiens
  misc_feature (122)..(184): n is a, c, g, or t
  misc_feature (836)..(853): n is a, c, g, or t
ttggcctgtctcgaaaataacttttttagtctaaagaaagaaagacaaaagtagtcgtccgcccctcacgccctctcttcctctcagccttccgcccggtgaggaagcccggggtggttgcnnnnnnnnnnnnnnnnnnnnnnnnnnnnnnnnnnnnnnnnnnnnnnnnnnnnnnnnnnnnnnnatgcatcccttctacacccgggccgccaccatgataggcgagatcgccgccgccgtgtccttcatctccaagtttctccgcaccaaggggctcacgagcgagcgacagctgcagaccttcagccagagcctgcaggagctgctggcagaacattataaacatcactggttcccagaaaagccatgcaagggatcgggttaccgttgtattcgcatcaaccataaaatggatcctctgattggacaggcagcacagcggattggactgagcagtcaggagctgttcaggcttctcccaagtgaactcacactctgggttgacccctatgaagtgtcctacagaattggagaggatggctccatctgtgtgctgtatgaagcctcaccagcaggaggtagcactcaaaacagcaccaacgtgcaaatggtagacagccgaatcagctgtaaggaggaacttctcttgggcagaacgagcccttccaaaaactacaatatgatgactgtatcaggttaagatatagtctgtggatggatcatctgatgatgatggataaatttgatttttgctttgggtgggctcctcttggggatggattatggaatttaaaccatgtcacagctgtgaagatctggcacaagatagaatggtnnnnnnnnnnnnnnnnnnttttaagtgacagtgccatagtttggacagtacctttcaatgattaattttaatagcctgtgagtccaagtaaatgatcactttatttgctagggagggaagtcctagggtggtttcagtttctcccagacatacctaaatttttacatcaatccttttaaagaaaatctgtatttcaaagaatctttctctgcagtaaatctcgcaggggaatttgcactattacacttgaaagttgttattgttaaccttttcggcagcttttaataggaaagttaaacgttttaaacatggtagtactgggaaattttacaagacttttacctagcacttaatatgtataaattgtacttaaagacaaactagtaagcatgacctggggaaatggtcaaaccttgtatttgtgtttttgg

SEQ ID NO: 193796 - DNA, 1726 bp, Homo Sapiens; identical to SEQ ID NO: 186578
  misc_feature (217)..(296): n is a, c, g, or t
  misc_feature (948)..(962): n is a, c, g, or t

SEQ ID NO: 193797 - DNA, 886 bp, Homo Sapiens
ttggcgcgcgctgcgggcagtgagtgtggaggcgcggacgcgcggcggagctggaactgctgcagctgctgccgccgccggaggaaccttgatccccgtgctccggacaccccgggcctcgccatggctgaccagctgactgaggagcagattgcagagttcaaggaggccttctccctctttgacaaggatggagatggcactatcaccaccaaggagttggggacagtgatgagatccctgggacagaaccccactgaagcagagctgcaggatatgatcaatgaggtggatgcagatgggaacgggaccattgacttcccggagttcctgaccatgatggccagaaagatgaaggacacagacagtgaggaggagatccgagaggcgttccgtgtctttgacaaggatgggaatggctacatcagcgccgcagagctgcgtcacgtaatgacgaacctgggggagaagctgaccgatgaggaggtggatgagatgatcagggaggctgacatcgatggagatggccaggtcaattatgaagagtttgtacagatgatgactgcaaagtgaaggccccccgggcagctggcgatgcccgttctcttgatctctctcttctcgcgcgcgcactctctcttcaacactcccctgcgtaccccggttctagcaaacaccaattgattgactgagaatctgataaagcaacaaaagatttgtcccaagctgcatgattgctctttctcctttcttccctgagtctctctccatgcccctcatctcttccttttgccctcgcctcttccatcccatgtcttccaaggcctgatgcattcataagttgaagccctccccagatccccttggggagcctctgccctccttc

SEQ ID NO: 193798 - DNA, 695 bp, Homo Sapiens
tttgtacaaaaaagttggctccttcttcttcctgctgtcctgcccaagaactgagggtctccccggcctctactgccctggctgcagtcagtgcccagggcgaggaatgtggccaggggatccaggacctgggatccagggccctgggctggacctcaggacaggcatggaggccacaggggcccagcagcccaccctttcctctccccactgcctcctctcccttcctacactcccagctcgagccgtccagctgcggtgggatctgagtatatctagggcgggtgggcgggtagcagtgctgggcctgtgtcttgagcctggagggagtctgctcctgccgccctctgccctgccagagacagacccatgcgctgcctgcccaccgtgcccctttgtccccatgtcaggcggaggcggaaggcccaccgtgccagaggctgggcaccagccttaaccctcactctgctagcacctcctccctttccccaaggtagcacatctggctcactccccactccgtctctggagcccaccagggaaggccctcatcccctgccgctacttctctggggaatgtgggttccatccaggattgggggcctctctgctcacccactctgcacccaggatcctaatcccctgccctctggcacagctgcttcctgcaagatgcaagtctttggtctccctga

SEQ ID NO: 193799 - DNA, 729 bp, Homo Sapiens
tcagccgcaaaattctttatgaattttacacttggcaaatgttaatgacggaagccatagtctgctcctaatacatgtccaaagcattgactgttgtgtcattagctgcctggttacattagctccctggcttcttgtttagaccactgctaatcccttaaaaacaagaggtctggcactagtagcacaacctaaggtggcattacagatctttgagcgagccacagcaacttttctgccaagtcagcttagtttagacttcagtgaatcaggctattgctatcctaatgtatgtctctatgagtgtatttagccacacatctgcccttggttgactttctgactcattgcttgcttgcttgtttccttgctttggaaaactattgaagattgctaaaaaataccactgcaaagtgatggaaaagggtggagaacaggggagtagccaggctggatggctcaaatataaatgaatgaggaattctttatgaagtatcagtcagattttatgattaagtgatgtaatataggaattatgtaaaagggaagaatgtctgatactgatctattagagaggtactttagaggcttcttgattggcataaagttcctaaggttatagattttccccccttttggctgtatagcaaagtgttttaatccacggttgtgccttattgttccattaaaattgtatcttcgatccatcaataaatacttgtggttgaa

SEQ ID NO: 193800 - DNA, 967 bp, Homo Sapiens; identical to SEQ ID NO: 186586

SEQ ID NO: 193801 - DNA, 1139 bp, Homo Sapiens
ctttgtacaaaaaagttggctgcaaatttggaccgggccaaggctggactgctggagcgtgtgaaggagctacaggccgagcaggaggaccgggctttaaggagttttaagctgagtgtcactgtagaccccaaataccatcccaagattatcgggagaaagggggcagtaattacccaaatccggttggagcatgacgtgaacatccagtttcctgataaggacgatgggaaccagccccaggaccaaattaccatcacagggtacgaaaagaacacagaagctgccagggatgctatactgagaattgtgggtgaacttgagcagatggtttctgaggacgtcccgctggaccaccgcgttcacgcccgcatcattggtgcccgcggcaaagccattcgcaaaatcatggacgaattcaaggtggacattcgcttcccacagagcggagccccagaccccaactgcgtcactgtgacggggctcccagagaatgtggaggaagccatcgaccacatcctcaatctggaggaggaatacctagctgacgtggtggacagtgaggcgctgcaggtatacatgaaacccccagcacacgaagaggccaaggcaccttccagaggctttgtggtgcgggacgcaccctggaccgccagcagcagtgagaaggctcctgacatgagcagctctgaggaatttcccagctttggggctcaggtggctcccaagaccctcccttggggccccaaacgataatgatcaaaaagaacagaaccctctccagcctgctgacccaaacccaaccacacaatggtttgtctcaatctgacccagcggctggaccctccgtaaattgttgacgctcttcccccttcccgaggtcccgcagggagcctagcgcctggctgtgtgtgcggccgctcctccaggcctggccgtgcccgctcaggacctgctccactgtttaacactaaaccaaggtcatgagcattcgtgctaaagataacatactccagctcctgggtccacccggcatgtcagtcagcactctgggccttcatcacgagagctccgcagccgtgggctagggattccacttcctgtgtcattgacctcagggaaataaacgtccttgactt

SEQ ID NO: 193802 - DNA, 913 bp, Homo Sapiens
ccagcgatgaaggggtggaatccttttctacttctagcctctccacagcacgtttgtcctgctcggcagagatgagtaagacttcatggcgagctttctcgatgccctctttggtgccagtgatcttgatctgattgctggggtcatctgggcgtgggatctggattttggttgcagtttttagctccaagtcttgcagtttctctccatttttgccaataacaaagcgatggtgttctttgggaatggcaacagttgctgaggcctgagtctgcagtctagcaacaatgtccttccgagctttcatgacagcatccagctttcctgacaccatgatggagaggccttggtctttggccaaagacagctccaagtgagcaccagttctctgcatgatctcaaggcagatttttgcttgttcaccttctccaaactggttcatatccttgtattttctctcctccaggggtacatggaacacctgagtgatgacagaagccttgatgggtcggatcttgttcccccaggctccagcgggttcctgggcactttccaggcaagcagctttctcaggaagtggagggaaggcatccttgtaggttggagggtcgctctcctcttctgaatttagagtggcaactttgatttgttgcggaaccagcccacttcggtgttcagcaaaactctcttgggtcaaaactgcaacggaactcatggttgatctcacacctacacacaatccgggaaaaccacagcaaaacggtcagtagccagaaggtccgtcctgaggccgcctctgtcagcctgccagcttttgctgttccactcttataagcataagaaaaccgagctcataaggtaggaactgtggcgaaacagggacaagccgccatcttggtaaaggagaagccaa

SEQ ID NO: 193803 - DNA, 2484 bp, Homo Sapiens; identical to SEQ ID NO: 186589

SEQ ID NO: 193804 - DNA, 1177 bp, Homo Sapiens; identical to SEQ ID NO: 181051

SEQ ID NO: 193805 - DNA, 2009 bp, Homo Sapiens; identical to SEQ ID NO: 186593
  misc_feature (1842)..(1854): n is a, c, g, or t

SEQ ID NO: 193806 - DNA, 1131 bp, Homo Sapiens; identical to SEQ ID NO: 186595

SEQ ID NO: 193807 - DNA, 1516 bp, Homo Sapiens; identical to SEQ ID NO: 181052
  misc_feature (129)..(157): n is a, c, g, or t
  misc_feature (1129)..(1158): n is a, c, g, or t
  misc_feature (1443)..(1456): n is a, c, g, or t

SEQ ID NO: 193808 - DNA, 1797 bp, Homo Sapiens; identical to SEQ ID NO: 181053
  misc_feature (206)..(235): n is a, c, g, or t
  misc_feature (520)..(533): n is a, c, g, or t
  misc_feature (594)..(729): n is a, c, g, or t

SEQ ID NO: 193809 - DNA, 728 bp, Homo Sapiens
  misc_feature (213)..(227): n is a, c, g, or t
ttgggttggttttgaaggatttccatctttttacaagatgagaagttacagttcatctcccctgttcagatgaaacccttgttttcaaaatggttacagtttcgtttttcctcccatggttcacttggctctgaacctacagtctcaaagattgagaaaagattttgcagttaattaggatttgcattttaagtagttaggaactgcccaggnnnnnnnnnnnnnnnaagcattgatttaaaagatgcacggaaagttatcttacagcaaactgtagtttgcctccaagacaccattgtctccctttaatcttctcttttgtatacatttgttacccatggtgttctttgttccttttcataagctaataccactgtagggattttgttttgaacgcatattgacagcacactttacttagtagccggttcccatttgccatacaatgtaggttctgcttaatgtaacttcttttttgcttaagcatttgcatgactattagtgcttcaaagtcaatttttaaaaatgcacaagttataaatacagaagaaagagcaacccaccaaacctaacaaggacccccgaacactttcatactaagactgtaagtagatctcagttctgcgtttattgtaagttgataaaaacatctggaagaaaatgactaaaactgtttgcatctttgtatgtatttattacttgatgtaataaagcttattttcattaac

SEQ ID NO: 193810 - DNA, 736 bp, Homo Sapiens
ttgggttctgcccggatggaagctccggccgcggagtgatggtggcctcagcgaagatgggccgggcagggaccatggcggtggcagcagaggtggcaggggcggggcggctggcggtagaggaggctgtggtcctcagggggctgtaggtggaggtatggctcgggccagcagcgggaacggcagcgaggaggcctggggggcacttcgggcgccgcaacagcagcttcgagagctgtgcccaggagtgaacaaccagccctacctctgtgagagtggtcactgctgcggggagactggctgctgcacctactactatgagctctggtggttctggctgctctggactgtcctcatcctctttagctgctgttgcgccttccgccaccgacgagctaaactcaggctgcaacaacagcagcggcagcgtgaaatcaacttgttggcctatcatggggcatgccatggggctggtcctttccctaccggttcactgcttgaccttcgcttcctcagcaccttcaagcccccagcctacgaggatgtggttcaccgcccaggcacaccaccccccccttatactgtggccccaggccgccccttgactgcttccagtgaacaaacctgctgttcctcctcatccagctgccctgcccactttgaaggaacaaatgtggaaggtgtttcctcccaccagagtgccccccctcatcacgagggtgagcccggggcaggg

SEQ ID NO: 193811 - DNA, 1358 bp, Homo Sapiens; identical to SEQ ID NO: 186604

SEQ ID NO: 193812 - DNA, 1092 bp, Homo Sapiens; identical to SEQ ID NO: 186606

SEQ ID NO: 193813 - DNA, 1762 bp, Homo Sapiens; identical to SEQ ID NO: 186614
  misc_feature (71)..(79): n is a, c, g, or t

SEQ ID NO: 193814 - DNA, 1387 bp, Homo Sapiens; identical to SEQ ID NO: 186616

SEQ ID NO: 193815 - DNA, 83 bp, Homo Sapiens; identical to SEQ ID NO: 181057

SEQ ID NO: 193816 - DNA, 1358 bp, Homo Sapiens; identical to SEQ ID NO: 181058

SEQ ID NO: 193817 - DNA, 1565 bp, Homo Sapiens; identical to SEQ ID NO: 186624

SEQ ID NO: 193818 - DNA, 1822 bp, Homo Sapiens; identical to SEQ ID NO: 186625

SEQ ID NO: 193819 - DNA, 1773 bp, Homo Sapiens; identical to SEQ ID NO: 186631
  misc_feature (1180)..(1238): n is a, c, g, or t
  misc_feature (1327)..(1379): n is a, c, g, or t

SEQ ID NO: 193820 - DNA, 1457 bp, Homo Sapiens
  misc_feature (1312)..(1328): n is a, c, g, or t
ttgggagtatacttggataagaagtattgctgttgagggagctataagaaaaggattcttcttccagaagtaaagaactcatctttagagtacctttaaatgaattttgtttttctttcttattttgaggtggattggtcttctctttttttgggtttccagctcactgggactctcagaccttacctttccagctcaaacaccattagttaaattccttcattctcattagaatgcagcctgctgagtatgtgggtttcactgccggagtccatcatttagccagtatacatagaggaactgcttcgaatcaaggcaactggtgaagggcttagcatgttggcagcaatatcccagagattgaatctgtttgcattttcctcatctagcataacagctgcttgaagccagggctcttagccctttgcattccccttgagcgaggaagccacactgcctttctgtgtctggttcagagctcttccttcttggcatgttttctggactacatgcacatgggcagctatagattaatctgcaaaacctagtcacttacctacccataatatctgggaaggtgtggtatttgttttaaagaaacattgtttctttgggagggcagtttctgtctggactttgaggtggacttagttatccctacagttctttaactctcagcttttaataaaagatgaaatcagatattgatgcagttgggtcacaattctttagaatgcttctaccccagggccgcttcctgttcctagtcatggttttccagtttagtagtggagtttcttgaggctaacttacagaaatttctaactgaaaactttaagagttattgatacttgttttttcagtcagtcacttacatcacctagcctactctctggaatttaaatttatttctctaggctggtcctggaagttgataaccttttggcaaagcttagatttaggagaaggcttgagtccctgttcagcgggtctgtggattctctttgcttatggctctctgcctgcagccctggcagaccatactgtatgtcatggatacccagtggaaatattactgagatgaaacacatttccaagggtatttaaactctcactctgccacctttctaagggtgggaggctggcagagatgctgcaatgcttgataatcatttggccacactgaaatttccaaagggagctcttgccggtgcttaaaaccaaaactcctggacacttagaaaattccatgaatctagcacaaaatatccattcttgcccaagtgtatcccctttctctccagcttaatcnnnnnnnnnnnnnnnnnaaagcccaggccaagggtactttttaactggaaactggggaggagggaagaacactagcagggagctaagaggcaggttgctgggtaagccatcctgctcctacctggtgcctgtatctacattgctga

SEQ ID NO: 193821 - DNA, 773 bp, Homo Sapiens
  misc_feature (461)..(481): n is a, c, g, or t
tgtacaaaaaagttggcacttacatcacctataaaaactctctggaatttaaatttatttctctaggctggtcctggaagttgataaccttttggcaaagcttagatttaggagaaggcttgagtccctgttcagcgggtctgtggattctctttgcttatggctctctgcctgcagccctggcagaccatactgtatgtcatggatacccagtggaaatattactgagatgaaacacatttccaagggtatttaaactctcactctgccacctttctaagggtgggaggctggcagagatgctgcaatgcttgataatcatttggccacactgaaatttccaaagggagctcttgccggtgcttaaaaccaaaactcctggacacttaaaaaattccatgaatctagcacaaaatatccattcttgcccaagtgtatcccctttctctccagcttaatcnnnnnnnnnnnnnnnnnnnnnaaagcccaggccaagggtacttttaactggaaactggggaggagggaagaacactaacagggagctaaaaggcaggttgctgggtaagccatcctgctcctacctggtgcctgtatctacattgctgaatgctgtgcgccagtgcctttccttcatctgcagatggagcccatctcttttcacctgggtgaggagaccctctgctactccaggggtaaaccttaaaaaatgtgtcttgaaaagcccaaaggacactcacgtgctaaggtgtcccttttatgcatcttaaaaa

SEQ ID NO: 193822 - DNA, 867 bp, Homo Sapiens
ttggcgcggcgtgagaagccatgagcagcaaagtctctcgcgacaccctgtacgaggcggtgcgggaagtcctgcacgggaaccagcgcaagcgccgcaagttcctggagacggtggagttgcagatcagcttgaagaactatgatccccagaaggacaagcgcttctcgggcaccgtcaggttggcaccgttctgatcccacccagccctcagtgcccccgtgcttgcccctcccctgcaggctcccgctgagccggaggcgggcacgtcggtactgatgtgctagggtagttcagaccctctgctccgggcaggcgcggctggacggacccccaccctgggtcttaaaacatgaggggaggcgtgggtaggcctcggccgagcccgccggccagcctgagaagccaggctggctgctggtgaatgtgaacgctccgggcttaagtccactccccgccctaagttctctgtgtgtgtcctgggggaccagcagcactgtgacgaggctaaggccgtggatatcccccacatggacatcgaggcgctgaaaaaactcaacaagaataaaaaactggtcaagaagctggccaagaagtatgatgcgtttttggcctcagagtctctgatcaagcagattccacgaatcctcggcccaggtttaaataaggcaggaaagttcccttccctgctcacacacaacgaaaacatggtggccaaagtggatgaggtgaagtccacaatcaagttccaaatgaaaaaagtgttatgtctggctgtagctgttggtcacgtgaagatgacagacgatgagcttgtgtataacattcacctggctgtcaacttcttggtgtcattgctcaagaaaa

SEQ ID NO: 193823 - DNA, 1065 bp, Homo Sapiens
ctttgtacaaaaaagttggctgaagtgctcggatgtgagcagcagtggaagcagcactgtcattttgtgaagaaaatgatgatcctcagtccctgcctggcccctgggagcatcctatccagcaggagcgggacaagccagtacctctccctgcaccagaaatgacggtcaagcaagagagactggactttgaggaaatggaaaacaagggaatacatgaactggtggacatcagggagcccagtgcagagatcaaggtggaacctgcagaaccagagccagtcatttcaggagccgaaatagtagctggagttgttccagccacaagtatggagccaccagaactcaggagtcaggacttagatgaggaactgggaagtactgcagctggagagattgttgaagcagatgttgccattgggaaaggcgatgagactccacttacaaatgtgaagacagaggcatcccctgaaagcatgttgtctccatcacatggctcaaatcccattgaagatcctttagaggcagagactcagcacaagtttgaaatgtcagactcattgaaagaagaatcagggactatttttggaagccagataaaggatgccccaggtgaggatgaggaggaagatggtgtcagtgaagcggccagcctagaggagcctaaggaagaggatcaaggagaaggctacttgtcagaaatggataatgaacctcctgtgagcgagagtgatgatggcttcagcatacacaatgctacactgcagtcacacacactggcagactccatccccagcagccctgcttcttcacagttctctgtctgtagtgaggatcaggaagctattcaggcacagaaaatttggaagaaagccatcatgcttgtatggagagctgcagctaatcataggtatgccaatgtcttcctgcagcctgttacagatgacatagcacctggctaccacagcattgtgcagaggcctatggatttgtcaactattaagaaaaacatagaaaatggactgatccgaagcacagctgaatttcagcgtgacattatgctga

SEQ ID NO: 193824 - DNA, 1132 bp, Homo Sapiens
ttgggagagattgttgaagcagatgttgccattgggaaaggcgatgagactccacttacaaatgtgaagacagaggcatcccctgaaagcatgttgtctccatcacatggctcaaatcccattgaagatcctttagaggcagagactcagcacaagtttgaaatgtcaggatgccccaggtgaggatgaggaggaagatggtgtcagtgaagcggccagcctagaggagcctaaggaagaggatcaaggagaaggctacttgtcagaaatggataatgaacctcctgtgagcgagagtgatgatggcttcagcatacacaatgctacactgcagtcacacacactggcagactccatccccagcagccctgcttcttcacagttctctgtctgtagtgaggatcaggaagctattcaggcacagaaaatttggaagaaagccatcatgcttgtatggagagctgcagctaatcataggtatgccaatgtcttcctgcagcctgttacagatgacatagcacctggctaccacagcattgtgcagaggcctatggatttgtcaactattaagaaaaacatagaaaatggactgatccgaagcacagctgaatttcagcgtgacattatgctgatgtttcagaatgctgtaatgtacaatagctcagaccatgatgtctatcacatggcagtggagatgcagcgagatgtcttggaacagatccagcaattcttggccacgcagttgattatgcaaacatccgagtctgggatcagtgctaaaagtcttcgagggagagattctacccgcaaacaggatgcttcagagaaggacagtgtcccaatgggctctcctgccttccttctctctctctttgatggaggaaccaggggacgccgctgtgccattgaagcagatatgaagatgaaaaagtgaagcctcagagttaccctctttgagccgaacctaaaataaaagtaaacaagatagagcttgggcttgcgggcccagttccagaggtggaagttacagaagaggaggtacctgggccagacgacatgagctggaaaatctctcttatagagttggagtagcacaaatgcctgttttaggcagaaaccatgggctatgtta

SEQ ID NO: 193825 - DNA, 1129 bp, Homo Sapiens; identical to SEQ ID NO: 181064
  misc_feature (442)..(455): n is a, c, g, or t
  misc_feature (900)..(943): n is a, c, g, or t

SEQ ID NO: 193826 - DNA, 1746 bp, Homo Sapiens; identical to SEQ ID NO: 186643
  misc_feature (1069)..(1077): n is a, c, g, or t

SEQ ID NO: 193827 - DNA, 1799 bp, Homo Sapiens; identical to SEQ ID NO: 186648
  misc_feature (308)..(316): n is a, c, g, or t
  misc_feature (571)..(627): n is a, c, g, or t

SEQ ID NO: 193828 - DNA, 1969 bp, Homo Sapiens; identical to SEQ ID NO: 186651

SEQ ID NO: 193829 - DNA, 1226 bp, Homo Sapiens
ctttgtacaaaaaagttggttctgttcctttcccgtatcaattcattccttcatctctttgccaagttgttttcctttcagggcctgtccttccagtttagaacagtaccatgaatcccacttgtgtcaatattaaagatagctgagaagcacctttcaaatggcacagtccctcttcaagatgtctaaaagaatggttatgtctgtccagttagggatttcacatccacatgtaatcatgtctgctgctgttgctacccaaattttcatttctccacattttgggtacttaagctaaaacgtaatggccacagtctgtaatccattcacattcctcagtttcaccacctccctcttccagactgcactctctgtcatcagtcccctcctttctaacagaaatggggttatgattttgaaggctgtgggttcagggagtctttgccaatcctgttggccctaaactatcaaggaggctccatttcaccatttgattttttgcatttcaggaggcaactgattgtttcgatatgtacatattactcacgtataccccatttccttccagtcagcccaacattttccaccagtctgtccccatctctgaaatccttccttctctttccccctaagtcttttgagtgtcatcatgtactggtggtttctcggttccatctcatccatttccttttcaatggagactacagcgtcagccagctcagccttggcttttaactcaatattccagtccataggggtggttaaaagttgctgcaaggctgcaggcactggcagtgggaagaggcagacgactagatgacttctgcacttttagctggttgaaaagtaccactcccactctgaacatctggccgtccctgcaaagagtgtactgtgcttgaagcagagcactcacacataaatggctgtgtgtggaattgcttgccaaagaagtttctagcctttccctttcccctaactgcatcagggaagaattcttatctctagcttggtttccacatgaggtttttctgaaaagggcttgggacaagaagtctgtcatgttagttaagcaggcaagaaatcctactaatccagttttgtttgaaagttgtttgtccgtatgattttttaaaagtcaagtttaatttcaaaaaaccttttttttctgagattaacttttggggtaatatttaaaatgagagacattttgtaaccctgttaaa

SEQ ID NO: 193830 - DNA, 530 bp, Homo Sapiens
gagcaatgctttacataaaagacaaactttgtacaaaaaagttggttaaaagttgctccctatagcaagcaggcactggcagtgggaagaggcagacgactagatgacttctgcacttttagctggttgaaaagtaccactcccactctgaacatctggccgtccctgcaaagagtgtactgtgcttgaagcagagcactcacacataaatggctgtgtgtggaattgcttgccaaagaagtttctagcctttccctttcccctaactgcatcagggaagaattcttatctctagcttggtttccacatgaggtttttctgagaagggcttgggacaagaagtctgtcatgttagttaagcaggcaacaaatcctactaatccagttttgtttgaaagttgtttgtccgtatgattttttaaaagtcaagtttaatttcaaaaaatcctactaatccagttttgtttgaaagttgtttgtccgtatgattttttaaaagtcaagtttaatttcaaaaaaccttttttttc

SEQ ID NO: 193831 - DNA, 1080 bp, Homo Sapiens; identical to SEQ ID NO: 186653
  misc_feature (100)..(108): n is a, c, g, or t

SEQ ID NO: 193832 - DNA, 1726 bp, Homo Sapiens; identical to SEQ ID NO: 186654
  misc_feature (593)..(601): n is a, c, g, or t

SEQ ID NO: 193833 - DNA, 2058 bp, Homo Sapiens; identical to SEQ ID NO: 186657
  misc_feature (791)..(821): n is a, c, g, or t

SEQ ID NO: 193834 - DNA, 925 bp, Homo Sapiens
actttgtacaaaaaagttgggttcaattgtgcagccttagctagccaaattgcagcagaacagaacctggataatgatgaaggattgaaaatcgctgctaaacattaccagtttgctagtggtgcctttttacatattaaagagacggttttatctgccttaagtcgagagccgaccgtggacatatctccagatactgttgggaccctcagtcttattatgctggcacaggctcaagaagtattttttttaaaagccacaagagataaaatgaaagatgccatcatagctaaattggctaatcaggctgcagattattttggtgatgctttcaaacagtgtcaatacaaagatactctccccaaggaggtgttccctgtcttggctgcaaagcactgtatcatgcaggccaatgctgagtaccatcagtctatcctggcaaaacagcagaagaaatttggagaagaaattgcaaggttacagcatgcagcagaactgattaaaacagtggcatctcgctatgatgaatatgttaatgtgaaggatttttctgacaaaatcaatcgtgcccttgctgcagcaaagaaggataatgacttcatttatcatgatcgagttccagaccttaaagatctagatcctattggcaaagccacacttgtgaaatctaccccggtcaatgtacccatcagtcagaaatttactgatctgtttgagaagatggttcccgtgtcagtacagcagtctttggctgcctataatcagaggaaagccgatttggttaacagatcaattgctcagatgagagaagccaccactttggcaaatggggtgctagcttcccttaatcttccagcagcaattgaagatgtgtctggagacactgtacctcagtctatattgactaaatccagatctgtgattg

SEQ ID NO: 193835 - DNA, 1300 bp, Homo Sapiens
ccaactttgtacaaaaaagttggcctctctctcctcggccctcgtaagctgtccgcggtctgtttggcccgaacggcggcggaggcgctgatcatggcgacattcatctcggtgcagctgaaaaagacctcagaggtggacctggccaagccgctggtgaagttcatccagcagacttacccaagcggcggggaagagcaggcccagtactgccgcgcggcggaggagctcagcaagctgcgccgcgccgcagtcggtcgtccgctggacaagcacgagggcgcgctcgagacgctcctgagatattatgatcagatttgttctattgaacccaaattcccattttctgaaaatcagatctgcttgacatttacctggaaggatgctttcgataaaggttcactttttggaggctctgtaaaactggctcttgcaagcttaggatatgaaaagagctgtgtgttgttcaattgtgcagccttagctagccaaattgcagcagaacagaacctggataatgatgaaggattgaaaatcgctgctaaacattaccagtttgctagtggtgcctttttacatattaaagagacggttttatctgccttaagtcgagagccgaccgtggacatatctccagatactgttgggaccctcagtcttattatgctggcacaggctcaagaagtattttttttaaaagccacaagagataaaatgaaagatgccatcatagctaaattggctaatcaggctgcagattattttggtgatgctttcaaacagtgtcaatacaaagatactctccccaaggaggtgttccctgtcttggctgcaaagcactgtatcatgcaggccaatgctgagtaccatcagtctatcctggcaaaacagcagaagaaatttggagaagaaattgcaaggttacagcatgcagcagaactgattaaaacagtggcatctcgctatgatgaatatgttaatgtgaaggatttttctgacaaaatcaatcgtgcccttgctgcagcaaagaaggataatgacttcatttatcatgatcgagttccagaccttaaagatctagatcctattggcaaagccacacttgtgaaatctaccccggtcaatgtacccatcagtcagaaatttactgatctgtttgagaagatggttcccgtgtcagtacagcagtctttggctgcctataatcagaggaaagccgatttgatttaacagatcaattgctcagatgagagaagccaccactttggcaaatggggtgctagcttcccttaatcttcca

SEQ ID NO: 193836 - DNA, 1095 bp, Homo Sapiens
actttgtacaaaaaagttgggtctttgtggctccggaaaggcgtttgggatgccaacgatgaggctgctgtcatttgtggtgttggctctatttgctgtcactcaagcagaggaaggagccaggcttttggcttccaaatcactgctgaacagatacgccgtggagggacgagacctgaccttgcagtacaacatctacaatgttggctcaagtgctgcattagacgtggaactatctgatgattccttccctccagaagactttggcattgtgtctggaatgctcaatgtcaaatgggaccggattgcccctgctagcaatgtctcccacactgtggtcctgcgccctctcaaggctggttatttcaacttcacctcggcaacaattacttacctggcccaggaggatgggcccgttgtgattggctctaccagtgcacctggacagggaggaatcctggctcagcgggagtttgacaggcgattctcccctcattttctggactgggcagcctttggggtcatgacccttccctccatcggcatccccctgctattgtggtactccagcaagaggaaatatgacactcccaaaacgaagaagaactgattggggcttccacagccctcctctcccaagaaatccaggctcctctcccaagaaatccaggtgctttccagactccaaagggtatcttaaatgcaatctcttctctcttagcccttggccactttctcctggatcctgccctgctctcagccatagtgaaggaccagccctaggagtctgcgagagcctccttggttccatcgtgaagccataaacaggaatgcctttggcaatagccttgagcctagagggccctctgatgccccactgaggtgctgttggtttattgctggcaacgtgaattctctcaggggtctaggaggggcattttggagactgcctgacaccacccctatcccctgcctccccctctcagaagagggtggaagatgaaatgaaagctatgggactcttggaggatacccagtgtctattctgggttagagaagtgcttactaaggggttttctaataaaaacaaatgcc

SEQ ID NO: 193837 - DNA, 1397 bp, Homo Sapiens; identical to SEQ ID NO: 181073

SEQ ID NO: 193838 - DNA, 2108 bp, Homo Sapiens; identical to SEQ ID NO: 186663
  misc_feature (1897)..(1936): n is a, c, g, or t

SEQ ID NO: 193839 - DNA, 1565 bp, Homo Sapiens
  misc_feature (895)..(928): n is a, c, g, or t
  misc_feature (946)..(1056): n is a, c, g, or t
  misc_feature (1067)..(1075): n is a, c, g, or t
ttggctcaaggaaagtagtcgcggaatctcagttagcggtggagaggcagtatgtccggttcaatggcgactgcggaagctagcggcagcgatgggaaagggcaggaagtcgagacctcagtcacctattaccggttggaggaggtggcaaagcgcaactccttgaaggaactgtggcttgtgatccatgggcgagtctacgatgtcacccgcttcctcaacgagcaccctggaggagaagaggttctgctggaacaagctggtgtagatgcaagtgaaagctttgaagatgtaggacactcttctgatgccagagaaatgctaaagcagtactacattggtgatatccatccgagtgaccttaaacctgaaagtggtagcaaggacccttcaaaaaatgatacatgcaaaagttgctgggcatattggattttacccatcataggcgctgttctcttaggtttcctgtaccgctactacacatcggaaagcaaatcctcctgaggaggccttgctgaagttagaaagtgcatccactttggggcgaaaactagagacttgcttgggggctgcagaagtgccctctcctcgaatcctgccagttgcattcttcccccttggagccaagacgattggccagacatcacctcagatctgagaccagcgtcttccatctctcagagccttactcccaaagtacctgctcactgttccgtgttgaacaattgccggtgtttcctctcttcactggtttccatgagtacccttatatttcacaactttctgttcataagttatagtgacattgctctttggtaaaaatgcctgctttccaatactttgattgcatattaaacattcttaacagggcggcagtctagtgttgaaagttttnnnnnnnnnnnnnnnnnnnnnnnnnnnnnnnnnnaaaaaattctgatttagnnnnnnnnnnnnnnnnnnnnnnnnnnnnnnnnnnnnnnnnnnnnnnnnnnnnnnnnnnnnnnnnnnnnnnnnnnnnnnnnnnnnnnnnnnnnnnnnnnnnnnnnnnnnnnntatctgtattnnnnnnnnntctgatttaattcttttatttatcataaggggtttaattcctgaagtaaaggtttgcacctattaaacttaaaactgccaaatgatttttgttcttttatgtgcgtgataaaaatacaaagaatggtgtggccacctcctccctttcaagctagggcagcaggtagctcttcccagcccctgagcccagccccttcccaagtggtgccggacaaaaaactacatggccctttcgtgtcttgggggtggaaagggagggatgaattgggggtgatagaaccctggtgaattcagagtaatctttctttagaaaactggtgttttctaaaaaacaggataggagtttagagaaggcaccaaagctttcactttggtttggcaccagtttctaccctctggtttttctaccctagctatcttttattggtaaatataaatgtataattatgtttgtaaagctttaccaaggagtttccctccttttttgtttg

SEQ ID NO: 193840 - DNA, 1639 bp, Homo Sapiens; identical to SEQ ID NO: 181075

SEQ ID NO: 193841 - DNA, 955 bp, Homo Sapiens
actttgtacaaaaaagttggttcatgttttcccagtcattgttatattacaaacagacttgcatgattaaccagttgttacacttactttttcaagttggagtatatatgactcagtgcagactggtctctcttatgtgaatgcacacatgcagaaatgcagagtcaattttacatgcccataaagacatttgtaaagaattcagctcttatggtctgttgtataaatgtgtatctaggcactttggaatttgacctcacagatgttacaacttgatcagtcgtttgacctaatttgtggtagctatctgtatgttttgcaatcttaatacagacatgctttccaaaaagattaatacagaaccatcctgccgttttggataagtctatccagctgtggaaagggcaacctgtggtttctctgtactggtgtttaatgggggaagaatatgaacagctttaaagagctgtgtattgtggttactactattaaaaaataagatctgcacgagtctgactggcctttgggtggcctttgtggacggctcgtagctggaaagtgttgatctgggttttctggcattcttttaagttaaaaagttaacatcgggacatgggtttgatcttttgttgtacctgatgacagtgcagagattctccacagctggataaaaatgtcacaaagctacttactgtacatgggcagtatcagatttcaaatcctaatatttcagctgtgcttttaatactcaaaatattaggggatggggtgttgaagctttcccttttttgcttttaacatttatagaatttaacagatgtactgtctttcatgtggcctcacatttaaagttatgagaacataaacatgggtttaacacttttactatatacctttccttgggccaccaagtattttaaaagtgtgccaccttttaacctttacctttttttaa

SEQ ID NO: 193842 - DNA, 1046 bp, Homo Sapiens
  misc_feature (148)..(167): n is a, c, g, or t
ttggcaccagtttaccctgaaacattgtcctcagaggagtaggaaagtggattttgaatctctattttgctcaaaagttcagttcctgagatactgatgactgagagtgctgctgggaaattttcaggattgtgtggtcttttggggnnnnnnnnnnnnnnnnnnnnaagacaaagttgaccgctgttcactgtccacgtgatcagttgtaagattacaatgctgcatgctagttggttacataagatacaattccagtgatggaaggcggttataatggatggtggtgtgtacaagatggcactgccatctttgagcagagcccagctctgcagcgccacttcatctttttaaacaccctagaggtctgtttgttgttgctgttgtcctttattttgaaagagttgcaagagaagttacagtccaggtgaacttggagattgtgggattggttttgtttctgttttgttttgtttatcatttacctgtagtgctattgctgttgatactatcacctataccctgtttctagtgagtgctgaatacagtatggtacaatgacagtaacagccgcgtggtgctgccaggactgcccttgggcatatcagtgacagcccaaatgtgggtggaggaaacctgtaatttccttcttaacatgtgtttgaaataccaagtgaataatactgttctggaaaaaaatgataaactagtggaaattaaagaaattaagggttttatataatagacaggccccacctctcaaaatatttttagaagtctttttgtaaactaatttcttttgatcactattttgcatcagtaaaatgatttttttaaaaccaataaatcatcaattattagaaatagttgtctcacagtgatactggtttttcttttgtgctgttatgatttaacattgacaggaacactattttaaatccttacgttcaagtgtttgtaacttgggccttataattaggctgaattatggcttcaggtctacatttatgtgtatggttcacagcctagcttctatttacatttga

SEQ ID NO: 193843 - DNA, 1309 bp, Homo Sapiens; identical to SEQ ID NO: 186664

SEQ ID NO: 193844 - DNA, 1525 bp, Homo Sapiens; identical to SEQ ID NO: 181076
  misc_feature (672)..(698): n is a, c, g, or t
  misc_feature (741)..(783): n is a, c, g, or t
  misc_feature (965)..(979): n is a, c, g, or t
  misc_feature (1274)..(1292): n is a, c, g, or t

SEQ ID NO: 193845 - DNA, 1214 bp, Homo Sapiens; identical to SEQ ID NO: 186665
  misc_feature (752)..(778): n is a, c, g, or t
  misc_feature (820)..(862): n is a, c, g, or t
  misc_feature (1045)..(1059): n is a, c, g, or t

SEQ ID NO: 193846 - DNA, 936 bp, Homo Sapiens; identical to SEQ ID NO: 181077

SEQ ID NO: 193847 - DNA, 683 bp, Homo Sapiens
gacccgctcagaactgatgagatcaagggaatgttcaagcgaaaagccgagcaggacggaccttccaagatgtgccagcttcctgggatctcactgcagcagagcgctgaggcccagcagcacaatcagcagctggggcgccgcagcggagctggagtcctgggagctggggtagtacttcttgtccgcgattctcacgcttaagacctggttttctcttctcagtcgctccacctctgcagacgcgtcctgaagcttatggtttaatgtagtgatctctccctcaagctcctccactttcttttgtccttgggccttctctgcatccagggaagccattagggccatcacagtgtggttgcaggtggcggcctgggcctccacatcctgaaagcccttctgggcctcggtcagctcttgttgcaggagatgggtgacattgcgacactccatcactgcccgaaggccgtcccggcaggcctcgctgttggccttgatggtgaagataatcaagggcacccccagaatcacgatgatcaggagcaccagaattcctatccccagcagaagcttacagcgcttatccccgtcttccatgggcactctgcaatagtcatacgaagtagatgccatccagatctcccctttagctgaaaggagtctggcctggccaacttttttgt

SEQ ID NO: 193848 - DNA, 980 bp, Homo Sapiens
  misc_feature (642)..(652): n is a, c, g, or t
agagaggataaactacacacacacaaacacataaatccatattaagacctaagagtgccaacaactaagaaagaaatatgaaaaagctatgtaagtagctatgatttcaacactacaaaatcatttttaggctggaaccaaacacataacaatctcttggcaatatttcgttaagttttcaacttttttccagcctaaatgactatgggcaataaaaccatttcctttaccccagttctactgtagaaaggcacagcgctgtggtaaatatcaaaccattcctttctcaacctttcagtagcaattaaccaagatactgttctcctttactgaatgactcaattatacagtttcatgtacactctgcaacgcaagtcacagatgtcatagaacatgcaactttgaattagtaaaggtttcactgcaaaaatcattaggttcacacaatttaaatctacaattaacttttaaagtttaatcaggtaaactcaatattttcttggtaataatactggtgatattagtgagcccaagggcaggtagagaaaaagcactaggcaaaattacgtgttttttaaagaaactttcctaatcagggaaataattagcattttgtctactcgttgaatgttgaatttgtcnnnnnnnnnnncccttaaatatatttaatagctatatcaaattgtttaaagtgaaatcatgcacttgtcaaaatagttcacagaaaattgtttagcatcaaagataatgaggaagagtcaaccagttggatttagtgagaatagaataagaactactgtcctgaacagtcagtgtatgtagtaaccatatttcctcttcgttgagtgacagtcctgcagtgcttgctagatccatgaaatctattttcagtctgtactgtatgctgattggtagagtcaaaaccactaaaagaaaacattttctccatatcttcaaacatgtcatcaaataatccccaa

SEQ ID NO: 193849 - DNA, 1187 bp, Homo Sapiens; identical to SEQ ID NO: 186672

SEQ ID NO: 193850 - DNA, 1722 bp, Homo Sapiens; identical to SEQ ID NO: 186673
  misc_feature (1272)..(1282): n is a, c, g, or t

SEQ ID NO: 193851 - DNA, 1707 bp, Homo Sapiens; identical to SEQ ID NO: 186674

SEQ ID NO: 193852 - DNA, 1478 bp, Homo Sapiens; identical to SEQ ID NO: 181079
  misc_feature (1218)..(1271): n is a, c, g, or t

SEQ ID NO: 193853 - DNA, 1407 bp, Homo Sapiens; identical to SEQ ID NO: 186675
  misc_feature (1276)..(1289): n is a, c, g, or t

SEQ ID NO: 193854 - DNA, 1083 bp, Homo Sapiens; identical to SEQ ID NO: 186680

SEQ ID NO: 193855 - DNA, 864 bp, Homo Sapiens
  misc_feature (438)..(448): n is a, c, g, or t
ttggggatctttcggactgaggccttctcaaactttactctaagtctccaagaatacagaaaatgcttttccgcggcacgaatcagactcatctacacagcagtatgaatgatgttttagaatgattccctcttgctattggaatgtggtccagacgtcaaccaggaacatgtaacttggagagggacgaagaaagggtctgataaacacagaggttttaaacagtccctaccattggcctgcatcatgacaaagttacaaattcaaggagatataaaatctagatcaattaattcttaataggctttatcgtttattgcttaatccctctctcccccttcttttttgtctcaagattatattataataatgttctctgggtaggtgttgaaaatgagcctgtaatcctcagctgacacataatttgaatggtgcagnnnnnnnnnnngaaaccgtaattttattattagattctccaaatgattttcatcaatttaaaatcattcaatatctgacagttactcttcagttttaggcttaccttggtcatgcttcagttgtacttccagtgcgtctcttttgttcctggctttgacatgaaaagataggtttgagttcaaattttgcattgtgtgagcttctacagattttagacaaggaccgtttttactaagtaaaagggtggagaggttcctggggtggattcctaagcagtgcttgtaaaccatcgcgtgcaatgagccagatggagtaccatgagggttgctatttgttgtttttacaactaatcaagagtgagtgaacaactatttataaactaggatctcctatttttcagatgctcttctacgtataaatatgaaa

SEQ ID NO: 193856 - DNA, 989 bp, Homo Sapiens; identical to SEQ ID NO: 186689

SEQ ID NO: 193857 - DNA, 1427 bp, Homo Sapiens
  misc_feature (993)..(1055): n is a, c, g, or t
actttgtacaaaaaagttggctattttgtagaatgaatgtttatgaagctgatatgagaccatctcagaagaaccaagcaggttccttgaccttttgcttgcttttctgaacattgtgaatattacacatgtctttctaaattattctagggtatgcaaatgtcaatggtatgaaacaccactgtactggaagaattaatatattactttagtatgtacctgagctaaatgactgaagctttaggggtgcatagaaaccaccataatttgtatgacattttgaagtgaattaaatatttttgaacatgcttcttcgacagccagtgttatatttttcagatcaacacaaagcacaatgattactcgaaattcagtattttcaaatttacatatttaaagtcatgcaagctgtaacttccctgtcaaaattactggctgccaaatttatacctgtttcttcagctgtaccttttgatatttaaagtttttaaatttctgtaaagtagattttgtagaatgtaatgtgttcactgcctttgtgaagcggtatataattgtataatttctgtgtgtaaactgaatgcttgggctttcaatacagtattcatataaagcaataaatattaatgttatgaaatatttgactacatttttatcaaaatatgaaagaatccccccttttttagtttcagatacctgaactacacagatgagcttctaaaactgatggaaacagtttctgacactgtataatatgcttttgggtgatttggggggcaaccacaagttttgcgttttgactacttaaatcatcatggctataaataccaaaacgatttggatccatttatgtttgtaggataatatactactgactgacttgactgtcaggttcacaacagctagatgatatatttatgactatgtctaatagttgaaataaaatctgaatattgatttactatacccaagaggggagaaaaattaaccatnnnnnnnnnnnnnnnnnnnnnnnnnnnnnnnnnnnnnnnnnnnnnnnnnnnnnnnnnnnnnnngaaattttcttttgaatatttatgaaattgtcagtaaacttacctaagatcctgtgaccttttgatattttttattttaattgtagtgccatggaccatttgtaaacaaattgatttacttttgttggttgtaagttgaagatttagcattatgactttgaggtctgtggttttatttgtaaacttgcaattgctatatttgcaagggcaaatgtatttctttattaaataaagtacaataatggtgaatgtaccaaaatgacatcacttaactctatgagagatctgcattttaatctatagtttaatagttttaatatttattaggatattcatatgttgatcatagatcaaacttgttgctgtttatac

SEQ ID NO: 193858 - DNA, 1637 bp, Homo Sapiens; identical to SEQ ID NO: 181088
  misc_feature (1021)..(1045): n is a, c, g, or t
  misc_feature (1079)..(1088): n is a, c, g, or t

SEQ ID NO: 193859 - DNA, 1628 bp, Homo Sapiens; identical to SEQ ID NO: 186695

SEQ ID NO: 193860 - DNA, 1116 bp, Homo Sapiens; identical to SEQ ID NO: 186698

SEQ ID NO: 193861 - DNA, 1695 bp, Homo Sapiens; identical to SEQ ID NO: 186699

SEQ ID NO: 193862 - DNA, 673 bp, Homo Sapiens; identical to SEQ ID NO: 186700

SEQ ID NO: 193863 - DNA, 769 bp, Homo Sapiens; identical to SEQ ID NO: 181091

SEQ ID NO: 193864 - DNA, 1509 bp, Homo Sapiens; identical to SEQ ID NO: 181092
  misc_feature (586)..(720): n is a, c, g, or t

SEQ ID NO: 193865 - DNA, 899 bp, Homo Sapiens
ttggcacatttccggtatccaaggcagcagaggtgagtgggtcccccgagctctgtgaccttatgctccacactaactctggcagagcctccgtttcctcatagaacaaagaacagccaccatgcagctcttcctcctcttgtgcctggtgcttctcagccctcagggggcctcccttcaccgccaccacccccgggagatgaagaagagagtcgaggacctccatgtaggtgccacggtggcccccagcagcagaagggactttacctttgacctctacagggccttggcttccgctgcccccagccagaacatcttcttctcccctgtgagcatctccatgagcctggccatgctctccctgggggctgggtccagcacaaagatgcagatcctggagggcctgggcctcaacctccagaaaagctcagagaaggagctgcacagaggctttcagcagctccttcaggaactcaaccagcccagagatggcttccagctgagcctcggcaatgcccttttcaccgacctggtggtagacctgcaggacaccttcgtaagtgccatgaagacgctgtacctggcagacactttccctaccaactttagggactctgcaggggccatgaagcagatcaatgattatgtggcaaagcaaacgaagggcaagattgtggacttgcttaagaacctcgatagcaatgcggtcgtgatcatggtgaattacatcttctttaaagctaagtgggagacaagcttcaaccacaaaggcacccaagagcaagacttctacgtgacctcggagactgtggtgcgggtacccatgatgagccgcgaggatcagtatcactacctcctggaccggaacctctcctgcagggtggtggggggtcccctac

SEQ ID NO: 193866 - DNA, 949 bp, Homo Sapiens
tacaaaaaagttgggggactgccacctccactgtgtgcgcactcagctacgggacacaaacaaagaacagccaccatgcagctcttcctcctcttgtgcctggtgcttctcagccctcagggggcctcccttcaccgccaccacccccgggagatgaagaagagagtcgaggacctccatgtaggtgccacggtggcccccagcagcagaagggactttacctttgacctctacagggccttggcttccgctgcccccagccagagcatcttcttctcccctgtgagcatctccatgagcctggccatgctctccctgggggctgggtccagcacaaagatgcagatcctggagggcctgggcctcaacctccagaaaagctcagagaaggagctgcacagaggctttcagcagctccttcaggaactcaaccagcccagagatggcttccagctgagcctcggcaatgcccttttcaccgacctggtggtagacctgcaggacaccttcgtaagtgccatgaagacgctgtacctggcagacactttccctaccaactttagggactctgcaggggccatgaagcagatcaatgattatgtggcaaagcaaacgaagggcaagattgtggacttgcttaagaacctcgatagcaatgcggtcgtgatcatggtgaattacatcttctttaaagctaagtgggagacaagcttcaaccacaaaggcacccaagagcaagacttctacgtgacctcggagactgtggtgcgggtacccatgatgagccgcgaggatcagtatcactacctcctggaccggaacctctcctgcagggtggtgggggtcccctaccaggcaatgccacggctttgttcattctcccagtgagggaaagatgcagcaggtggagaatggactgagtgaaaaacgctgaggaagtggcttaaga

SEQ ID NO: 193867 - DNA, 914 bp, Homo Sapiens; identical to SEQ ID NO: 186706

SEQ ID NO: 193868 - DNA, 1077 bp, Homo Sapiens
ttggagacaaacggcccgcccgccggctccacaaacagcccctcgctggtcctccagtcttccagcgagaagaaagaaagagcgtccccggaagccgccgaaactctggggtagagtggcgcgctttttgcttttccgcgtcttcttcggtggcgatccgcgtcctagaaagggcggtgggctccacctcggcctagaaggccagcgggagccgtaggaagccgtcgcgggaagctcagccgaattggagttggagcccccggattgcgctgaccctgagctctcagactccccagtacaatgactcaagcagaaattaagctctgttctttgttgctgcaagagcattttggagagattgtagaaaaaattggagtccatctgataagaaccggcagccagccactaagagtaattgcccatgacacaggaacatcactggatcaggtgaagaaagccctgtgtgtcctcgtccaacataacctggtgagttatcaagtgcacaaacgtggtgtggtggagtatgaagcccagtgcagccgggtattgcgaatgcttagatatccccggtacatctatactaccaaaactctgtacagtgacactggagagctgattgttgaggagcttctgttgaacggcaaactgacaatgtcagctgttgtgaagaaagtggcagaccggctcacagagaccatggaggatggcaagaccatggactatgctgaagtatcaaacacatttgtgcgactggcagacacacactttgtacaacgctgcccttcggtacctaccactgagaattcagaccctgggccaccaccacctgcccccacacttgtcattaatgaaaaggacatgtacctggttcctaaactcagcttgatagggaaaggtaaaaggaggagatcatctgatgaagatgctgctggggagcccaacgccaagagaccaaaatatactacagataacaaggaggccaaccttgacagattccaccaacacttccgtgaccaagccattgtgagcgcagttgctaacagatggaccagtttacttttcaaacagacaagcagc

SEQ ID NO: 193869 - DNA, 633 bp, Homo Sapiens
gagcaatgcttttttataatgccaactttgtacaaaaaagttggcctaggtcgcggcgacatggccaaacgtaccaagaaagtcgggatcgtcggtaaatacgggacccgctatggggcctccctccggaaaatggtgaagaaaattgaaatcagccagcacgccaagtacacttgctctttctgtggcaaaaccaagatgaagagacgagctgtggggatctggcactgtggttcctgcatgaagacagtggctggcggtgcctggacgtacaataccacttccgctgtcacggtaaagtccgccatcagaagactgaaggagttgaaagaccagtagacgctcctctactctttgagacatcactggcctataataaatgggttaatttatgtaacaaaattgccttggcttgttaactttattagacattctgatgtttgcattgtgtaaatactgttgtattggaaaagcatgccaagatggattattgtaattcagtgtcttttttagtagtcaaatggtaaaatgcagcataagaatataagtcttccaagttagatatgagtgttagctttttataagtctgctcctgccagtttgactttgagatacattggagccaactgtaaa

SEQ ID NO: 193870 - DNA, 1120 bp, Homo Sapiens; identical to SEQ ID NO: 181100
  misc_feature (146)..(160): n is a, c, g, or t
  misc_feature (387)..(409): n is a, c, g, or t
  misc_feature (414)..(458): n is a, c, g, or t
  misc_feature (885)..(931): n is a, c, g, or t

SEQ ID NO: 193871 - DNA, 865 bp, Homo Sapiens; identical to SEQ ID NO: 186720

SEQ ID NO: 193872 - DNA, 1919 bp, Homo Sapiens; identical to SEQ ID NO: 186721
  misc_feature (321)..(329): n is a, c, g, or t
  misc_feature (1173)..(1234): n is a, c, g, or t

SEQ ID NO: 193873 - DNA, 1615 bp, Homo Sapiens; identical to SEQ ID NO: 186722
  misc_feature (330)..(338): n is a, c, g, or t
  misc_feature (1198)..(1243): n is a, c, g, or t

SEQ ID NO: 193874 - DNA, 999 bp, Homo Sapiens; identical to SEQ ID NO: 181101

SEQ ID NO: 193875 - DNA, 881 bp, Homo Sapiens
tttgtacaaaaaattggcttccagatgctggcggatccccgctccttcgactccaacgccttcacgcttctcctccgggcggcattccagagtctgctggacgcccaggcggacgaggccgtgttagatcatccagacttgaaacatatcgacccagtggttttaaaacattgtcatgcagcagctgcaacttacatactagaggcaggaaagcaccgagctgacaagtcaactctaagcacttatctagaagactgtaaatttgacagagagcgaatagaactgttttgcacggaatatcagaataataagaattccctagaaatcctactgggaagtataggcagatctctccctcatataacggatgtttcttggcgcttggaatatcagataaagaccaatcaacttcataggatgtacagacctgcatatttggtgaccttaagtgtacagaacactgattccccatcctatccagagattagttttagttgcagcatggaacaattacaggacttggtggggaaacttaaagatgcttcgaaaagcctggaaagagcaactcagttgtaacttggggaagttaacgatccgcccgagtgcagaggaaaaccagaaacgccttgccttcagctgaaccaccgtttgtgcgagctggatgtccttttcagtagaaaagaattttccttttgaatttataccattcatcaattttgacactttaaaaacgtgtgaaagggttaagagggaaagatactgcccaagtatttgaatcgtttagtagtaactgtccatttatcctattttgatctttttcaagtcttctgaaaggaagtagacagtattacaccctgaataaataaggtgttgttttccac

SEQ ID NO: 193876 - DNA, 845 bp, Homo Sapiens
ttggcgaaggtcaccgcgcgctcacaatggagctctcggagtctgtgcagaaaggcttccagatgctggcggatccccgctccttcgactccaacgccttcacgcttctcctccgggcggcattccagagtctgctggacgcccaggcggacgaggccgtgttagatcatccagacttgaaacatatcgacccagtggttttaaaacattgtcatgcagcagctgcaacttacatactagaggcaggaaagcaccgagctgacaagtcaactctaagcacttatctagaagactgtaaatttgacagagagcgaatagaactgttttgcacggaatatcagaataataagaattccctagaaatcctactgggaagtataggcagatctctccctcatataacggatgtttcttggcgcttggaatatcagataaagaccaatcaacttcataggatgtacagacctgcatatttggtgaccttaagtgtacagaacactgattccccatcctatccagagattagttttagttgcagcatggaacaattacaggacttggtggggaaacttaaagatgcttcgaaaagcctggaaagagcaactcagttgtaacttggggaagttaacgatccgcccgagtgcagaggaaaaccagaaacgccttgccttcagctgaaccaccgtttgtgcgagctggatgtccttttccgtaaaaaaagaattttccttttgaatttataccattcatcattttgacacttttaaaaacgtgtgaaggggttaagaggggaaagatactgccccaagtatttgaatcgtttagtataaactgtccattttatc

SEQ ID NO: 193877 - DNA, 1041 bp, Homo Sapiens
ttgggtagtaccatggcggccatgagtttgttgcggcgggtttcggttactgcggtggcagctctgtctggccggccccttggcactcgcctcggatttgggggcttcctcactcgtggctttccgaaggctgctgctcctgttcgacacagtggagaccatgggaaaagactatttgtcatcagaccttctagattctatgacaggcgttttttgaagttattgagattctacattgcattgactgggattccagtagcaattttcataactctggtgaatgtattcattggtcaagctgaactagcagaaattccagaaggctatgtcccagaacactgggaatattataagcatcccatatcaagatggattgcccgtaatttctatgatagtcctgaaaagatatatgaaagaacaatggccgtccttcagattgaagctgaaaaggctgaattacgggtaaaggagctggaagtgcgaaaattgatgcatgtgagaggagatggaccctggtattactatgagacaattgacaaggaacttattgatcattctccgaaagcaactcctgacaattaagcatttttttctccaaatacaaagtatattctctttattggaaaataaattaataaatatattctgtatttttgctctccgtgaaaaacaaaagagcctctgacattactgtctctcagtgttggttcagattgaggcttttgtttgaggagtttggcttccagtccccaaagaaggtttaaaatgtactaataaaaactggagaaataggaatttgtgaactcctaaaattgtagcaactttgaaaggttagtgttttatttacctgacaaatggaagttatagaagtctaataatgttaagcaccagtaattatagtattttgtacaaatgcctgtactgtagatgtctgtattattgaggggcaactcaagattttaagttccataaagtattgaaccaactctaaaatgttaactccttaataaacagattctcagtaaacaaattttaaagttt

SEQ ID NO: 193878 - DNA, 956 bp, Homo Sapiens
  misc_feature (525)..(538): n is a, c, g, or t
  misc_feature (583)..(610): n is a, c, g, or t
  misc_feature (824)..(881): n is a, c, g, or t
ccaactttgtacaaaaaagttggtgtaaatacccttagctatatggtatgatttataaagataaatgggccaaagtgtacattgagactggcagccatctatggtaccactgaaaccctgacccagaaaagtggcttgcttggacacccagctgcctttgtttctgcattaaaccaatattgatcacacatatgacacaggctagtcctataaaagtaatgacttcatagaaatggcattataatttttaagttgatactctacaggtagctattgatataattagttttaataaaacatgctgcaaccatggtatacaacaaaaatacttttctttggtgattgaaattaaggccgtatttacaatgacttaatataagactgacttttatcctgcttcataacttgtatggagaactcaccaagaaagaattcaatactgtgaaatatgcagcaagaagattggtctttacctaggctgtgtttcctaagctctgagttttaagcaccagtagatttgtattnnnnnnnnnnnnnntggggccttagcttctggcttttaattttgccagctaaggacatnnnnnnnnnnnnnnnnnnnnnnnnnnnntagccatctgctatcagcatcattatgtaaaagaaaatatattttagcccctaaaattaggaagaatgtaatctcagaataaaggttgtcatttaagttgaataaatatatagctttatgaaaaacacattgtttgcccttttttcctctcatttcattgtagaaatggtgacaccacaatgacctggacagtattttatctgctttcacacannnnnnnnnnnnnnnnnnnnnnnnnnnnnnnnnnnnnnnnnnnnnnnnnnnnnnnnnnagatagaggagggattctcttgcaagtatacaaaatactctctttttcttttatcccagttagaaaatagttgta

SEQ ID NO: 193879 - DNA, 827 bp, Homo Sapiens; identical to SEQ ID NO: 186726

SEQ ID NO: 193880 - DNA, 959 bp, Homo Sapiens; identical to SEQ ID NO: 186732

SEQ ID NO: 193881 - DNA, 1120 bp, Homo Sapiens
  misc_feature (855)..(879): n is a, c, g, or t
ttggggactgaagaggctgaagacataatgagcttggactagtaaacaagtgacattcagttttaggaagtttggggtctgatgggctgagatacaaataaactgaattattttcatacatggctgcttttcaggaccacatggtgacaatgcatgatgtgcttgatgctcagtggctgtatgataaccacaaggatgagagttacctgcggcgagttgtttaccctttggaaaagctgttgacatctcataaacggctggttatgaaagacagtgcagtaaatgccatctgctatggggccaagattatgcttccaggtgttcttcgatatgaggacggcattgaggtcaatcaggagattgtggttatcaccaccaaaggagaagcaatctgcatggctattgcattaatgaccacagcggtcatctctacctgcgaccatggtatagtagccaagatcaagagagtgatcatggagagagacacttaccctcggaagtggggtttaggtccaaaggcaagtcagaagaagctgatgatcaagcagggccttctggacaagcatgggaagcccacagacagcacacctgccacctggaagcaggagtatgttgactacagtgagtctgccaaaaaagaggtggttgctgaagtggtaaaagccccgcaggtagttgccgaagcagcaaaaactgcgaagcggaagcgagagagtgagagtgaaagtgacgagactcctccagcagctcctcagttgatcaagaaggaaaagaagaagagtaagaaggacaagaaggccaaagctggtctggagagcggggccgagcctggagatggggacagtgatactactnnnnnnnnnnnnnnnnnnnnnnnnncaaaagaggtagaattggtttctgagtagtgaaggccacttgaagctggaggagaaactaaagctcttattgagaaaacatgttatagatccttttgttgctgagagagtggaacataggtcctagacagggtgaagagttctggcacattttagctgctactttgagacctcggtgatgttacctggtgtggtcatcccatcttgtcctgttttaaggatatgggtggtgaaagatgaaa

SEQ ID NO: 193882 - DNA, 1163 bp, Homo Sapiens
  misc_feature (296)..(320): n is a, c, g, or t
  misc_feature (711)..(727): n is a, c, g, or t
ttggatcagtactgccctggaaagccattcagtgaatttgacctattgctacctctttttcagtgagtctgccaaaaaagaggtggttgctgaagtggtaaaagccccgcaggtagttgccgaagcagcaaaaactgcgaagcggaagcgagagagtgagagtgaaagtgacgagactcctccagcagctcctcagttgatcaagaaggaaaagaagaagagtaagaaggacaagaaggccaaagctggtctggagagcggggccgagcctggagatggggacagtgataccaccnnnnnnnnnnnnnnnnnnnnnnnnncaaaagaggtagaattggtttctgagtagtgaagaccacttgaagctggaggagaaactaaagccttattgagaaaacatgttatagatccttttgttgctgagagagtggaacataggtcctagacagggtgaagagttctggcacattttagctgctactttgagacctcggtgatgttacctggtgtggtcatcccatcttgtcctgttttaaggatatgggtggtgaaagatgaaagaggcagagtttatcccaatgacttctctgtttgagttgggaagcctcaccttcagacccagtaactgtccgcagctgtctgctagtggttgtcttaacatcgtagtcctagtttgcattttttaaatcccctctgtttaaaaggtttgtnnnnnnnnnnnnnnnnnctaagtctgctcagtgaaatgctgtagaaccctaaataagtggtagaagagtgtcactgaattttgtctctgaattcagtataactgagttttgtccatgctggtgtctgggttataggcctgatgggcctggtagttttccatcttgttctggcctagaggtcagtcctttgcacttcctcaaagcttgtgtacagtgctcacctaaatccatctgactacttgttcctgtgccctcttgttttaggcctcgtttacttttaaaaaatgaaattgttcattgctgggagaagaatgttgtaatttttacttattaaagtcaacttgttaagttttttatgtattcctgttgggttttcttgttgatctcatgctagcagagcaaaaattgtacaatattttgattaaaaatctatggacctttatgtcctatttg

SEQ ID NO: 193883 - DNA, 1218 bp, Homo Sapiens; identical to SEQ ID NO: 186736

SEQ ID NO: 193884 - DNA, 1645 bp, Homo Sapiens; identical to SEQ ID NO: 186737
  misc_feature (82)..(110): n is a, c, g, or t
  misc_feature (683)..(693): n is a, c, g, or t
  misc_feature (917)..(929): n is a, c, g, or t

SEQ ID NO: 193885 - DNA, 2053 bp, Homo Sapiens; identical to SEQ ID NO: 186738
  misc_feature (132)..(146): n is a, c, g, or t
  misc_feature (507)..(520): n is a, c, g, or t
  misc_feature (1519)..(1557): n is a, c, g, or t

SEQ ID NO: 193886 - DNA, 1055 bp, Homo Sapiens
ccaactttgtacaaaaaagttggcttcaagcaatcactatgtcaacagacacaggtgtttcccttccttcatatgaggaagatcagggatcaaaactcattcgaaaagctaaagaggcaccattcgtacccgttggaatagcgggttttgcagcaattgttgcatatggattatataaactgaagagcaggggaaatactaaaatgtccattcatctgatccacatgcgtgtggcagcccaaggctttgttgtaggagcaatgactgttggtatgggctattccatgtatcgggaattctgggcaaaacctaagccttagaagaagagatgctgtcttggtcttgttggaggagcttgctttagttagatgtcttattattaaagttacctattattgttggaaataaactaatttgtatgggtttagatggtaacatggcattttgaatattggcttcctttcttgcaggcttgatttgcttggtgaccgaattactagtgactagtttactaactaggtcattcaaggaagtcaagttaacttaaacatgtcacctaaatgcacttgatggtgttgaaatgtccaccttcttaaatttttaagatgaacttagttctaaagaagataacaggccaatcctgaaggtactccctgtttgctgcagaatgtcagatattttggatgttgcataagagtcctatttgccccagttaattcaacttttgtctgcctgttttgtggactggctggctctgttagaactctgtccaaaaagtgcatggaatataacttgtaaagcttcccacaattgacaatatatatgcatgtgtttaaaccaaatccagaaagcttaaacaatagagctgcataatagtatttattaaaaatcccaactgtaaacatgagaaataacttaaggattctagtttagttttttgtaattgcaaattatatttttgctgctgatatattagaataatttttaattgtctccttgaattagaaatatgtattttaagcactcccgccaagggtaattgcccacgttttaaa

SEQ ID NO: 193887 - DNA, 986 bp, Homo Sapiens
caactttgtacaaaaaagttggtttctcgctctagggagattcttcaagcaatcactatgtcaacagacacaggtgtttcccttccttcatatgaggaagatcagggatcaaaactcattcgaaaagctaaagaggcaccattcgtacccgttggaatagcgggttttgcagcaattgttgcatatggattatataaactgaagagcaggggaaatactaaaatgtccattcatctgatccacatgcgtgtggcagcccaaggctttgttgtaggagcaatgactgttggtatgggctattccatgtatcgggaattctgggcaaaacctaagccttagaagaagagatgctgtcttggtcttgttggaggagcttgctttagttagatgtcttattattaaagttacctattattgttggaaataaactaatttgtatgggtttagatggtaacatggcattttgaatattggcttcctttcttgcaggcttgatttgcttggtgaccgaattactagtgactagtttactaactaggtcattcaaggaagtcaagttaacttaaacatgtcacctaaatgcacttgatggtgttgaaatgtccaccttcttaaatttttaagatgaacttagttctaaagaagataacaggccaatcctgaaggtactccctgtttgctgcagaatgtcagatattttggatgttgcataagagtcctatttgccccagttaattcaacttttgtctgcctgttttgtggactggctggctctgttagaactctgtccaaaaagtgcatggaatataacttgtaaagcttcccacaattgacaatatatatgcatgtgtttaaaccaaatccagaaagcttaaacaatagagctgcataatagtatttattaaagaatcacaacctgtaaacatgagaaataacttaaggattctagtttaggttttttgtaattgcaaattatatttttgctg

SEQ ID NO: 193888 - DNA, 784 bp, Homo Sapiens; identical to SEQ ID NO: 186742

SEQ ID NO: 193889 - DNA, 883 bp, Homo Sapiens; identical to SEQ ID NO: 181107
  misc_feature (215)..(229): n is a, c, g, or t

SEQ ID NO: 193890 - DNA, 1067 bp, Homo Sapiens; identical to SEQ ID NO: 181108
  misc_feature (929)..(946): n is a, c, g, or t

SEQ ID NO: 193891 - DNA, 1027 bp, Homo Sapiens
caatcaaatcgttggaatggtgagttcatgagaagtagtctgagcagatgcatccaaacctgcccaatagcctttcacctctggagagctggattcaatgccactgaatccggtgttgccatgcgtcatgggaaaatgagactgttgcattgccaactggtgcagcttggtcaaatctggctgtggaatggcatactgtccttgaatggtataggcctctagaggtggtccctccaggtcagggttgaggcacatggacggggtggtgtggggaaagctcgcactgtcgctgcctgtgctgtacctgtcctgaccacctgcaaagatgaccggagagctggacggcttgggccggtacgggatggtcacgcccttcgggggggactgggagagagtctccaacatgaccacgcagatctgtttgacacactcaatgatggattgtggaatgccagcaatagtgatggcccgctcagttgagttgggtagcatatcccctgccacctggacctgagcccctgtactctctcgtatttccttgatcttgcatccaccttttccaatgagagagccacactgactagcagggaccaccagcctcagggtgaccgggggtctactggcagctgtgctattggtcatagagctgcttatgtcctcttccagtttgtcaatgatcatagcaaaggctttgaagatggcattagtgggtccagccaaagtgataattctctcaggacaattcccttctgagatgttgatacgtgcaccactctcctcgcgcatcttcttaactgattctcctttctgtaaaggaaaagtcaagcatgagctccaactgctacttcaatccagaattactaaatggtaattgaagttgaagtgaaattgtcttacctttccgatgatactgccaacttcctttccatgcataagtagccggatggtgagagtgacatttaatccaccttcaatcacaccggtgtccatgtcgagcagtgttctggggaggtggactttgagccaa

SEQ ID NO: 193892 - DNA, 893 bp, Homo Sapiens
ttgggttggcagtatcatcggaaagaaaggagaatcagttaagaagatgcgcgaggagagtggtgcacgtatcaacatctcagaagggaattgtcctgagagaattatcactttggctggacccactaatgccatcttcaaagcctttgctatgatcattgacaaactggaagaggacataagcagctctatgaccaatagcacagctgccagtagacccccggtcaccctgaggctggtggtccctgctagtcagtgtggctctctcattggaaaaggtggatgcaagatcaaggaaatacgagagagtacaggggctcaggtccaggtggcaggggatatgctacccaactcaactgagcgggccatcactattgctggcattccacaatccatcattgagtgtgtcaaacagatctgcgtggtcatgttggagtcccccccgaagggcgtgaccatcccgtaccggcccaagccgtccagctctccggtcatctttgcaggtggtcaggacaggtacagcacaggcagcgacagtgcgagctttccccacaccaccccgtccatgtgcctcaaccctgacctggagggaccacctctagaggcctataccattcaaggacagtatgccattccacagccagatttgaccaagctgcaccagttggcaatgcaacagtctcattttcccatgacgcatggcaacaccggattcagtggcattgaatccagctctccagagtgaaaggctattgggcaggtttggatgcatctgctcagactacttctcatgaactcaccattccaaacgatttgattggctgcataatcgggcgtcaaggcgccaaaatcaatgagatccgtcagatgtctggggcgcagatcaaaattgc

SEQ ID NO: 193893 - DNA, 995 bp, Homo Sapiens
tcagtcgcctcgcgcctgcagtttttggctttcacccccaaccagtgaccaaagacttgaccactcaaagtccagctccccagaacactgctcgacatggacaccggtgtgattgaaggtggattaaatgtcactctcaccatccggctacttatgcatggaaaggaagttggcagtatcatcggaaagaaaggagaatcagttaagaagatgcgcgaggagagtggtgcacgtatcaacatctcagaagggaattgtcctgagagaattatcactttggctggacccactaatgccatcttcaaagcctttgctatgatcattgacaaactggaagaggacataagcagctctatgaccaatagcacagctgccagtagacccccggtcaccctgaggctggtggtccctgctagtcagtgtggctctctcattggaaaaggtggatgcaagatcaaggaaatacgagagagtacaggggctcaggtccaggtggcaggggatatgctacccaactcaactgagcgggccatcactattgctggcattccacaatccatcattgagtgtgtcaaacagatctgcgtggtcatgttggagactctctcccagtcccccccgaagggcgtgaccatcccgtaccggcccaagccgtccagctctccggtcatctttgcaggtggtcaggacaggtacagcacaggcagcgacagtgcgagctttccccacaccaccccgtccatgtgcctcaaccctgacctggagggaccacctctagaggcctataccattcaaggacagtatgccattccacagccagatttgaccaagctgcaccagttggcaatgcaacagtctcattttcccatgacgcatggcaacaccggattcagtggtatggatacctcagtgtttatttctgtaaagtgtagtgcaagagagaggccagtcccaaggtctcagcttgacatctgtttaaaacaaacttcgtatcc

SEQ ID NO: 193894 - DNA, 1641 bp, Homo Sapiens; identical to SEQ ID NO: 181109
  misc_feature (776)..(806): n is a, c, g, or t

SEQ ID NO: 193895 - DNA, 1175 bp, Homo Sapiens
  misc_feature (1012)..(1040): n is a, c, g, or t
ttggggaagagcatgaactgtttttctctgattttgaatttctttttactccaaagagtacaggggctcaggtccaggtggcaggggatatgctacccaactcaactgagcgggccatcactattgctggcattccacaatccatcattgagtgtgtcaaacagatctgcgtggtcatgttggagactctctcccagtcccccccgaagggcgtgaccatcccgtaccggcccaagccgtccagctctccggtcatctttgcaggtggtcaggacaggtacagcacaggcagcgacagtgcgagctttccccacaccaccccgtccatgtgcctcaaccctgacctggagggaccacctctagaggcctataccattcaaggacagtatgccattccacagccagatttgaccaagctgcaccagttggcaatgcaacagtctcattttcccatgacgcatggcaacaccggattcagtggcattgaatccagctctccagaggtgaaaggctattgggcaggtttggatgcatctgctcagactacttctcatgaactcaccattccaaacgatttgattggctgcataatcgggcgtcaaggcgccaaaatcaatgagatccgtcagatgtctggggcgcagatcaaaattgcgaacccagtggaaggatctactgataggcaggttaccatcactggatctgctgccagcattagcctggctcaatatctaatcaatgtcaggctttcctcggagacgggtggcatggggagcagctagaacaatgcagattcatccataatccctttctgctgttcaccaccacccatgatccatctgtgtagtttctgaacagtcagcgattccaggttttaaatagtttgtaaattttcagtttctacacactttatcatccactcgtgattttttaattaaagcgttttaattcctttctctgttcagctgttgatgctgagatccatatttagttttataagcttctccctggnnnnnnnnnnnnnnnnnnnnnnnnnnnnnggctcatgaatttttctgtttgtcatggaaatgtaagaatggaatattaatacatttcaatttatttctgttatgtcaggaatttttccaaaaaaatcaaagatggaccgccccccttttctttgtgaatagaaa

SEQ ID NO: 193896 - DNA, 1273 bp, Homo Sapiens
  misc_feature (1146)..(1161): n is a, c, g, or t
ttggtggttctttaatggcagttactagtttccagggatctgcttattgtggtgttctttctttctgtaggacataagcagctctatgaccaatagcacagctgccagtagacccccggtcaccctgaggctggtggtccctgctagtcagtgtggctctctcattggaaaaggtggatgcaagatcaaggaaatacgagagagtacaggggctcaggtccaggtggcaggggatatgctacccaactcaactgagcgggccatcactattgctggcattccacaatccatcattgagtgtgtcaaacagatctgcgtggtcatgttggagtcccccccgaagggcgtgaccatcccgtaccggcccaagccgtccagctctccggtcatctttgcaggtggtcaggacaggtacagcacaggcagcgacagtgcgagctttccccacaccaccccgtccatgtgcctcaaccctgacctggagggaccacctctagaggcctataccattcaaggacagtatgccattccacagccagatttgaccaagctgcaccagttggcaatgcaacagtctcattttcccatgacgcatggcaacaccggattcagtggcattgaatccagctctccagaggtgaaaggctattgggcaggtttggatgcatctgctcagactacttctcatgaactcaccattccaaacgatttgattggctgcataatcgggcgtcaaggcgccaaaatcaatgagatccgtcagatgtctggggcgcagatcaaaattgcgaacccagtggaaggatctactgataggcaggttaccatcactggatctgctgccagcattagcctggctcaatatctaatcaatgtcaggctttcctcggagacgggtggcatggggagcagctagaacaatgcagattcatccataatccctttctgctgttcaccaccacccatgatccatctgtgtagtttctgaacagtcagcgattccaggttttaaatagtttgtaaattttcagtttctacacactttatcatccactcgtgattttttaattaaagcgttttaattcctttctctgttcagctgttgatgctgagatccatatttatttttattatcttctccctggnnnnnnnnnnnnnnnngggttttctcttttggctcatgaatttttctgtttgtcatggaaatgtaagaatggaataataataaatttcaatttaattcagtaatgtcgggaatttttccaaaaaatta

SEQ ID NO: 193897 - DNA, 915 bp, Homo Sapiens
actttgtacaaaaaagttggcttttcccctcattcgcctcgcgcctgcagtttttggctttcacccccaaccagtgaccaaagacttgaccactcaaagtccagctccccagaacactgctcgacatggacaccggtgtgattgaaggtggattaaatgtcactctcaccatccggctacttatgcatggaaaggaagttggcagtatcatcggaaagaaaggagaatcagttaagaagatgcgcgaggagagtggtgcacgtatcaacatctcagaagggaattgtcctgagagaattatcactttggctggacccactaatgccatcttcaaagcctttgctatgatcattgacaaactggaagaggacataagcagctctatgaccaatagcacagctgccagtagacccccggtcaccctgaggctggtggtccctgctagtcagtgtggctctctcattggaaaaggtggatgcaagatcaaggaaatacgagagagtacaggggctcaggtccaggtggcaggggatatgctacccaactcaactgagcgggccatcactattgctggcattccacaatccatcattgagtgtgtcaaacagatctgcgtggtcatgttggaactctctcccgtcccccccgaagggcgtgaccatcccgtaccggcccaagccgtccagctctccggtcatctttgcaggtggtcaggcctataccattcaaggacagtatgccattccacagccagatttgaccaagctgcaccagttggcaatgcaacagtctcattttcccatgacgcatggcaacaccggattcagtggcattgaatccagctctccagaggtgaaaggctattggcaggtttggatgcatctgctcaaactaccttctcatgaactcaccatt

SEQ ID NO: 193898 - DNA, 1741 bp, Homo Sapiens; identical to SEQ ID NO: 186748

SEQ ID NO: 193899 - DNA, 1432 bp, Homo Sapiens; identical to SEQ ID NO: 186749

SEQ ID NO: 193900 - DNA, 2011 bp, Homo Sapiens; identical to SEQ ID NO: 181112
  misc_feature (85)..(93): n is a, c, g, or t
  misc_feature (1768)..(1781): n is a, c, g, or t

SEQ ID NO: 193901 - DNA, 1435 bp, Homo Sapiens; identical to SEQ ID NO: 181117

SEQ ID NO: 193902 - DNA, 872 bp, Homo Sapiens
ttggctggaccacttacgaaagtgccttgccttgcctgcaatgcactggcctaggggctacctgaagggatatcccaggtgacggtttcccttgcactaggccgaacctatagtatagaaatattatctattttattaccttgaatatttaatatttttcactgggaggtttgaagcttacaaaatgagaatgtgccatgcatgaagcaaaggattccaggctccagaaaaaatgaatgaactcaccttgacgtcaatgcaattgaatcaccgttgtcattcagcgagcaaccaatgtaggattgcccacagtttttctttttaaaggtggttttcgcccttcctctcccacattaatctgaacatgaaggctccattagcaacactaaaacttgatcattaacagccccctgtgcatatgagtggatcaaaccggttctgttctttcttgtgttgccatgttactatgcctcaagcccagtttgcttttgccacagcgatggggccagtctcattcctccccaggagtgaaacttgcttcagctgaaaaggttgggtgcatcgtcagtaaaaagggcttatttgtttcattttactttcctgcaaaattttcttcaaagcaacaagtcctaggagcacacaaagcaacccaaaggcttttccctggaaaagctctttcttacctaaagataaaaccaattcacaaactgaaggtagctttttattactccgtggggagcatgtacagagctctgtgtatacacagcttcacacccaccagattgttactacagtgggttgggttttcatacagacgtaaattttgagagaaaagtcaaaggtgcttcagccttgtactgtgtatatatatt

SEQ ID NO: 193903 - DNA, 977 bp, Homo Sapiens; identical to SEQ ID NO: 186753

SEQ ID NO: 193904 - DNA, 1494 bp, Homo Sapiens; identical to SEQ ID NO: 181119
  misc_feature (549)..(624): n is a, c, g, or t
  misc_feature (1148)..(1161): n is a, c, g, or t

SEQ ID NO: 193905 - DNA, 548 bp, Homo Sapiens
actttgtacaaaaaagttgggatagattagcttaaaaacttcagatcatcagatcagtctcaaatgggtttcttggaattttatatttgacaatatttatactataccaaactcatttgcagttcttaggtttgttggttaaaacatttttttaaagcagtaagtttatagaaaatgttttcatttaatggaaggctggggaatgtccagcatcaacccctatggcatgcattcccagtggccttctcatctgggcctggaacctttggttcagggcttaggggagaacaggccacatggcaacagccacacagtcattgccttcaacacagagccacgtgtccccaaacagcaatagtcatgcccttgtccaggctgggatctaattgatacaataggtcgttgactccctcctagtagagctatctaggtttgtctggaaagtttccgaccctggcttataggcaccacacctcatgtactcctcatggcttggatctctgtattcagcctttgttcagtccaataaactttgagtagatgatctc

SEQ ID NO: 193906 - DNA, 1688 bp, Homo Sapiens; identical to SEQ ID NO: 181121

SEQ ID NO: 193907 - DNA, 833 bp, Homo Sapiens; identical to SEQ ID NO: 181122

SEQ ID NO: 193908 - DNA, 1290 bp, Homo Sapiens; identical to SEQ ID NO: 186764
  misc_feature (487)..(504): n is a, c, g, or t
  misc_feature (927)..(967): n is a, c, g, or t

SEQ ID NO: 193909 - DNA, 421 bp, Homo Sapiens
ctttgtacaaaaaagttggaaagtttgctctaccaaatagtgattgtaacaaattgatctgttttggatgttgctatagtgacatgcagttatatattttgtttttaaaagggggggagcaaaagaaacaccagtgttagcttaatcttaatgtctggtgtttgtcatggtgaaattataactattacagtgttggagaacaacaaatatgttctctgaatgagcctttgtgctttttgtcatgttatgcagtgaactatttttaaggtctaatcagtgattatttttccagctccgtgtttctctaaggaattatttcacacacggaccatctttagcagtttcctcagtgatggaatatcatgaatgtgactcattatgtagctgtcgtacattgagcaaataaacttactgatctgaa

SEQ ID NO: 193910 - DNA, 2613 bp, Homo Sapiens; identical to SEQ ID NO: 186765
  misc_feature (650)..(661): n is a, c, g, or t
  misc_feature (1772)..(1791): n is a, c, g, or t
  misc_feature (2214)..(2254): n is a, c, g, or t

SEQ ID NO: 193911 - DNA, 1000 bp, Homo Sapiens; identical to SEQ ID NO: 186767
  misc_feature (41)..(50): n is a, c, g, or t
  misc_feature (290)..(298): n is a, c, g, or t

SEQ ID NO: 193912 - DNA, 1166 bp, Homo Sapiens; identical to SEQ ID NO: 186770
  misc_feature (1069)..(1085): n is a, c, g, or t

SEQ ID NO: 193913 - DNA, 1277 bp, Homo Sapiens
  misc_feature (93)..(111): n is a, c, g, or t
aattgatgagcaatgcttttctataaaagccccctttgtacaaaaaagttggcttagttcttgcaattgaggaatgcatgattgacaatatannnnnnnnnnnnnnnnnnncaagtaataccagtactgttaactatagccagaactggctaaaatttttatattttcagagttgaagttggtgaagacattcatgatttaaacaccagatcctgaaaggggttaaatctactttgaaatgaatctgcaatcagtatttcaaagcttttctggtaattttagtgatcttatttgattagactttttcagaagtactaaataaggaattttaacaggtttttattaatgcacagataaatagaagtacagtgaggtctatagccattttattaaaatagcttaaaagtttgtaaaaaaatgaatctttgtaattacttaatatgttagttaagaacccgtcaagcttatatttgctagacttacaaattattttaaatgcatttatcttttttgacactattcagtggaatgtgtaagctagctaattcttgttttctgatttaaagcacttttaaatcttatcctgccccctaaaaacaaaaggttttgatcacaaggggaaatttaagattgttaaccctgtttttcagaagggctactgttaattgcacataaacatgaaatgtgttttcccctgtgtactaacacattctaggcaaaattcaaacttatagtggtaaagaaacaggttgttcacttgctgaggtgcaaaaattcttaagacttctgtttgaaattgctcaatgactaggaaaagatgtagtagtttactaaaattgtttttctaccatatcaaattaaacaattcatgcctttatagggtcaggcctacaatgaataggtatggtggtttcacagaattttaaaatagagttaaagggaagtgatgtacatttcgggggcattagggtagggagatgaatcaaaaaatacccctagtaatgctttatattttaatactgcaaaagctttacaaatggaaaccatgcaattacctgccttagttcttttgtcataaaaacaatcacttggttggttgtattgtagctattacttatacagcaacatttcttcaattagcagtctagacattttataaacagaaatcttggaccaattgataatatttctgactgtattaatattttagtgctataaatactatgtgaatctcttaaaatctgacattttacagtctgtattaaacatactgtttt

SEQ ID NO: 193914 - DNA, 945 bp, Homo Sapiens; identical to SEQ ID NO: 186780

SEQ ID NO: 193915 - DNA, 1978 bp, Homo Sapiens; identical to SEQ ID NO: 186781
  misc_feature (246)..(256): n is a, c, g, or t

SEQ ID NO: 193916 - DNA, 2207 bp, Homo Sapiens; identical to SEQ ID NO: 186782
  misc_feature (1242)..(1250): n is a, c, g, or t
  misc_feature (1290)..(1304): n is a, c, g, or t
  misc_feature (1565)..(1573): n is a, c, g, or t
  misc_feature (1731)..(1752): n is a, c, g, or t
  misc_feature (1833)..(1841): n is a, c, g, or t
  misc_feature (2123)..(2133): n is a, c, g, or t

SEQ ID NO: 193917 - DNA, 1283 bp, Homo Sapiens
ttcaaacttgagccacatgatgatcaggtttttctggatggaaatgaggtgtatgtatggatctatgacccagttcactttaaaacatttgtcatgggattaattcttgtgattgcagtaatagcggccaccctcttccccctttggccagcagaaatgagagtaggtgtttattacctcagtgtgggtgcaggctgttttgtagccagtattcttctccttgctgttgctcgatgcattctatttctcatcatttggctcataactggaggaaggcaccacttttggttcttgccaaatctgactgctgatgtgggcttcattgactccttcaggcctctgtacacacatgaatacaaaggaccaaaagcagacttaaagaaagatgagaagtctgaaaccaaaaagcaacagaagtccgacagtgaggaaaagtcagacagtgagaaaaaggaagatgaggaggggaaagtaggaccaggaaatcatggaacagaaggctcggggggagaacggcattcagacacggacagtgacaggagggaagatgatcgatcccagcacagtagtggaaatggaaatgattttgaaatgataacaaaagaggaactggaacagcaaacagatggggattgtgaagaggatgaggaagaggaaaatgatggagaaacacctaaatcttcacatgaaaaatcataatctgactaattttgggactgaatgaataagtacaagaggttggattttctatgttggctgattaccatattgaacacatggcatttgtagcattctttaaatctatctactgaaatgtatttgacattcaagcagttatattcggtccttcattttatagaatattggcactattattggtacagtttaaagccattaatatgttttatccatttgataattttacagtaagtaggtctcattcattttgacagttatcaaagatgtactttccacagttaaatttacattaatggcaatttttgatagttttatggctttttactgttagactaatcaaaaataactttaaaaggaacaaagaaactccaacatttcacattatgcatagttatgtagccatttcacagtttctttaagatgtgtaaactcattgtccttgatagtttttatttttcattataaaattataccaggagatttcttttaagattctgagttagcagagttcaaaactattttgtggaaacaagccaactagtaacaatgcagcaacacttctggtttagctaaattatttttcc

SEQ ID NO: 193918 - DNA, 2692 bp, Homo Sapiens; identical to SEQ ID NO: 186785
  misc_feature (2469)..(2478): n is a, c, g, or t

SEQ ID NO: 193919 - DNA, 1406 bp, Homo Sapiens
aaaaaagttggcgacatcatgctccgaaatcctccggccgctgctgctactgctgctgctgcctcccccggggtcccctgagccccccggcctgacccagctgtccccgggggcgcccccgcaggcccccgacttgatctacgctgacgggctgcgcgcctacgcggccggggcttgggcgccggccgtggcgctgctgcgggaggcgctgcggagccagacggcgctgggccgggtgcggctggattgaggggcgagctgcgcggccgatccgggcgccgcgctccccgccgtgcttctcggggccccggagcccgactccgggccgggacccacacaggggtcctgggagcgacagcttctccgtgcagcgctccaccgcgcagactgcctgacccagtgcgcagcacggaagctgggccccgggggagcgacgcggcttcgcgtggggagcgcgctccaggacgccttccgccgtcgggagccctacaactacctgcagagggcctattaccaattgaagaagctggatctggcagctgcggcagcacacaccttctttgtagcaaaccccatgcacctgcagatgcgggaggacatggctaagtacagacgaatgtcgggagttcggccccagagcttccgggacctggagacgcccccacactgggcagcctatgacactggcctggagctactggggcgccaggaggcaggactggcactgcccaggctagaggaggctcttcaggggagcctggcccagatggagagctgccgtgctgactgtgaggggcctgaggagcagcagggggctgaagaagaggaggatggggctgcgagccaggggggcctctatgaggccattgcaggacactggattcaggtcctgcagtgccggcaacgctgtgtgggggaaacagccacacgccctggtcgcagcttccctgtcccagacttccttcccaaccagctgaggcggctacatgaggcccatgctcaggtgggcaatctgtcccaggctatagaaaatgtcctgagtgtcctgctcttctacccggaggatgaggctgccaagagggctctgaaccagtaccaggcccagctgggagagccgagacctggcctcggacccagagaggacatccagcgcttcatcctccgatctctgggggagaagaggcagctctactatgccatggagcacctggggaccagcttcaaggatcctgacccctggacccctgcagctctcatccctgaggcacttagagaaaagctcagagaggatcaagagaagaggccttgggaccatgagcccgtgaagccaaagcccttgacctactggaaggatgtccttctcctggagggtgtgaccttgacccaggattcaggcagctgaatgg

SEQ ID NO: 193920 - DNA, 975 bp, Homo Sapiens
  misc_feature (139)..(160): n is a, c, g, or t
  misc_feature (179)..(223): n is a, c, g, or t
agttttaaaatagcaccacttgaggaaggggatatatttaagttcaaagtccctaagcaggtggtttactaaagttcaagcaaactaaagggtgacggtttgatttttataactttcctgtgatctgggatagaatacnnnnnnnnnnnnnnnnnnnnnngcaaataattgaaagacannnnnnnnnnnnnnnnnnnnnnnnnnnnnnnnnnnnnnnnnnnnnccctgccaaagcatatccttgttttctgccagttgtgtcaccaatcagcgatctcaaccacaaaaggcgttttcacgtctatcttgccactgttgatgatcgagcagctggtgagtggacggtcatgcccatcagttgcttggagctctatggagtgcaccactgtcatcccatcaatgacttttccaaacaccacatgtttgccgtccaaccaggtgggcttggtcaaggtgataaagaactgagagccattggtgtcaggcccagcgttggccatgctgacccacccaatgccatagtgcttcagcttgaagttctcatctggaaatgtctcaccatagatgctcacacccccagtgccatctccagtggtgatgtcacctccttgaatcatgaaatccttgatgacacgatgaaacttgcttcctttatatccatatcctttctctcctgttgctagagcaacaaaattttccactgtcttgggcacaacttttccaaagaggccaatcacaattctgccaacatctttgtctccaatcctcacatcaaagaagacttgggcagtctctttcctggagaacgggcccgccggttccggaagcctctcctacccccaggctggtcacctcggactaccgacccgggacaagaagtccaagcagactgcggcggaggtaggctggcctcagcccagctcccccagggtctcccccggagcgccggcctcccagcacgggagcagcccccaa

SEQ ID NO: 193921 - DNA, 550 bp, Homo Sapiens
  misc_feature (472)..(489): n is a, c, g, or t
tgtgagccactgtgcctggcccagattatttttttaattgaattgaattgtcttccatagggactgctgagatgtcctctattcttgaagagcgtattcttggagctgatacctctgttgatcttgaagaaactgggcgtgtcttaagtattggtgatggtattgcccgcgtacatgggctgaggaatgttcaagcagaagaaatggtagagttttcttcaggcttaaagggtatgtccttgaacttggaacctgacaatgttggtgttgtcgtgtttggaaatgataaactaattaaggaaggagatatagtgaagaggacaggagccattgtggacgttccagttggtgaggagctgttgggtcgtgtacttgatgcccttggtaatgctattgatggaaaggtaggtttaatgttcgttacatatagttgcagcttctaacaaacatcaaaactgattatgcttagggnnnnnnnnnnnnnnnnnnaacagggtccaattggttccagacgcgtagcgagttggtctgaaagcccccggtatcattc

SEQ ID NO: 193922 - DNA, 830 bp, Homo Sapiens
caaattgatgagcaatgcttacattaaaaatgccaactttgtacaaaaaagttggcagaagtacctgcggcgtaactgcaaagatgctgtccgtgcgcgttgctgcggccgtggtccgcgcccttcctcggcgggccggactggtctccagaaatgctttgggttcatctttcattgctgcaaggaacttccatgcctctaacactcatcttcaaaagactgggactgctgagatgtcctctattcttgaagagcgtattcttggagctgatacctctgttgatcttgaagaaactgggcgtgtcttaagtattggtgatggtattgcccgcgtacatgggctgaggaatgttcaagcagaagaaatggtagagttttcttcaggcttaaagggtatgtccttgaacttggaacctgacaatgttggtgttgtcgtgtttggaaatgataaactaattaaggaaggagatatagtgaagaggacaggagccattgtggacgttccagttggtgaggagctgttgggtcgtgtagttgatgcccttggtaatgctattgatggaaagggtccaattggttccaagacgcgtaggcgagttggtctgaaagcccccggtatcattcctcgaatttcagtgcgggaaccaatgcagactggcattaaggctgtggatagcttgtgccaattggtcgtggtcaccgtgaactgattattggtgaccgacatactggggaaaacctcaattgctattgacacaatcattaaccagaaacgtttcaatgatggatctgatgaaaagaaaaagctgtactgtatttatgttgctatt

SEQ ID NO: 193923 - DNA, 856 bp, Homo Sapiens
  misc_feature (365)..(378): n is a, c, g, or t
gaaggagggatgaaaagacaagaccagggctggagctggggtggaagaggggagggggacactggctgcattcccccgcccccaggaagcacctctaggccctggacccctcgctcaccctggcccgtaagactccatctcttctctgcctctggccctcctggctcttcctcctgttccccttgactttttcccctgacagattctcaagtaggacgatgttcagggcctgaccccaaccccccataccaccttatgaaggtacaacctttgccggccctgcttttgcccctcctcaaacctcaccgctttccctctttgggacagctttgatccccctccttcctctcctccctccccctggnnnnnnnnnnnnnnggaaaagaaagcaccaactccccggggaggggctgcagacagcagggggagaggactggaaggagagaagaggaccgtcgagggaagaggctcacaagtccctgggaagacagggcatgggcttacagagaggagagggggtacgggcagtggctgctcgtgtcctctgccacccctgcccactgtccaggggacttcaacacaaccgaggggacaggtttgtgtggggtcaggtctgatagaagaggagcaggagaaacaaatcgttaaaacctagcgaattcccctaagaaaacatttcttcctcctttccttctggaggctccttggttggtagggaaataggagttggtgggaaaagaggggggagaggagcttgtaccaagggactctactccattctcccctctcccccgcaaccaacttggagctcaccagggttgggagggaagtggctgaccaacttttttgtacaaag

SEQ ID NO: 193924 - DNA, 769 bp, Homo Sapiens
  misc_feature (132)..(183): n is a, c, g, or t
  misc_feature (697)..(711): n is a, c, g, or t
ttgggtgccatgtcacgtgtgtggcaagatgctgagctcggcttatatttcggaccacatgaaggtgcacagccagggtcctcaccatgtctgtgagctctgcaacaaaggtactggtgaggtttgtccaannnnnnnnnnnnnnnnnnnnnnnnnnnnnnnnnnnnnnnnnnnnnnnnnnnnccctcccacagctgtgggctccctctcgggggcggagggggtgcctgtgagctctcagccacttccctcccaaccctggtgagctccaagttggttgcgggggagaggggagaatggagtagagtcccttggtacaagctcctctcccccctcttttcccaccaactcctatttccctaccaaccaaggagcctccagaaggaaaggaggaagaaatgttttcttaggggaattcgctaggttttaacgatttgtttctcctgctcctcttctatcagacctgaccccacacaaacctgtcccctcggttgtgttgaagtcccctggacagtgggcaggggtggcagaggacacgagcagccactgcccgtaccccctctcctctctgtaagcccatgccctgtcttcccagggacttgtgagcctcttccctcgacggtcctcttctctccttccagtcctctccccctgctgtctgcagcccctccccggggagttggtgctttcttttccnnnnnnnnnnnnnnnccagggggagggaggagaggaaggagggggatcagagctgtcccaaagagggaaagcg

SEQ ID NO: 193925 - DNA, 767 bp, Homo Sapiens
  misc_feature (132)..(183): n is a, c, g, or t
  misc_feature (697)..(710): n is a, c, g, or t
ttgggtgccatgtcacgtgtgtggcaagatgctgagctcggcttatatttcggaccacatgaaggtgcacagccagggtcctcaccatgtctgtgagctctgcaacaaaggtactggtgaggtttgtccaannnnnnnnnnnnnnnnnnnnnnnnnnnnnnnnnnnnnnnnnnnnnnnnnnnnccctcccacagctgtgggctccctctcgggggcggagggggtgcctgtgagctctcagccacttccctcccaaccctggtgagctccaagttggttgcgggggagaggggagaatggagtagagtcccttggtacaagctcctctcccccctcttttcccaccaactcctatttccctaccaaccaaggagcctccagaaggaaaggaggaagaaatgttttcttaggggaattcgctaggttttaacgatttgtttctcctgctcctcttctatcagacctgaccccacacaaacctgtcccctcggttgtgttgaagtcccctggacagtgggcaggggtggcagaggacacgagcagccactgcccgtaccccctctcctctctgtaagcccatgccctgtcttcccagggacttgtgagcctcttccctcgacggtcctcttctctccttccagtcctctccccctgctgtctgcagcccctccccggggagttggtgctttcttttccnnnnnnnnnnnnnnccatggggaaggaggagaggaaggagggggatcccacctgtcccaaagagggaaagc

SEQ ID NO: 193926 - DNA, 1378 bp, Homo Sapiens; identical to SEQ ID NO: 181131
  misc_feature (1217)..(1225): n is a, c, g, or t

SEQ ID NO: 193927 - DNA, 1775 bp, Homo Sapiens; identical to SEQ ID NO: 186793

SEQ ID NO: 193928 - DNA, 1169 bp, Homo Sapiens
gtttatgccaaagtgcagatctcttttctcttggtggccagtagttgtgtatgttgtggggtatgtgatagttctttgatcggttttggtaagggctcaagaagaaggggcttgaatgagtgtggttttgagattgtggtgagtgaatgccttgaaggccactgatttttgtgtggcagatgttgagctcttttctgttaggtgcaggaaggtaggttagcattgaagggtgcatgaaagctctgatcagcctgtgtttggcttaaatgccagtcattggtggaggtaaaggatgaacccgtgtttcagcatctacactccaccattaattagcattgtcagttcttagaatgagtctgaatctgctagtttggtttgccttctttcagtttaggcaattgtattcctagactatgaagatttttgtttttcttacttggtccccagatgtcagtattgaatatggtggtgaggcgtgaccctggcaacactgaacctgtgaaagccaaggaagagctcatatttcactgtggattcaggcgcttccgagcctcacctttattctctcagcacactgcagcggacaaacataaattgcagagattcctgactgctgacatggccctggtggcgacagtctatgcgccaatcacttttcctcctgcatctgtgctgcttttcaagcaaaaaagcaatggaatgcacagcctcattgctacaggccatcttatgtcagtagatccagacagaatggtcatcaagagagttgttctgagtggtcatcctttcaaaatttttactaagatggcagtagtacgttacatgttcttcaacagagaggatgtgctgtggtttaaaccagtggaactgagaacgaagtggggccggagaggacatatcaaggaacctttaggtacccatggccacatgaaatgcagctttgatgggaagctaaaatctcaagacacagtactgatgaacctgtataaacgagtcttccccaaatggacttatgatccatatgtaccagaaccagtaccctggctgaaaagtgagatttcttcaacagtgcctcaagggggcatggagtaatggattcaaagagattctgtcttaccggtgccagtcagtactccagggatgggaggcacaagttgtgattgggcaaa

SEQ ID NO: 193929 - DNA, 906 bp, Homo Sapiens
ctttgtacaaaaaagttggctactccacaggtccagccggccggtgagcgcctggggaccgcagaggtgagagtcgcgcccgggagtccgccgcctgcgccaggatggagttcgtgaaatgccttggccaccccgaagagttctacaacctggtgcgcttccggatcgggggcaagcggaaggtgatgcccaagatggaccaggactcgctcagcagcagcctgaaaacttgctacaagtatctcaatcagaccagtcgcagtttcgcagctgttatccaggcgctggatggggaaatgcgcaacgcagtgtgcatattttatctggttctccgagctctggacacactggaagatgacatgaccatcagtgtggaaaagaaggtcccgctgttacacaactttcactctttcctttaccaaccagactggcggttcatggagagcaaggagaaggatcgccaggtgctggaggacttcccaacgatctcccttgagtttagaaatctggctgagaaataccaaacagtgattgccgacatttgccggagaatgggcattgggatggcagagtttttggataagcatgtgacctctgaacaggagtgggacaagtactgccactatgttgctgggctggtcggaattggcctttcccgtcttttctcagcctcagagtttgaagaccccttagttggtgaagatacagaacgtgccaactctatgggcctgtttctgcagaaaacaaacatcatccgtgactatctggaagaccagcaaggaggaagagagttctggcctcaagaggtttggagcacgtatgttaagaagttaggggattttgctaagcccggagaatattgacttggccgtgcagtgcctgaatgaacttataaccaatgcactg

SEQ ID NO: 193930 - DNA, 886 bp, Homo Sapiens
  misc_feature (714)..(722): n is a, c, g, or t
ttgggtagccgaaaccgcgcggaggcacagaggccggggagagcgttctgggtccgagggtccaggtaggggttgagccaccatctgaccgcaagctgcgtcgtgtcgccggttctgcaggcaccatgagccaggacaccgaggtggatatgaaggaggtggagctgaatgagttagagcccgagaagcagccgatgaacgcggcgtctggggcggccatgtccctggcgggagccgagaagaatggtctggtgaagatcaaggtggcggaagacgaggcggaggcggcagccgcggctaagttcacgggcctgtccaaggaggagctgctgaaggtggcaggcagccccggctgggtacgcacccgctgggcactgctgctgctcttctggctcggctggctcggcatgcttgctggtgccgtggtcataatcgtgcgagcgccgcgttgtcgcgagctaccggcgcagaagtggtggcacacgggcgccctctaccgcatcggcgaccttcaggccttccagggccacggcgcgggcaacctggcgggtctgaaggggcgtctcgattacctgagctctctgaaggtgaagggccttgtgctgggtccaattcacaagaaccagaaggatgatgtcgctcagactgacttgctgcagatcgaccccaattttggctccaaggaagattttgacagtctcttgcaatcggctnnnnnnnnngagcatccgtgtcattctggaccttactcccaactaccggggtgagaactcgtggttctccactcggttgacactgtggccaccaaggtgaaggatgctctggagttttggctgcaagctggcgtggatgggttccaggttcgggacatagagaatctgaagga

SEQ ID NO: 193931 - DNA, 2063 bp, Homo Sapiens; identical to SEQ ID NO: 186795

SEQ ID NO: 193932 - DNA, 441 bp, Homo Sapiens
tttgtacaaaaaagttggaaagaatattgttaccttaaagcactattttatttatagatatatctagtgcatctacatctctatactgtacactcacccataattcaaacaattacaccatggtataaagtgggcatttaatatgtaaagattcaaagtttgtctttattactatatgtaaattagacattaatccactaaactggtcttcttcaagagagctaagtatacactatctggtgaaacttggattctttcctataaaagtgggaccaagcaatgatgatcttctgtggtgcttaaggaaacttactagagctccactaacagtctcataaggaggcagccatcataaccattgaatagcatgcaagggtaagaatgagtttttaactgctttgtaagaaaatggaaaaggtcaataaagatatatttctttac

SEQ ID NO: 193933 - DNA, 621 bp, Homo Sapiens
ttagaactttccccgtactcttgctagggcttttcatggagatgtagaaatggtagtaagtgccaaggccccagaaccctcatgtttgggtccgactcccacattgccagagactaggcagctcacacaggtgtcccaagctgtctttctcacaggccgcattgaaggcatttatgaaatgagaccccctcttcctcatccgtagtgacagggctggcctgaccgtggagaaatcagatttgatcatgatagcttccactccgtgactggtcacgatctgccaggcgctgtgctaaacactttcataggccttgtccccctccatcctgataacaccccagtgaagcaggccctgctctcactccactccacaaagccaaggctgaaagaggttaacagacttacctaaggtcacacagctaaaagtcgtgaagctgggatcgaatcaagtctgtgtttatgggtttaactatcatgttgtggccccaaccccatttgacctagcctggctggtgggccttcttgcagtagcttcccctggagaagaggaaaagcaaaccttcattgagacccaagcggtctctcctgtgctctgtgacaataataaagttccagcccttg

SEQ ID NO: 193934 - DNA, 474 bp, Homo Sapiens
ttggcgttgttatggagggccacatctgccagagcctggagtctgcgaaggccgggacccggttccccggcccacagtgggggtgtgcaaacccgagagaactggattgcgtacccactgcagagtgctgaagacggggtagccacgaggttgcaaattcgtgaagaatcagcatcatgtttggcagctgagtattggagccaggagcctgccatgaggttttgagaacagagtgctgttttagagctggcagcagcatctcagcccaagagaaggttatattcccagaggatgtcagtcccaaggaccagtagctgccatcagtttggattctgaaaactaactggcatcaacactgggtgtagaaacatgcttgccttatgtatcagaggacatgctcagcagatccaagagatatatttggcaactttttctagaaaaggcacattgggtatcattcattacattcttgag

SEQ ID NO: 193935 - DNA, 421 bp, Homo Sapiens
ttggggagggccacatctgccagagcctggagtctgcgaaggccgggacccggttccccggcccacagtgggggtgtgcaaacccgagagaactgggttgcaaattcgtgaagaatcagcatcatgtttggcagctgagtattggagccaggagcctgccatgaggttttgagaacagagtgctgttttagagctggcagcagcatctcagcccaagagaaggttatattcccagaggatgtcagtcccaaggaccagtagctgccatcagtttggattctgaaaactaactggcatcaacactgggtgtagaaacatgcttgccttatgtatcagaggacatgctcagcagatccaagagatatatttggcaactttttctagaaaaggcacattgggtatcattcattacattcttgag

SEQ ID NO: 193936 - DNA, 1944 bp, Homo Sapiens; identical to SEQ ID NO: 181133
  misc_feature (208)..(225): n is a, c, g, or t

SEQ ID NO: 193937 - DNA, 720 bp, Homo Sapiens
  misc_feature (643)..(654): n is a, c, g, or t
ttggggataggagaacagcaaggtgggcatttcccggaattgtgtgcagatgcatccagtcgtggcattgcaagaagtctgtctgatgaagctcgggaagcattttgcaatattccctttggctgtgttcctgtgttccctgctcccacttttcttcccctggtttgtgattattaggagagaggttttgcaaagactcgttgctgtgaaagaatctttttttaatttttatcctagagtcagtcacttttattccaggtagtcatgctgatctacttatccaaagccagctaaccaggttcatcctaccatcctcatggaagactgtgtgtatgaattggagtaacagaactgaaatacacttaaacagtgacagcagtacttcccagggtgggggccatatttctctgtgtcctactctgagcaacttctcagagatacgagggggctagggttttcccatctgggaaatggggtgaaagtctgcagattgttaaatgaaatatagaatcagagaaaaagaaaagtcagtgatataaatagatcatttcatagaaattagggtagatttttatttcaactactactggagaatttaataaaaggcattatttgaaaagtttttctaacatagatttagggnnnnnnnnnnnnagagtggacacactacatttaaaaagcaatttattttgctattcagattttttattatctgaaaat

SEQ ID NO: 193938 - DNA, 1277 bp, Homo Sapiens; identical to SEQ ID NO: 186811
  misc_feature (726)..(783): n is a, c, g, or t
  misc_feature (974)..(982): n is a, c, g, or t

SEQ ID NO: 193939 - DNA, 847 bp, Homo Sapiens
actttgtacaaaaaagttggtgagctttatacccgcccgggaggaacaatgagcttggtggacacatttcattgcagtgttgctccattcctagcttgggaagcttccgcttagaggtcctggcgcctcggcacagctgccacgggctctcctgggcttatggccggtcacagcctcagtgtgactccacagtggcccctgtagccgggcaagcaggagcaggtctctctgcatctgttctctgaggaactcaagtttggttgccagaaaaatgtgcttcattcccccctggttaatttttacacaccctaggaaacatttccaagatcctgtgatggcgagacaaatgatccttaaagaaggtgtggggtctttcccaacctgaggatttctgaaaggttcacaggttcaatatttaatgcttcagaagcatgtgaggttcccaacactgtcagcaaaaaccttaggagaaaacttaaaaatatatgaatacatgcgcaatacacagctacagacacacattctgttgacaagggaaaaccttcaaagcatgtttctttccctcaccacaacagaacatgcagtactaaagcaatatatttgtgattccccatgtaattcttcaatgttaaacagtgcagtcctctttcgaaagctaagatgaccatgcgccctttcctctgtacatatacccttaagaacgccccctccacacactgccccccagtatatgccgcattgtactgctgtgttatatgctatgtacatgtcagaaaccattagcattgcatgcaggtttcatattctttctaagatggaaagtaataaaatatatttgaaatgtacc

SEQ ID NO: 193940 - DNA, 937 bp, Homo Sapiens
ctttgtacaaaaaagttggcttttgaatggaatcgggctgattcatcgccggtttgcagactgagccgcgtcgggtgtgcgccgctgctgctgttgcctctgtcttcgcgtcaccacagaggcaagacaagggtccatatcgcggcatccggctcccgcccgtcttcaggagagaaagaaaaaataaaatatacttggggaagttgtacctgccagaattagcaagagctttctttaagaagacatttgtcaaactcaacaaattgaaggttaacaccttaagagttgtagttactgaccagaaatatggacagacttcttagacttggaggaggtatgcctggactgggccaggggccacctacagatgctcctgcagtggacacagcagaacaagtctatatctcttccctggcactgttaaaaatgttaaaacatggccgtgctggagttccaatggaagttatgggtttgatgcttggagaatttgttgatgattataccgtcagagtgattgatgtgtttgctatgccacagtcaggaacaggtgtcagtgtggaggcagttgatccagtgttccaagctaaaatgttggatatgttgaagcagacaggaaggccggagatggttgttggttggtatcacagtcaccctggctttggttgttggctttctggtgtggatatcaacactcagcagagctttgaagccttgtcggagagagctgtggcagtggttgtggatcccattcagagtgtaaaaggaaaggttgttattgatgccttcagattgatcaatgctaatatgatggtcttaggacatgaaccaagacaaacaacttcgaatctgggtcacttaaacaagccatctatccaggcattaattcatggactaaacagacattattactccattactattaactatcggaaaaatg

SEQ ID NO: 193941 - DNA, 979 bp, Homo Sapiens
gagcaatgcttttccctataatggccaactttgtacaaaaaagttggggctgattcatcgccggtttgcagacagagccgcgtcgggtgtgcgccgctgctgctgttgcctctgtcttcgcgtcaccacagaggcaagacaagggtccatatcgcggcatccggctcccgcccgtcttcaggagagaaagaaaaaataaaatatacttggggaagttgtacctgccagaattagcaagagctttctttaagaagacatttgtcaaactcaacaaattgaaggttaacaccttaagagttgtagttactgaccagaaatatggacagacttcttagacttggaggaggtatgcctggactgggccaggggccacctacagatgctcctgcagtggacacagcagaacaagtctatatctcttccctggcactgttaaaaatgttaaaacatggccgtgctggagttccaatggaagttatgggtttgatgcttggagaatttgttgatgattataccgtcagagtgattgatgtgtttgctatgccacagtcaggaacaggtgtcagtgtggaggcagttgatccagtgttccaagctaaaatgttggatatgttgaagcagacaggaaggccggagatggttgttggttggtatcacagtcaccctggctttggttgttggctttctggtgtggatatcaacactcagcagagctttgaagccttgtcggagagagctgtggcagtggttgtggatcccattcagagtgtaaaaggaaaggttgttattgatgccttcagattgatcaatgctaatatgatggtcttaggacatgaaccaagacaaacaacttcgaatctgggtcacttaaacaagccatctatccaggcattaattcatggactaaacagacattattactccattactattaactatcggaaaaatgaactggaacagaagatgttgctaaatttgc

SEQ ID NO: 193942 - DNA, 925 bp, Homo Sapiens
ccaactttgtacaaaaaagttggctcagtgtaccttctagtcccgccatggccgctctcacccgggacccccagttccagaagctgcagcaatggtaccgcgagcaccgctccgagctgaacctgcgccgcctcttcgatgccaacaaggaccgcttcaaccacttcagcttgaccctcaacaccaaccatgggcatatcctggtggattactccaagaacctggtgacggaggacgtgatgcggatgctggtggacttggccaagtccaggggcgtggaggccgcccgggagcggatgttcaatggtgagaagatcaactacaccgagggtcgagccgtgctgcacgtggctctgcggaaccggtcaaacacacccatcctggtagacggcaaggatgtgatgccagaggtcaacaaggttctggacaagatgaagtctttctgccagcgtgtccggagcggtgactggaaggggtacacaggcaagaccatcacggacgtcatcaacattggcattggcggctccgacctgggacccctcatggtgactgaagcccttaagccatactcttcaggaggtccccgcgtctggtatgtctccaacattgatggaactcacattgccaaaaccctggcccagctgaaccccgagtcctccctgttcatcattgcctccaagacctttactacccaggagaccatcacgaatgcagagacggcgaaggagtggtttctccaggcggccaaggatccttctgcagtggcgaaacactttgttgccctgtctactaacacaaccaaagtgaaagagtttggaattgaccctcaaaacatgttcgagttctgggattgggtgggaggacgctactcgctgtggtcggccatcggactctccattgccctgcacgtgggttttgacaactt

SEQ ID NO: 193943 - DNA, 1675 bp, Homo Sapiens; identical to SEQ ID NO: 186814

SEQ ID NO: 193944 - DNA, 659 bp, Homo Sapiens
  misc_feature (431)..(443): n is a, c, g, or t
ctttgtacaaaaaagttggcaagctggaaacgcaaacagccttccagtggcttctcccaacactcttggggaccaaatatacttaatggttaagggacttgtcccaagtctgacagccagagcgttagaggggccagcggccctcccaggcgatcttgtgtctactctaggactgggcccgagggtggtttacctgcaccgttgactcagtatagtttaaaaatctgccacctgcacaggtatttttgaaagcaaaataaggttttcttttttcccctttcttgtaataaatgataaaattccgagtctttctcactgcctttgtttagaagagagtagctcgtcctcactggtctacactggttgccgaatttacttgtattcctaactgttttgtatatgctgcattgagacttacggcaagaaggcannnnnnnnnnnnnaaaggaaacaaactctcaaatcatgaagtgatataaaagctgcatatgcctacaaagctctgaattcaggtcccagttgctgtcacaaaggagtgagtgaaactcccaccctacccccttttttatataataaaagtgccttagcatgtgttgcagctgtcaccactacagtaagctggtttacagatgttttccactgagcatcacaataaagag

SEQ ID NO: 193945 - DNA, 528 bp, Homo Sapiens
ttggccttcctgcggtgcttctctctttcgctcaggcccgtggcgccgacaggatgggcaagtgtcgtggacttcgtactgctaggaagctccgtagtcaccgacgagaccagaagtggcatgataaacagtataagaaagctcatttgggcacagccctaaaggccaacccttttggaggtgcttctcatgcaaaaggaatcgtgctggaaaaagtaggagttgaagccaaacagccaaattctgccattaggaagtgtgtaagggtccagctgatcaagaatggcaagaaaatcacagcctttgtacccaatgacggttgcttgaactttattgaggaaaatgatgaagttctggttgctggatttggtcgcaaaggtcatgctgttggtgatattcctggagtccgctttaaggttgtcaaagtagccaatgtttctcttttggccctatacaaaggcaagaaggaaagaccaagatcataaatattaatggtgaaaacactgtagtaataaattttcatatgcc

SEQ ID NO: 193946 - DNA, 602 bp, Homo Sapiens
ttggagcttgcgcatcatctgcggccggggcccgatgagcctcctgttgcctccgctggcgctgctgctgcttctcgcggcgcttgtggccccagccacagccgccactgcctaccggccggactggaaccgtctgagcggcctaacccgcgcccgggtagagacctgcgggggatgacagctgaaccgcctaaaggaggtgaaggctttcgtcacgcaggacattccattctatcacaacctggtgatgaaacacctccctggggccgaccctgagctcgtgctgctgggccgccgctacgaggaactagagcgcatcccactcagtgaaatgacccgcgaagagatcaatgcgctagtgcaggagctcggcttctaccgcaaggcggcgcccgacgcgcaggtgccccccgagtacgtgtgggcgcccgcgaagcccccagaggaaacttcggaccacgctgacctgtaggtccgggggcgcggcggagctgggacctacctgcctgagtcctggagacagaatgaagcgctcagcatcccgggaatacttctcttgctgagagccgatgcccgtccccgggccagcagggatggggttg

SEQ ID NO: 193947 - DNA, 990 bp, Homo Sapiens
cttttttataatggccaactttgtacaaaaaagttggactgactctctgaggctcattttgcagttgttgaaattgtccccgcagttttcaatcatgtctgaaccaatcagagtccttgtgactggagcagctggtcaaattgcatattcactgctgtacagtattggaaatggatctgtctttggtaaagatcagcctataattcttgtgctgttggatatcacccccatgatgggtgtcctggacggtgtcctaatggaactgcaagactgtgcccttcccctcctgaaagatgtcatcgcaacagataaagaagacgttgccttcaaagacctggatgtggccattcttgtgggctccatgccaagaagggaaggcatggagagaaaagatttactgaaagcaaatgtgaaaatcttcaaatcccagggtgcagccttagataaatacgccaagaagtcagttaaggttattgttgtgggtaatccagccaataccaactgcctgactgcttccaagtcagctccatccatccccaaggagaacttcagttgcttgactcgtttggatcacaaccgagctaaagctcaaattgctcttaaacttggtgtgactgctaatgatgtaaagaatgtcattatctggggaaaccattcctcgactcagtatccagatgtcaaccatgccaaggtgaaattgcaaggaaaggaagttggtgtttatgaagctctgaaagatgacagctggctcaagggagaatttgtcacgactgtgcagcagcgtggcgctgctgtcatcaaggctcgaaaactatccagtgccatgtctgctgcaaaagccatctgtgaccacgtcagggacatctggtttggaaccccagagggagagtttgtgtccatgggtgttatctctgatggcaactcctatggtgttcctgatgatctgctctactcattccctgttgtaatcaaaataagacctggaagttt

SEQ ID NO: 193948 - DNA, 1323 bp, Homo Sapiens; identical to SEQ ID NO: 186820

SEQ ID NO: 193949 - DNA, 1563 bp, Homo Sapiens; identical to SEQ ID NO: 181140
  misc_feature (824)..(1126): n is a, c, g, or t

SEQ ID NO: 193950 - DNA, 1336 bp, Homo Sapiens; identical to SEQ ID NO: 186824

SEQ ID NO: 193951 - DNA, 1334 bp, Homo Sapiens; identical to SEQ ID NO: 186825

SEQ ID NO: 193952 - DNA, 723 bp, Homo Sapiens
  misc_feature (471)..(511): n is a, c, g, or t
ctttgtacaaaaaagttgggccaacatggtgttcaggcgcttcgtggaggttggccgggtggcctatgtctcctttggacctcatgccggaaaattggtcgcgattgtagatgttattgatcagaacagggctttggtcgatggaccttgcactcaagtgaggagacaggccatgcctttcaagtgcatgcagctcactgatttcatcctcaagtttccgcacagtgcccaccagaagtatgtccgacaagcctggcagaaggcagacatcaatacaaaatgggcagccacacgatgggccaagaagattgaagccagagaaaggaaagccaagatgacagattttgatcgttttaaagttatgaaggcaaagaaaatgaggaacagaataatcaagaatgaagttaagaagcttcaaaaggcagctctcctgaaagcttctcccaaaaaagcacctggtactaagggtannnnnnnnnnnnnnnnnnnnnnnnnnnnnnnnnnnnnnnnnaaagttccagcaaaaaagatcaccgccgcgagtaaaaaggctccagcccagaaggttcctgcccagaaagccacaggccagaaagcagcgcctgctccaaaagctcagaagggtcaaaaagctccagcccagaaagcacctgctccaaaggcatctggcaagaaagcataagtggcaatcataaaaagtaataaaggttctttttgacctgt

SEQ ID NO: 193953 - DNA, 739 bp, Homo Sapiens
  misc_feature (454)..(485): n is a, c, g, or t
ctttgtacaaaaaagttggcttcgtggatcattggaaccgggtggcctatgtctcctttggacctcatgccggaaaattggtcgcgattgtagatgttattgatcagaacagggctttggtcgatggaccttgcactcaagtgaggagacaggccatgcctttcaagtgcatgcagctcactgatttcatcctcaagtttccgcacagtgcccaccagaagtatgtccgacaagcctggcagaaggcagacatcaatacaaaatgggcagccacacgatgggccaagaagattgaagccagagaaaggaaagccaagatgacagattttgatcgttttaaagttatgaaggcaaagaaaatgaggaacagaataatcaagaatgaagttaagaagcttcaaaaggcagctctcctgaaagcttctcccaaaaaagcacctggtactaagggtannnnnnnnnnnnnnnnnnnnnnnnnnnnnnnnaaagttccagcaaaaaagatcaccgccgcgagtaaaaaggctccagcccagaaggttcctgcccagaaagccacaggccagaaagcagcgcctgctccaaaagctcagaagggtcaaaaagctccagcccagaaagcacctgctccaaaggcatctggcaagaaagcataagtggcaatcataaaaaagtaataaaggttctttttgacctgttgacaaatgtatttaagccctttggatttaaagcctgttga

SEQ ID NO: 193954 - DNA, 687 bp, Homo Sapiens
  misc_feature (472)..(518): n is a, c, g, or t
agccaactttgtacaaaaaagttggcatggtgttcacgcacttcgtggaggttggccgggtggcctatgtctcctttggacctcatgccggaaaattggtcgcgattgtagatgttattgatcagaacagggctttggtcgatggaccttgcactcaagtgaggagacaggccatgcctttcaagtgcatgcagctcactgatttcatcctcaagtttccgcacagtgcccaccagaagtatgtccgacaagcctggcagaaggcagacatcaatacaaaatgggcagccacacgatgggccaagaagattgaagccagagaaaggaaagccaagatgacagattttgatcgttttaaagttatgaaggcaaacaaaatgaggaacagaataatcaagaatgaagttaagaagcttcaaaaggcagctctcctgaaagcttctcccaaaaaagcacctggtactaagggtannnnnnnnnnnnnnnnnnnnnnnnnnnnnnnnnnnnnnnnnnnnnnnaaagttccagcaaaaaagatcaccgccgcgagtaaaaaggctccagcccataaggttcctgcccagaaagccacaggccagaaagcatcgcctgctccaaaaagctcagaatggtccaaaaagctccagcccagaaaagcacctgctcaaaaggcatctggcaagaaaa

SEQ ID NO: 193955 - DNA, 776 bp, Homo Sapiens
ctttgtacaaaaaagttggctgttgccaacgaaggctttttctgattttttgacaaatgaatttttgcacactttcattggtgtctttcggcaacttacacacattgaaaatgagctattgtacatatttttatattctctttataaatgcatgtctgattgtacttgtaacaatattgtaatgaacggctgtgcagtaggcccagcgctgctgtgtctcgtcagaggaatagcttaccacgaacccctcagcatactgggaatctcttcctgaacaacgaatgtaaatttggtcaagtctactcttccgttcattcaattattttaagcatttgaattatttattgtatatcctaaatatatttctcctttggcagtgactagatttccactaatgtgtcttaatctatccctccagctggcagttactgtttttttaatcccctgaagttgtcctgtaggagacagaaattctttgctgtctgtatcccttggagtaagaaggtagtggcatgggtggagtgtgtgttctttctccaaatctattatgatgtttattaaacacttctgtagcaaagatggtggtagttcttttgttactgaagttgcccttcaccatggctatttgaaaaggagatgtacttggacgtttctgtaaatcttgagataaactgtttggagatttaaccacctctctgatgggggaccaactctatggaaattgtaaatacgttttatttataaacctggcactgtattcaataaacatttctgca

SEQ ID NO: 193956 - DNA, 629 bp, Homo Sapiens
  misc_feature (450)..(473): n is a, c, g, or t
tttgtacaaaaaagttgggtgttcactctcctctacctttatggtattttggtgttcacttacgaagcatacaactagaaccatatccaagcagactctgggttgctgttaacccagggcctagacttctagtgcctctgaggcagaaccaaaggagcctgcactgggggaaatcccttttcctgcctgcctgtctgcctgtgacctgtgtacgtattacaggctttaggaccagctgattgttatgcttgcaggatggttttgaaacagaaacaatacttgtttactgtaggaatcctatttatattatttttcagtcctgtgaatgctgtgaaaagatttattcctttgaggccaggaagctcccaggcatatatgcttctaggttaggattgtcctgactcactaaagatgccaggatattggggctgaggggagtttgaggtgttnnnnnnnnnnnnnnnnnnnnnnnngcatttttctctcaaactgatggccaaaaaatggctaggacaattttggtgctttacctatctctgcaaagactggagaatttggcataccattaattacaaccaccaatcatatccaacaaaagtaccctaaaagaaggaccagtggccactctc

SEQ ID NO: 193957 - DNA, 706 bp, Homo Sapiens
actttgtacaaaaaagttggatcagatttttatgtttaaaaaaatctcattatggattgagtccagcccagctctaagagaaaaagaaggcccatatgggagacttcagtctcattattattgcctttatccagcagtgcttatgaagccccctaccctgtcccattccagaaaccataagactcaggcagttcttgattctggaggcctgcctggtaagataagatagtataatttggaactgagaacataccagaaacagcagaacgagggccagagcagaaaaatgaaaataagtggagacacttatggatacattggtgcaaaaaaagccacggagcccatactgggcttgatatgactttgaggggacagcagattaatacttaatgagggttaaacctgaccagtctttctacagtgacaggccacactgcatgaatggggagaaccaatgaatccattgtcctctgcctattttcctgtgcacagtcacattccctccttaggaatcttccccttccaccctttacattaaacaagggaacactgaatctttcaagggaattacacgtttgggttaatgtttcagtatatcattttcatactgtaaattattttgtaagagagatttactgctatcccaggatgttcggacttggtgcccctgtgcatttggaaatcaataaactattactggaaatgc

SEQ ID NO: 193958 - DNA, 532 bp, Homo Sapiens
ttggcatcctttacccgcaggcgtccgcgtcgctagctagtcgttctgaagcggcggccagagaagagtcaagggcacgagcatcgggtagccatgcctttcttggacatccagaaaaggttcggccttaacatagatcgatggttgacaatccagagtggtgaacagccctacaagatggctggtcgatgccatgcttttgaaaaagaatggatagaatgtgcacatggaatcggttatactcgggcagagaaagagtgcaagatagaatatgatgatttcgtagagtgtttgcttcggcagaaaacgatgagacgtgcaggtaccatcaggaagcagcgggataagctgataaaggaaggaaagtacacccctccacctcaccacattggcaagggggagcctcggccctgaacagagcagctgctgatgtctggaggctgattttcctgttctctgttctccactggaaaggttgtttacgacaaacctccttgtcaaagtgtgtaaaaataaaggattgctccatcct

SEQ ID NO: 193959 - DNA, 1108 bp, Homo Sapiens
ctttgtacaaaaaagttggctcaaaaggctcgttttgagatggtgctggatcttatgcagcagctacaagatttaggccatcctccaaaagagctggctggagagatgcctcctggcctcaactttgacctggatgccctcaatctttcgggcccaccaggtgccagtggtgaacagtgtctgatcatgtgaaacacaacacgttttcctctctgagtcccagctatggggaacatctggagtcagcagaaccattgggacctgaggcaggagtgtcacctgcgggagaagtctgcccgctgccctctgtcatcccattcaagattgtgccataccagctgaggtttttcctctgtctctctaggaatagggtctgtttcacaggccatttctgtgaaccctactccattgtggtttctgccactatcaaagttccagctacctgcaaggtgaaggaaggcatcccttttggggcatgcactttctttcctttctcaaaataatgttatatgtggccacactgatgttcacctttacgtccagggtctttgtgccttgtctctactccctctcttggatctggggaggaggggcagagacctgggactctgtatttctatagttctcctggcagagcctttgagaatggggagaaacagcctgggctggggctacaggtctgtcactatgctctcttgccttcagacagaccattctgaattctctaaagggaaagggcttttgcatctaatcacaatagagttgaaagagaggccttaggattctcctctctctaggtgctgagccctcacctccctgttccaggctgagaactcaaatggttaccctgcttcttcctacaatgctgtgtgatatgggtgaacccagcccctgaccttcctctatcccctgcccatcctcccttttacctcctctctttttaaacacctgtttatcccaacctttttgagctcaagctgtgataaagaagggcccatcctatttcccctcatctagtccatttacgattctcactgactccccgtcttcctggcagacacaaataaacccagtgtcaggtctaggaaattaatggctattcttcccc

SEQ ID NO: 193960 - DNA, 937 bp, Homo Sapiens
ttgggcaagatggccgccgctgaggaaggctgtagtgtcggggccgaagcggacagggaattggaggagcttctggaaagtgctcttgatgatttcgataaagccaaaccctccccagcacccccttctaccaccacggcccctgatgcttcggggccccagaagagatcgccaggagacactgccaaagatgccctcttcgcttcccaagagaagtttttccaggaactattcgacagtgaactggcttcccaagccactgcggagttcgagaaggcaatgaaggagttggctgaggaagaaccccacctggtggagcagttccaaaagctctcagaggctgcagggagagtgggcagtgatatgacctcccaacaagaattcacttcttgcctaaaggaaacactaagtggattagccaaaaatgccactgaccttcagaactccagcatgtcggaagaagagctgaccaaggccatggaggggctaggcatggacgaaggggatggggaagggaacatcctccccatcatgcagagtattatgcagaacctactctccaaggatgtgctgtacccatcactgaaggagatcacagaaaagtatccagaatggttgcagagtcatcgggaatctctacctccagagcagtttgaaaaatatcaggagcagcacagcgtcatgtgcaaaatatgtgagcagtttgaggcagagacccccacagacagtgaaaccactcaaaaggctcgttttgagatggtgctggatcttatgcagcagctacaagatttagccatcctccaaaagagctggctggagagatgcctcctggcctcaactttgacctggatgccctcaatctttcgggcccaccagtgccagtggtgaacagtgtctgatcatgtgaaacacaacacgttttcctctctgagtccca

SEQ ID NO: 193961 - DNA, 1396 bp, Homo Sapiens; identical to SEQ ID NO: 186835

SEQ ID NO: 193962 - DNA, 624 bp, Homo Sapiens; identical to SEQ ID NO: 186837
  misc_feature (351)..(397): n is a, c, g, or t

SEQ ID NO: 193963 - DNA, 1016 bp, Homo Sapiens; identical to SEQ ID NO: 186840
  misc_feature (834)..(852): n is a, c, g, or t

SEQ ID NO: 193964 - DNA, 991 bp, Homo Sapiens
ttggcgggcctgagggcggcggtttcccgaacggagcggggcctgctgagcgggcgcggcaccagccgccgcaacccaaagccccgggcttcctgcagccaccgccgctgcgccagcccaggacgaccccgccgccaggggcccagtgcgaggtccccgccagcccccagcggccttcccggcccggggcgctcccagagcaaacgaggcccctgagagctccacctagttcacaggataaaatcccacagcagaactcggagtcagcaatggctaagccccaggtggttgtagctcctgtattaatgtctaagctgtctgtgaatgcccctgaattttacccttcaggttattcttccagttacacagaatcctatgaggatggttgtgaggattatcctactctatcagaatatgttcaggattttttgaatcatcttacagagcagcctggcagttttgaaactgaaattgaacagtttgcagagaccctgaatggttgtgttacaacagatgatgctttgcaagaacttgtggaactcatctatcaacaggccacatctatcccaaatttctcttatatgggagctcgcctgtgtaattacctgtcccatcatctgacaattagcccacagagtggcaacttccgccaattgctacttcaaagatgtcggactgaatatgaagttaaagatcaagctgcaaaaggggatgaagttactcgaaaacgatttcatgcatttgtactctttctgggagaactttatcttaacctggagatcaagggaacaaatggacaggttacaagagcagatattcttcaggttggtcttcgagaattgctgaatgccctgttttctaatcctatggatgacaatttaatttgtgcagtaaaattgttaaagttgacaggatcagttttggaagatgcttggaaggaaaaaggaaagatggatatggaagaattattcagagaattgaaacgttgtcc

SEQ ID NO: 193965 - DNA, 986 bp, Homo Sapiens
ttttggcagatagtgttaaacaaaattaaagttgcatacattagtaacataactcaacatccttaatttggtatagatgtgacacattttcttgctctcttgtgttctgctaaatcaccatactaaactgctttataaaactgatatgctgaaatttaactttactgttttcgcttacgctctgattccaaacaaaacttttcataagcttcttctatctctgggtccatctcatcatcaatatcatccaagtatggatcaccagccccggataaatctgttccattttcttcataatctggaaaaaagtcctctctttcaagtaattcttggtatttctcttggtaatctggatcagctgcagtgaaaggaacaccatcagatgtataaaatgttggttcattcataaagtagttaggatcattttctggtgttgcttctctatatgttgaagttgcatggactctgccccagttacttgaccggagttctacaagcttcaagagcatctgttttacatctctactgcagtttgcatctaggacaacgttttcaattctctgaataatttcttccatatccatctttcctttttccttccaagcatcttccaaaactgatcctgtcaactttaacaattttactgcacaaattaaattgtcatccataggattagaaaacagggcattcagcaattctcgaagaccaacctgaagaatatctgctcttgtaacctgtccatttgttcccttgatctccaggttaagataaagttctcccagaaagagtacaaatgcatgaaatcgttttcgagtaacttcatccccttttgcagcttgatctttaacttcatattcagtccgacatctttgaagtagcaattggcggaagttgccactctgtgggctaattgtcagatgatgggacaggtaattacacaggcgagctcccatataagagaaatttgccaacttttttgtacaaag

SEQ ID NO: 193966 - DNA, 2009 bp, Homo Sapiens; identical to SEQ ID NO: 186842
  misc_feature (163)..(203): n is a, c, g, or t
  misc_feature (1843)..(1854): n is a, c, g, or t

SEQ ID NO: 193967 - DNA, 850 bp, Homo Sapiens; identical to SEQ ID NO: 181147

SEQ ID NO: 193968 - DNA, 999 bp, Homo Sapiens
ttggcgcttccgcaggaagaaggaagcggcgccgccatcgcctcccggcgctccctccccgactcctaagtccttcggccgccaccatgtccgcctcggctgtcttcattctggacgttaagggcaagccattgatcagccgcaactacaagggcgatgtggccatgagcaagattgagcacttcatgcctttgctggtacagcgggaggaggaaggcgccctggccccgctgctgagccacggccaggtccacttcctatggatcaaacacagcaacctctacttggtggccaccacatcgaagaatgccaatgcctccctggtgtactccttcctgtataagacaatagaggtattctgcgaatacttcaaggagctggaggaggagagcatccgggacaactttgtcatcgtctacgagttgctggacgagctcatggactttggcttcccgcagaccaccgacagcaagatcctgcaggagtacatcactcagcagagcaacaagctggagacgggcaagtcacgggtgccacccactgtcaccaacgctgtgtcctggcgctccgagggtatcaagtataagaagaacgaggtcttcattgatgtcatagagtctgtcaacctgctggtcaatgccaacggcagcgtccttctgagcgaaatcgtcggtaccatcaagctcaaggtgtttctgtcaggaatgccagagctgcggctgggcctcaatgaccgcgtgctcttcgagctcactggcttcgcagcaagaacaaatcagtagagctggaggatgtaaaattccaccagtgcgtgcggctctctcgctttgacaacgaccgcaccatctccttcatcccgcctgatggtgactttgagctcatgtcataccgcctcagcacccaggtcaagccactgatctggattgagtctgtcattgagaagttctcccacagccgcgtggagatcatggtcaaggccaaggggcagtttaagaaaca

SEQ ID NO: 193969 - DNA, 1188 bp, Homo Sapiens; identical to SEQ ID NO: 186850
  misc_feature (1031)..(1076): n is a, c, g, or t

SEQ ID NO: 193970 - DNA, 956 bp, Homo Sapiens
tttgtacaaaaaagttggatgaatttactgaatgtgggggaactgttactcatatgttgcatttcgtcgaacgtgcaagtcatgctgaagagaaaccctgtgcttctaaggagtattgacaagcccttagctagatgacaatctcattgagaagcagaaaattcatgctggagagaaactagtgaaggtagcaatacttcattgaatattagaaaatttttctagagagaaagcattgaatatactgagtatgataacatttcctctcaaaccttatcccttactctgcatttgggagatcatacacagagaagccttataaatgtaagagatgtggaaatatcttcagccaaaagtaaatcctcactcatcaagaaatttttactggagagaaaccttgtgaatgtgggaaagcttccattcagatgtcacacctcagccagcagagaatttacagtggggaaaacccctttgcctgtaaggtatgtggaaaagtcttcagccacaaatcaaacctcactgagcatgagcattttcacacgagagagaaaccttttgaatgtaacgagtgtggaaaagcctttagccaaaagcagtatgtcattaaacatcagaacacccatactggcgagaagcttttcgaatgtaatgaatgtggaaaatcatttagccagaaggaaaacctccttacgcaccagaaaattcacactggagaaaaaccttttgagtgtaaagattgcgggaaagctttcattcagaagtcaaacctcatcagacaccagagaactcacacaggagagaagccctttgtatgtaaggagtgtggaaaaaccttcagtggcaaatccaaccttactgagcatgagaaaatccatattggagagaagccttttaaatgtagtgaatgtggaacagcctttggccagaagaagtacctcataaaacatcagaacatt

SEQ ID NO: 193971 - DNA, 1121 bp, Homo Sapiens; identical to SEQ ID NO: 186853

SEQ ID NO: 193972 - DNA, 2281 bp, Homo Sapiens; identical to SEQ ID NO: 186854
  misc_feature (1815)..(1875): n is a, c, g, or t

SEQ ID NO: 193973 - DNA, 832 bp, Homo Sapiens; identical to SEQ ID NO: 186859

SEQ ID NO: 193974 - DNA, 1529 bp, Homo Sapiens
gggaacaggcgttcggttttattagtcatgttacagcagtaaccagatgtgttaatggcagcttatttacggtccatcgatcctttgaacaagtataggaaagcatggctgtcagtctctgactgctcacatctgagcacattcagctaccatggaaactacaagggaaggaaaaatatatttattccaagatttactgggagttttaagtgccctttcttccacagagccccagagtggtgacaaggtgctaggggctgctgtgttttccagcatgagctcccatcctctgagggtcctgagaaggatagtggattggtcctggagcccgcatgaaaggagggggtggtcccattgggtggaacatgtgtggcccaaaacctgggggtgggggtggagcaatgccagggggcggtggcagagcaatgttcaccacagctggaggaccacttgggggcaagttgaagtagttggcagaggcttcttcttctgctgcaggaggaggaggaagagctcctggcaatcctggaacaggttctagtttgatcccagagtctgtagttccatctttctctttttcttttcctctggctgcctgggatcttccccatttcacattcagtctgcggccatttacaatcaacttattaaaggacttctcagcagccacttctgcagcctgccgtgtggcaaactggatgaaagcacactgctgtctctgcacaacagtgatcgtccggatctctccgaactggtagaaatgatttcttaaatctgtctcagtaatggtatcacctagaccaccaacatatagtgtggtgatagttttatcctctggtgggtccagccgaggcattgttgaagcccgctttagaagcttgtcagctacaggatcattgattccgtaataacggtctttaatattctgatcagcaagggggtcatctggatctgtaggcttctcatgtctgtatggacattcctctcctctcttacactctcctttcacccagaaggagcaaatgtggggtcgattccttttgtagtagggtgtggtccgggccagtttgagcagcatgtcactggtagatgtggctttccccagcatgccaactggccgtgttccatcagagttagaaatctctctctccatattctgtgtatagtactctttgttgacatctgactttggcatgtcatctttaaaagacaatcctgcgtcacgaacctggatgggcaggccatactctaggtctaagaggcaggtctgacagacattcttcaatttactgcaggtttggcacacttcagtcttcttgaaacgcatgcggactccagggcaccagcgaaacactgtgaatggcctggcacagattttgcattccttcccatacttttctttggtcattcggatatatgggttttctccaagacatgtctggcacagaatggggaagtccgcatcctcccagttctgcctgttgtaggtgttggaacccagagaggtcgccaacttttttgtacaaagt

SEQ ID NO: 193975 - DNA, 1407 bp, Homo Sapiens
  misc_feature (840)..(848): n is a, c, g, or t
acaaattgatgagcaatgctttttcattatagaaaactttgtacaaaaaagttggcatcatcctggtgatctgtttcatcctctccttcttcgccctctgtggaccccagatgcttgtcttcctgagagtgattggaggtctccttgccttggctgctgtgttccagatcatctccctggtaatttaccccgtgaagtacacccagaccttcacccttcatgccaaccgtgctgtcacttacatctataactgggcctacggctttgggtgggcagccacgattatcctgatcggctgtgccttcttcttctgctgcctccccaactacgaagatgaccttctgggcaatgccaagcccaggtacttctacacatctgcctaacttgggaatgaatgtgggagaaaatcgctgctgctgagatggactccagaagaagaaactgtttctccaggcgactttgaacccattttttggcagtgttcatattattaaactagtcaaaaatgctaaaataatttgggagaaaatattttttaagtagtgttatagtttcatgtttatcttttattatgttttgtgaagttgtgtcttttcactaattacctatactatgccaatatttccttatatctatccataacatttatactacatttgtaagagaatatgcacgtgaaacttaacactttataaggtaaaaatgaggtttccaagatttaataatctgatcaagttcttgttatttccaaatagaatggacttggtctgttaagggctaaggagaagaggaagataaggttaaaagttgttaatgaccaaacattctaaaagaaatgcnnnnnnnnngtttattttcaagccttcgaactatttaaggaaagcaaaatcatttcctaaatgcatatcatttgtgagaatttctcattaatatcctgaatcattcatttcagctaaggcttcatgttgactcgatatgtcatctaggaaagtactatttcatggtccaaacctgttgccatagttggtaaggctttcctttaagtgtgaaatatttagatgaaattttctcttttaaagttctttatagggttagggtgtgggaaaatgctatattaataaatctgtagtgttttgtgtttatatgttcagaaccagagtagactggattgaaagatggactgggtctaatttatcatgactgatagatctggttaagttgtgtagtaaagcattagagggtcattcttgtcacaaaagtgccactaaaacagcctcaggagaataaatgacttgcttttctaaaatctcacgtttatctgggctctatcatatagacaggcttctgatagtttgcaactgtaagcagaaacctacatatagttaaaatcctggtctttcttggtaa

SEQ ID NO: 193976 - DNA, 1653 bp, Homo Sapiens; identical to SEQ ID NO: 186866
  misc_feature (1063)..(1071): n is a, c, g, or t

SEQ ID NO: 193977 - DNA, 937 bp, Homo Sapiens
  misc_feature (138)..(146): n is a, c, g, or t
tacaaaaaagttggatttaataatctgatcaagttcttgttatttccaaatagaatggactcggtctgttaagggctaaggagaagaggaagataaggttaaaagttgttaatgaccaaacattctaaaagaaatgcnnnnnnnnngtttattttcaagccttcgaactatttaaggaaagcaaaatcatttcctaaatgcatatcatttgtgagaatttctcattaatatcctgaatcattcatttcagctaaggcttcatgttgactcgatatgtcatctaggaaagtactatttcatggtccaaacctgttgccatagttggtaaggctttcctttaagtgtgaaatatttagatgaaattttctcttttaaagttctttatagggttagggtgtgggaaaatgctatattaataaatctgtagtgttttgtgtttatatgttcagaaccagagtagactggattgaaagatggactgggtctaatttatcatgactgatagatctggttaagttgtgtagtaaagcattaggagggtcattcttgtcacaaaagtgccactaaaacagcctcaggagaataaatgacttgcttttctaaatctcaggtttatctgggctctatcatatagacaggcttctgatagtttgcaactgtaagcagaaacctacatatagttaaaatcctggtctttcttggtaaacagattttaaatgtctgatataaaacatgccacaggagaattcggggatttgagtttctctgaatagcatatatatgatgcatcggataggtcattatgattttttaccatttcgacttacataatgaaaaccaattcattttaaatatcagattattattttgtaagttgtggaaaaagctaattgtagttttcattatgaagttttcccaataaaccaggtattctaac

SEQ ID NO: 193978 - DNA, 925 bp, Homo Sapiens; identical to SEQ ID NO: 181154

SEQ ID NO: 193979 - DNA, 1606 bp, Homo Sapiens; identical to SEQ ID NO: 186867
  misc_feature (1003)..(1011): n is a, c, g, or t

SEQ ID NO: 193980 - DNA, 650 bp, Homo Sapiens
ttggcctgttgccgtggttagtaaggctttcttaggtgtgaaatatttagatgaaattttctcttttaaagttctgtatagggttagggtgttggaaaatgctatattaataaatctgtagtgttttgtgtttataggttcagaaccagagtaactggattgaaagatggactgatagattggatatatcagtctaatttatcatgactgatagatctggttaagttgtgtactaaaggattaggagagcccttcctgtcacaaaagtgccactaaaacagcctaaggagaaaaatggcttgcttttctaaacttcagatgtatctgggctctaatcatatagacaggcttctgatagattgcaactgtaagtagaaacctacatatagttaaaatcctggtctttcttggtaaacagatttaaaatgtctgatgtaaaacatgccacaggagaattcagggatttgagtttccctgaatagcatatatatgatgcatcaaatgggttattactattttttaccatttccacttacataatgaaaaacaattcattttaaatatcacattattattttgtaagtcatggaaaagggcaattgaagttttcattatgaagttttcccaataaaccaggaattctaaacttg

SEQ ID NO: 193981 - DNA, 1802 bp, Homo Sapiens; identical to SEQ ID NO: 186868
  misc_feature (1140)..(1148): n is a, c, g, or t

SEQ ID NO: 193982 - DNA, 943 bp, Homo Sapiens
tttgtacaaaaaagttggcgcccgtcccgcgcgctcctccgacccgctccgctccgctccgctcggccccgcgccgcccgtcaacatgatccgctgcggcctggcctgcgagcgctgccgctggatcctgcccctgctcctactcagcgccatcgccttcgacatcatcgcgctggccggccgcggctggttgcagtctagcgaccacggccagacgtcctcgctgtggtggaaatgctcccaagagggcggcggcagcgggtcctacgaggagggctgtcagagcctcatggagtacgcgtggggtagagcagcggctgccatgctcttctgtggcttcatcatcctggtgatctgtttcatcctctccttcttcgccctctgtggaccccagatgcttgtcttcctgagagtgattggaggtctccttgccttggctgctgtgttccagatcatctccctggtaatttaccccgtgaagtacacccagaccttcacccttcatgccaaccctgctgtcacttacatctataactgggcctacggctttgggtgggcagccacgattatcctgattggctgtgccttcttcttctgctgcctccccaactacgaagatgaccttctgggcaatgccaagcccaggtacttctacacatctgcctaacttgggaatgaatgtgggagaaaatcgctgctgctgagatggactccagaagaagaaactgtttctccaggcgactttgaacccattttttggcagtgttcatattattaaactagtcaaaaatgctaaaataatttgggagaaaatattttttaagtagtgttatagtttcatgtttatcttttattatgttttgtgaagttgtgtcttttcactaattacctatactatgccaatatttccttatatctatccataacatttataactacattt

SEQ ID NO: 193983 - DNA, 1035 bp, Homo Sapiens
ttggcccaaatattgaccaactggcatcccacagcctcctcttccagaatgcctttgcgcagcaagcagtgtgcgccccgagccgcgtttctttcctcactggcaggagacctgacaccacccgcctgtacgacttcaactcctactggagggtgcacgctggaaacttctccaccatcccccagtacttcaaggagaatggctatgtgaccatgtcggtgggaaaagtctttcaccctgggatatcttctaaccatactgatgattctccgtatagctggtcttttccaccttatcatccttcctctgagaagtatgaaaacactaagacatgtcgagggccagatggagaactccatgccaacctgctttgccctgtggatgtgctggatgttcccgagggcaccttgcctgacaaacagagcactgagcaagccatacagttgttggaaaagatgaaaacgtcagccagtcctttcttcctggccgttgggtatcataagccacacatccccttcagataccccaaggaatttcagaagttgtatcccttggagaacatcaccctggcccccgatcccgaggtccctgatggcctaccccctgtggcctacaacccctggatggacatcaggcaacgggaagacgtccaagccttaaacatcagtgtgccgtatggtccaattcctgtggactttcagcggaaaatccgccagagctactttgcctctgtgtcatatttggatacacaggtcggccgcctcttgagtgctttggacgatcttcagctggccaacagcaccatcattgcatttacctcggatcatgggtgggctctaggtgaacatggagaatgggccaaatacagcaattttgatgttgctacccatgttcccctgatattctatgttcctggaatgactgcttcacttccggaggcatgcgagaagcttttcccttacatcgacccttttgattccgcctcacagttgatggagccaggcatgcaatccatggaccttgtggaacttgtgt

SEQ ID NO: 193984 - DNA, 2615 bp, Homo Sapiens; identical to SEQ ID NO: 186873
  misc_feature (57)..(78): n is a, c, g, or t

SEQ ID NO: 193985 - DNA, 1636 bp, Homo Sapiens; identical to SEQ ID NO: 181157
  misc_feature (866)..(912): n is a, c, g, or t
  misc_feature (1420)..(1432): n is a, c, g, or t

SEQ ID NO: 193986 - DNA, 2207 bp, Homo Sapiens; identical to SEQ ID NO: 186875

SEQ ID NO: 193987 - DNA, 876 bp, Homo Sapiens
ctttgtacaaaaaagttggctattaatagttttgggtcatttaaagggacttgaggaagctacccaggattacagaagagtgtccacctaacaagatggtctggcagtttcctagttttgtatctggttcaatagaaatatgtgaaagtggtaatgtcatcatttgatgcagagtccgggtttctctataataaatccctttgccaaatgcatgagttgcagacttgctactggcaagagtgaagcaagtgggtgagtaaaactattttgacgtgggagcgttttcagataggagtttagtcttgacgaaagtgtccgtgcaggaattggactccgaggagggttacagtatctcctgacgggacctgccactcgcatctgggcaatgttgacatttgaggtggcaggcaggatgcctgccttctaatatatttgggtgagtaactgagccagccaagggaaggttgaatgattaaatcagaaatgggattcttggtaaactgaagacttttatttgggaatgaaaaaccttaaaaaaatctcttcatcgttgaactgtgcattttccctgcattttttcccaacaaaattttgttgggggttatgttactgaagaatgaacagatgagtaagtggaggtgttatgtaaaggcatattgtactcgaaatctgaagacctgcagcagatttaaattacaactcttgttataacttttttaaaagattgtgaaatatcaaaatataaatgaatcaagttttaatatactgtatgatgggtggatgaagctgtccattgtaccatttgtttgaattctcagcatggtttggcagtgcaagaattctgtacattacaattcaataaaaagtaatatatgg

SEQ ID NO: 193988 - DNA, 641 bp, Homo Sapiens; identical to SEQ ID NO: 186877

SEQ ID NO: 193989 - DNA, 1216 bp, Homo Sapiens
ttgggcagtgaaaaggaagaagacgataatgaaaagagacaagatccaggtgataactgggaagaaggtggaggtggtggtggaggtatggaaaaatcttcaggtccctggaataaaacagctccagtacaagcacctcctgctccagtaattgttacagaaaccccagaaccagcgatgactagtggtgtgtataggcctcctggggccaggttaaccacaacaaggaaaacaccacaaggaccaccagaaatctacagtgatacacagttcccatccctgcagtcaactgccaagcatgtagaaagccggaaggataaagaaatggagaagagctttgaagtagtaagacacaaaaatagaggtagggatgaggtttcaaaaaaccaggcccttaaacttcagctagacaaccaatatgctgtgcttgaaaatcagaaaagcagccactcacaatacaattaaggaatgggctttgctaacccttctgaggtaactagactgcagctaaccaccaccaacagccattcatcatctgatctctgctggatctacagacaccgatgcagaccactcgatttcatgaccggccctattgcactatggaagttaaagtgtcacgactgctctatgcatattggatttaggggaattttcattgttacataaatgtgtgaactagtttcaacagtgttctttcatatttactctgcaaatacaaaaaaccaaaacctgcagccagtggtcatttcaaaatctttttatgttcagatactgagccttcataagggttgactacctcagatttgctgcactcattgtggacttcatgtggatcacaacttctggataagaagattacaactattaagtgtcgatgtgaaccttgcaaccagctctactggattcttatcagaaatcctgcataaaaagtcagccatctgggttctgatctgctgtaaaagatgaagatttaagtgaccttaattaacctgtcctgtgccctacccttaaggaatactctctgtagtaggctgttgttatattagacttcctggaacacaccgctgaaaagaactgatgtgttcagatcatctgtgtagggctgtgatttgtaatttaaactaattgtattctgaggtaaccacaaaataaattcaaccaaactggggtccaccaagtgggggaaggggaagggagagaataatcttggggg

SEQ ID NO: 193990 - DNA, 882 bp, Homo Sapiens; identical to SEQ ID NO: 181159

SEQ ID NO: 193991 - DNA, 862 bp, Homo Sapiens; identical to SEQ ID NO: 186880

SEQ ID NO: 193992 - DNA, 1597 bp, Homo Sapiens; identical to SEQ ID NO: 186881

SEQ ID NO: 193993 - DNA, 1492 bp, Homo Sapiens; identical to SEQ ID NO: 186883

SEQ ID NO: 193994 - DNA, 286 bp, Homo Sapiens
ttgggttggtggaaaaacagagaccagttttgcttatatatggtgtggtgggtggagagaaagggtacatcagattgctacctaacagagcgaggaaatcagttcttattttccattagaaaacaaaacaaatggcaattaatccattcatgtctgaggttgcaggtttttgaatttttgcaatcagaccttggcgatgaccttgagcagtaggatataaataactcccacatgcttagagttccaataatggaacactagggttcaagttagatgatttccccaa

SEQ ID NO: 193995 - DNA, 1652 bp, Homo Sapiens; identical to SEQ ID NO: 186885
  misc_feature (531)..(539): n is a, c, g, or t
  misc_feature (1376)..(1384): n is a, c, g, or t

SEQ ID NO: 193996 - DNA, 989 bp, Homo Sapiens; identical to SEQ ID NO: 186886

SEQ ID NO: 193997 - DNA, 1593 bp, Homo Sapiens; identical to SEQ ID NO: 186887
  misc_feature (541)..(549): n is a, c, g, or t

SEQ ID NO: 193998 - DNA, 809 bp, Homo Sapiens; identical to SEQ ID NO: 181164
  misc_feature (103)..(144): n is a, c, g, or t
  misc_feature (393)..(473): n is a, c, g, or t
  misc_feature (528)..(551): n is a, c, g, or t
  misc_feature (606)..(630): n is a, c, g, or t

SEQ ID NO: 193999 - DNA, 1324 bp, Homo Sapiens
ttggagcgattttcagcagagacgtagaaggcgccgggacccggaggaaccggaaaaaacagaactcagcgaaagagagctggcagtagcagtggcggtgtcccaggagaacgatgaggagaacgaagagcgctgggttggacctttacctgtggaggcaacactggccaagaagaggaaagtcttagagtttgaaagagtctatcttgataatctccccagtgcatccatgtatgagcgcagttacatgcatagagatgttatcacccatgtggtatgcaccaaaacagattttattattactgccagtcatgatggacatgtcaagttctggaaaaaaatagaagagggaattgaatttgttaaacattttcgtagtcacctgggagttattgagagtattgcagttagctctgagggagcattgttctgttctgtgggtgatgataaagcaatgaaggtgtttgatgtagtgaactttgacatgatcaacatgctgaaacttggctattttcctggacagtgtgagtggatctattgcccaggggatgcaatttcttcagttgctgcttccgaaaagagtacaggaaaaattttcatttatgatggccgaggagataaccagccacttcatatttttgacaaactccatacatcacctcttactcagatacggctaaacccagtttacaaagcagtagtgtcttctgacaaatctgggatgattgaatactggactgggcctcctcatgaatataaattccccaaaaatgtgaactgggaatataaaactgacactgatttatatgaatttgccaagtgtaaggcttatccaaccagcgtatgtttttcaccagatgggaagaaaatagctactattggttctgatagaaaagttagaattttcagatttgtaactggaaaactcatgagagtctttgatgaatcactaagcatgtttactgaactgcaacagatgaggcaacagttaccagacatggaatttggccgacgaatggctgtagaacgtgagttggagaaggttgatgctgtaagattaattaatatagtttttgatgaaactggacacttcgtgctgtatggaacaatgctgggcattaaagttataaatgtagagacaaaccggtgtgtgcggattttaggcaaacaagaaaatattagagtgatgcaattggctttgttccaggggatagccaaaaagcatcgtgctgcaactactatagaaatgaaagcttctgaaatcctgtcttcagaatatcagctgacccacaatagtctgtacatcattcaaaaagatagattt

SEQ ID NO: 194000 - DNA, 1564 bp, Homo Sapiens; identical to SEQ ID NO: 186892
  misc_feature (409)..(431): n is a, c, g, or t
  misc_feature (848)..(858): n is a, c, g, or t
  misc_feature (913)..(950): n is a, c, g, or t
  misc_feature (969)..(997): n is a, c, g, or t
  misc_feature (1101)..(1112): n is a, c, g, or t

SEQ ID NO: 194001 - DNA, 841 bp, Homo Sapiens
ttggctctgggactcagtgctgcaccgcgtgtacaaagacaaagagatgaatctggggtagatttaggtgctaggaatattgtttcttgagttcttgacaggtgcagcttcggggctgcattccttctgtctcctaattttcatctctttatcaggtgatagtagaaaaggctcccaaagctcggataggagacctggacaaaaagaaatacctggtgccttctgatctcacagttggtcagttctacttcttgatccggaagcgaattcatctccgagctgaggatgccttgtttttctttgtcaacaatgtcattccacccaccagtgccacaatgggtcagctgtaccaggaacaccatgaagaagacttctttctctacattgcctacagtgacgaaagtgtctacggtctgtgaagctgctgcccctgagctggaggggggtctcattctacaaagagagaggtggcccccctttcttgacctcctcctccttcaagctcaaacaccacctcccttattcaggaccggcacttcttaatgtttgtggctttctctccagcctctcttaggaggggtaatggtggagttggcatcttgtaactctcctttctcctttcttcccctttctctgcccgcctttcccatcctgctgtagacttcttgattgtcagtctgtgtcacatccagtgattgttttggtttctgttccctttctgactgcccaagggctcagaaccccagcaatcccttcctttcactaccttctttttgggggtagttggaagggactgaaattgtggggggaaggtaggaggcacatcattaagagggaaacc

SEQ ID NO: 194002 - DNA, 722 bp, Homo Sapiens
ttggctgctgtccttgggacccaggatgaaaggagtgatagtagaaaaggctcccaaagctcggataggagacctggtcaaaaagaaatacctggtgccttctgatctcacagttggtcagttctacttcttgatccggaagcgaattcatctccgagctgaggatgccttgtttttctttgtcaacaatgtcattccacccaccagtgccacaatgggtcagctgtaccaggaacaccatgaagaagacttctttctctacattgcctacagtgacgaaagtgtctacggtctgtgaagctgctgcccctgagctggaggggggtctcattctacaaagagagaggtggcccccctttcttgacctcctcctccttcaagctcaaacaccacctcccttattcaggaccggcacttcttaatgtttgtggctttctctccagcctctcttaggaggggtaatggtggagttggcatcttgtaactctcctttctcctttcttcccctttctctgcccgcctttcccatcctgctgtagacttcttgattgtcagtctgtgtcacatccagtgattgttttggtttctgttccctttctgactgcccaaggggctcagaaccccagcaatcccttcctttcactaccttcttttttgggggtagttggaagggactgaaattgtggggggaaggtaggaggcacatcaataaagaggaaacc

SEQ ID NO: 194003 - DNA, 469 bp, Homo Sapiens
ggtttcctctttattgatgtgcctcctaccttccccccacaatttcagtcccttccaactacccccaaaaaagaaggtagtgaaaggaagggattgctggggttctgagccccttgggcagtcagaaagggaacagaaaccaaaacaatcactggatgtgacacagactgacaatcaagaagtctacagcaggatgggaaaggcgggcagagaaaggggaagaaaggagaaaggagagttacaagatgccaactccaccattacccctcctaagagaggctggagagaaagccacaaacattaagaagtgccggtcctgaataagggaggtggtgtttgagcttgaaggaggaggaggtcaagaaaggggcagcagcttcacagaccgtagacactttcgtcactgtaggcaatgtagagaaagccaacttttttgtacaaagtcctcttttgaaaagcatgctcatca

SEQ ID NO: 194004 - DNA, 1292 bp, Homo Sapiens; identical to SEQ ID NO: 181168
  misc_feature (343)..(376): n is a, c, g, or t

SEQ ID NO: 194005 - DNA, 925 bp, Homo Sapiens
ctttgtacaaaaaagttggggcaagagtccctcgagagaatccctacgcgacctccgtgggccacctcatagaaaaggctacatttgctggagttcagactgaagattggggccagttcatgcacatctgtgacataattaacactacccaggatgggccaaaagatgcagtgaaagctttgaagaaaaggatttccaaaaactacaatcataaagaaatccaacttaccttgtcacttattgacatgtgtgtgcagaactgtggtccaagtttccagtctctgattgtgaagaaggaatttgttaaagagaatttagttaagctactgaatcccagatacaacttgccattagacattcagaatagaatcttgaatttcattaagacttggtcacagggcttcccaggaggtgtggatgtaagcgaagtcaaagaagtatacctcgacctggttaagaaaggcgttcagtttcctccctcagaagcagaggctgaaacagcaagacaagagactgctcaaatctcatcaaatcctccaacatctgtccctactgcaccagctctttcttctgtaattgctccaaagaactcgactgttacattggtcccagaacagattggaaaactgcacagtgaattggatatggtgaaaatgaatgtgcgagtgatgtccgccatattgatggagaatactcctgggtctgaaaaccatgaagacatagagcttctgcagaaactctataaaacaggtcgggagatgcagagaggatcatggacctgcttgtggtggtggagaacgaagatgtaactgttgagctaattcaagtgaatgaggatttgaataatgctatccttggatatgagagtttactagaaaccaacaaaggattttggagcaaaataagaaccagaagaagccaccaa

SEQ ID NO: 194006 - DNA, 1722 bp, Homo Sapiens; identical to SEQ ID NO: 186897

SEQ ID NO: 194007 - DNA, 1351 bp, Homo Sapiens; identical to SEQ ID NO: 186898
  misc_feature (366)..(375): n is a, c, g, or t

SEQ ID NO: 194008 - DNA, 1550 bp, Homo Sapiens; identical to SEQ ID NO: 186899

SEQ ID NO: 194009 - DNA, 1762 bp, Homo Sapiens; identical to SEQ ID NO: 186903
  misc_feature (1568)..(1581): n is a, c, g, or t

SEQ ID NO: 194010 - DNA, 736 bp, Homo Sapiens
  misc_feature (125)..(158): n is a, c, g, or t
ttggcattataataacaagagtcagaacattaattcgaaacaacttgcagtatgcatttcttcacaccagtacattcttaagtgtacttgtttataaggaataacataaactaatctgtaccttnnnnnnnnnnnnnnnnnnnnnnnnnnnnnnnnnnaactgtatagtgtacatggtaatgatttattgctatgccccagatccttaatgtagttctcatcctccgcatgccctcagccacaagcgggtgactgactgttccctgatgatttggcccacctcctgtgtttggacctctagggaggagggttttggtcatactctccttatcctcgtgcacagaaatgctcagggtccccatgtgcctgttgttcagccctctctcttgttccctttctgagcatgtggtccttccccaggctgtgggacagctgccttcccacgaaagtgtaaagcagtattaagatcattactgcatgtgccctaaaaacccaagttttctattcccttaggacagaaaattgcatgtgaggtgggataatcgagtttcagtgacccacgtcagttacacattaaagccagaccccatgataaaattccacaaaatggaaataaaactcaaatttctttagcattgtgtaaataaatctgaatgtgtttaactttgtactggtaattttctgtatatttggaatatttgggttaaaaataaaacagactggactttgttacctg

SEQ ID NO: 194011 - DNA, 1309 bp, Homo Sapiens; identical to SEQ ID NO: 186904
  misc_feature (899)..(913): n is a, c, g, or t

SEQ ID NO: 194012 - DNA, 1846 bp, Homo Sapiens; identical to SEQ ID NO: 186905
  misc_feature (1431)..(1464): n is a, c, g, or t

SEQ ID NO: 194013 - DNA, 648 bp, Homo Sapiens
actttgtacaaaaaagttgggggagctcgttttcctctaggcagagaagaggcgatggcggcgatggcatctctcggcgccctggcgctgctcctgctgtccagcctctcccgctgctcagccgaggcctgcctggagccccagatcaccccttcctactacaccacttctgacgctgtcatttccactgagaccgtcttcattgtggagatctccctgacatgcaagaacagggtccagaacatggctctctatgctgacgtcggtggaaaacaattccctgtcactcgaggccaggatgtggggcgttatcaggtgtcctggagcctggaccacaagagcgcccacgcaggcacctatgaggttagattcttcgacgaggagtcctacagcctcctcaggaaggctcagaggaataacgaggacatttccatcatcccgcctctgtttacagtcagcgtggaccatcggggcacttggaacgggccctgggtgtccactgaggtgctggctgcggcgatcggccttgtgatctactacttggccttcagtgcgaagagccacatccaggcctgagggcggcaccccagccctgcccttgcttccttcaataaacatcacaggacctgggactgcacaggacctggg

SEQ ID NO: 194014 - DNA, 798 bp, Homo Sapiens
  misc_feature (546)..(555): n is a, c, g, or t
actttgtacaaaaaagttggatcttttaatgttgtatgtctgggatgcaagtattgctaaatatgttagccctccaggttaaagttgattcagctttaagatgttacccttccagaggtacagaagaaacctatttccaaaaaaggtcctttcagtggtagactcggggagaacttggtggcccctttgagatgccaggtttcttttttatctagaaatggctgcaagtggaagcggataatatgtaggcactttgtaaattcatattgagtaaatgaatgaaattgtgatttcctgagaatcgaaccttggttccctaaccctaattgatgagaggctcgctgcttgatggtgtgtacaaactcacctgaatgggacttttttagacagatcttcatgacctgttcccaccccagttcatcatcatctcttttacaccaaaaggtctgcagggtgtggtaactgtttcttttgtgctattttggggtggagaaggtggatgtgatgaagccaataattcaggacttattccttcttgtgttgtgnnnnnnnnnngcccttgcaccagagtatgaaatagcttccaggagctccagctataagcttggaagtgtctgtgtgattgtaatcacatggtgacaacactcagaatctaaattggacttctgttgtattctcaccactcaatttgttttttagcagtttaaatgggtacattttagagtcttccattttgttggaattagatcctccccttcaaatgctgtaattaacaacacttaaaaaactttgaataaa

SEQ ID NO: 194015 - DNA, 1745 bp, Homo Sapiens
  misc_feature (1503)..(1512): n is a, c, g, or t
ttgttggcgcagcccccgccgtagccgcctccgagcccgccgccacatcctctgagaagatggctgtgccacccacgtatgccgatcttggcaaatctgccagggatgtcttcaccaagggctatggatttggcttaataaagcttgatttgaaaacaaaatctgagaatggattggaatttacaagctcaggctcagccaacactgagaccaccaaagtgacgggcagtctggaaaccaagtacagatggactgagtacggcctgacgtttacagagaaatggaataccgacaatacactaggcaccgagattactgtggaagatcagcttgcacgtggactgaagctgaccttcgattcatccttctcacctaacactgggaaaaaaaatgctaaaatcaagacagggtacaagcgggagcacattaacctgggctgcgacatggatttcgacattgctgggccttccatccggggtgctctggtgctaggttacgagggctggctggccggctaccagatgaattttgagactgcaaaatcccgagtgacccagagcaactttgcagttggctacaagactgatgaattccagcttcacactaatgtgaatgacgggacagagtttggcggctccatttaccagaaagtgaacaagaagttggagaccgctgtcaatcttgcctggacagcaggaaacagtaacacgcgcttcggaatagcagccaagtatcagattgaccctgacgcctgcttctcggctaaagtgaacaactccagcctgataggtttaggatacactcagactctaaagccaggtattaaactgacactgtcagctcttctggatggcaagaacgtcaatgctggtggccacaagcttggtctaggactggaatttcaagcataaatgaatactgtacaattgtttaattttaaactattttgcagcatagctaccttcagaatttagtgtatcttttaatgttgtatgtctgggatgcaagtattgctaaatatgttagccctccaggttaaagttgattcagctttaagatgttacccttccagaggtacagaagaaacctatttccaaaaaaggtcctttcagtggtagactcggggagaacttggtggcccctttgagatgccaggtttcttttttatctagaaatggctgcaagtggaagcggataatatgtaggcactttgtaaattcatattgagtaaatgaatgaaattgtgatttcctgagaatcgaaccttggttccctaaccctaattgatgagaggctcgctgcttgatggtgtgtacaaactcacctgaatgggacttttttagacagatcttcatgacctgttcccaccccagttcatcatcatctcttttacaccaaaaggtctgcagggtgtggtaactgtttcttttgtgccattttggggtggagaaggtggatgtgatgaagccaataattcaggacttattccttcttgtgttgtgnnnnnnnnnngcccttgcaccagagtatgaaatagcttccaggagctccagctataagcttggaagtgtctgtgtgattgtaatcacatggtgacaacactcagaatctaaattggacttctgttgtattctcaccactcaatttgttttttagcagtttaatgggtacattttagagtcttccattttgttggaattagatcctccccttcaaatgctgtaattaacaacacttaaaaaact

SEQ ID NO: 194016 - DNA, 1806 bp, Homo Sapiens; identical to SEQ ID NO: 186912

SEQ ID NO: 194017 - DNA, 865 bp, Homo Sapiens
  misc_feature (425)..(469): n is a, c, g, or t
ttggcttatcaattttgactagttctctagattatttgacttcagtttctctgccttcaggtaagtttgacatcagttcctttcacaagcgttttctagcctgaaggtcagcactggtgtatttttcagaaattgatgcttcagatgaatgctaagcacaaagcagaagaagttgaagatgaaacagtagagcttgatgtgtcagatgaagagatggctagaagatatgagaccttggtggggacaattgggaaaaagtttgccagaaagagagaccatgccaattatgaagaagatgaaaatggagacataacaccaattaaagcaaagaagatgttcttaaagccccaggattaagatggatgccttaagcgatggcccaggggtgcttggtggaagtcagcagggcatctggagctcatccnnnnnnnnnnnnnnnnnnnnnnnnnnnnnnnnnnnnnnnnnnnnnagagattatcattttagaaacatgctgtttttgaaacagatgtgtgatggatgttgtacatcctttgcttcttggtattcattcagagtggatttttagcccctgatctacaaatgtacattgttacagggctgcttcctaaagattttttttacctcaggtttctcttaatatagttctccagtcactgaccttgaattgacttacataaactactgccaatgtttaaattgcccttatgtttatgtttattatgtcaagccaattcgtacatacaatttggaatcaagtgtcataagaatttattatataaatttatcaagaataaaaatgcctctccagcctaaagtatttacatgctcccaggtcattgtcagtttatggtattatgttgtt

SEQ ID NO: 194018 - DNA, 1236 bp, Homo Sapiens
ttggatcaggcccccatacaaagaaggaagtcccaaggaagtgcctggtactgaagacagagctggcaaacagaagtttaaaagccccatgaatacttcctggtgttcctttaacacagctgactgggtcctgccaggaaagaagatgggcaacctcagccagttatcttctggagaagacaagtggctgcttcgaaagaaggcccaggaagtattacttaattcacctctacaggaggaacataacttccccccagaccattatggcctccctgcagtttgtgatctctttgcctgtatgcagcttaaagttgataaagagaagtggttatatcgaactcctctacagatgtgaaggaatggacaagagttgagcagcctttctgctgattatcacacatcatgagctgagtgactgcagcttgccaaatctttgtgtttctgggtctgaccaattagcttagttcttctcctgcctaattttgaactagtaaagcaaagtgagtcatcagattatgagttactgtttaaaagaaaaatgctgtttattcatgctgaggtgattcagttccctccttcttacagaagtattttaattcaccccacactagaaatgcagcatctttgtggacgtctttttcacaagcctccaaggctccttagattgggtcgttactaaaagtacattaaaacactcttgtttatcgaagtatattgatgtattctaaagctagtaaacttccctaacgtttaattgccctacagatgcttctcttgctgtgggttttcttttgttagtggtctgaaataattattttcctgttctattaatacatagtgtattttgcacaaaaaaattaacctggtcaatagtgattaccaaaatatatattaataatcttggcaatttttgacattaattatgaaacattttagcccacgttagttctacattattcttcacttaaactcagctactgcaaattttgtctttctgtaaatgttattaaaatatccagtgagctctttagaaggactcagtattatttcaagactatttttgaggtaattctagccttttaaaatattctacagacctacggggcttaaaagaaccccagtaccgactaagcaaataggcaaaagacatgttggaaatgtagtatagtacttgaaacagtcactatcatagggataattggtgcatcctgtgtaaatggaagctgagcttgacac

SEQ ID NO: 194019 - DNA, 1010 bp, Homo Sapiens
gttttgccccaccaccttatataatactccctaaatgatatctggggagggaattaaaaaataatacaaagctttttcagctgtggttcaaagaactctagtgaagctgtatggcaatgacatttgggaccatgaagtttccccagaagtatttccggtaagaggcagttaagaagcttaatagtttcaaagtctggaaagcagcaaagatatcttagagaaaacattataaaccccacttctctcctacacagacattttaaagcatggacgtaactttaaggagactgagaaaacatcagtagttttcacaaagcttcaatgaacaccccaaggcacaagtgttgaaaacggcctgttcactaaaacgtcacttttggaggtacaggtatgctgtgcttgcagtgagaggatgactttatccctacttaaaagcaccaggtgtcaagctcagcttccatttacacaggatgcaccaattatccctatgatagtgactgtttcaagtactatactacatttccaacatgtcttttgcctatttgcttagtcggtactggggttcttttaagccccgtaggtctgtagaatattttaaaaggctagaattacctcaaaaatagtcttgaaataatactgagtccttctaaagagctcactggatattttaataacatttacagaaagacaaaatttgcagtagctgagtttaagtgaagaataatgtagaactaacgtgggctaaaatgtttcataattaatgtcaaaaattgccaagattattaatatatattttggtaatcactattgaccaggttaatttttttgtgcaaaatacactatgtattaatagaacaggaaaataattatttcagaccactaacaaaagaaaacccacagcaagagaagcatctgtagggcaattaaacgttagggaagtttactagctttagaggtacatcaatatccaacttttttgtacaaagttgcgcctttatagaaaagcattg

SEQ ID NO: 194020 - DNA, 1413 bp, Homo Sapiens; identical to SEQ ID NO: 181174
  misc_feature (654)..(663): n is a, c, g, or t
  misc_feature (836)..(856): n is a, c, g, or t

SEQ ID NO: 194021 - DNA, 888 bp, Homo Sapiens; identical to SEQ ID NO: 181175

SEQ ID NO: 194022 - DNA, 969 bp, Homo Sapiens
ttggcgctctcctccctcttcccggctccagctccgccgccagctccagcctttgctccccctcccaaagtcccctccccggagcggagcgcacctagggtccctcttccgtccccccagcccagctacccgttcagaccagcagcctcggggggcacccccccgccagcctgcctccctcccgctcagccctgccagggttccccagccatgaatctcttccgattcctgggagacctctcccacctcctcgccatcatcttgctactgctcaaaatctggaagtcccgctcgtgcgccggaatttcagggaagagccaggtcctgtttgctgtggtgttcactgcccgatatctggacctcttcaccaactacatctcactctacaacacgtgtatgaaggtggtctacatagcctgctccttcaccacggtctggttgatttatagcaagttcaaagctacttacgatgggaaccatgacacgttcagagtggagttcctggtcgttcccacagccattctggcgttcctggtcaatcatgacttcacccctctggagatcctctggaccttctccatctacctggagtcagtggccatcttgccgcagctgttcatggtgagcaagaccggcgaggcggagaccatcaccagccactacttgtttgcgctaggcgtttaccgcacgctctatctcttcaactggatctggcgctaccatttcgagggcttcttcgacctcatcgccattgtggcaggcctggtccagacagtcctctactgcgatttcttctacctctatatcaccaaagtcctaaaggggaagaagttgagtttgccggcatagccccggtcctctccatctctctcctcggcagcagcgggaggcagaggaaggcggcagaagatgaagagctttcccatccagggggacttttttaaaacccacctcttgtgctccccatcc

SEQ ID NO: 194023 - DNA, 1110 bp, Homo Sapiens
  misc_feature (298)..(306): n is a, c, g, or t
cagggggagaccttcctgggccctccctttctccctatccccaatctagaaatttagtgggggtcgcggttcatggccatggcaggaggtggggcagatgggtgtcggcagatttagtgtttggcaaccagtggggctgggggtgggatctgggagggagccgaggggcctggggaagggaaaagatcttggaccctgccccggcccataggacactcaaaaacactttataaaaattggggccacagagtagaagaaaaacgagtcatcagaatcaaaaactaaagagtggaaagannnnnnnnncttgtctaaaaggcaaaaaactacaaacagcccaagtcctgagctccccaagacctggatcctccactgtccccctgaaacccggcaggaggcgggatggggagcacaagaggtgggttcttaaaaaagtcacccctggatgggaaagctcttcatcttctgccgccttcctctgcctcccgctgctgccgaggagagagatggagaggaccggggctatgccggcaaactcaacttcttcccctttaggactttggtgatatagaggtagaagaaatcgcagtagaggactgtctggaccaggcctgccacaatggcgatgaggtcgaagaagccctcgaaatggtagcgccagatccagttgaagagatagagcgtgcggtaaacgcctagcgcaaacaagtagtggctggtgatggtctccgcctcgccggtcttgctcaccatgaacagctgcggcaagatggccactgactccaggtagatggagaaggtccagaggatctccagaggggtgaagtcctgattgaccaggaacgccagaatggctgtgggaacgaccaggaactccactctgaacgtgtcatggttcccatcgtaagtagctttgaacttgctataaatcaaccagaccgtggtgaaggagcaggctatgtagaccaccttcatacacgtgttgtagagtgagatgtagttggtgaagaggtccagatatcgggcagtgaacaccacagcaaacaggacctggctcttccctgaaattcctgtggtccagagactagtagaaggagagagagagagcca

SEQ ID NO: 194024 - DNA, 1444 bp, Homo Sapiens
ttggcatggcggcggcactgaagtgtctactgacattaggaagatggtgccccggccttggagtggctccccaggcccgggtgagtgcctacattccctgctgtcggagagactctggatctgcagagacatctccgcgcagaggaggagcgctcctggcagccccctagcgattgccagcaactttcctttctgccaggaaatcaacctacctttctctgcctgcaggcgctcgccgccttagtacccggagtgacccaggtagataacaagtccggtttcctgcagaagaggcctcatcgccagcaccctggcatcctaaagctgccgcacgtgcggctgccacaggcactggctaacggtgcccagttattgctacttggtgagtaacggcgggaaagcgagaagaaacgggactggacctacatgcaagtgattccgcttttcgtctttggcccatagggagcgctgggcccactatggagaatcaggtgcaaacactgaccagttatctctggagcagacatttgcctgtagagccagaggagttgcaaagacgggctaggcatcttgagaaaaaattcctggaaaacccagacttatctcagacagaggagaaacttcgtggagcagtgctacacgcactacgtaaaactacctaccattggcaagaactgagctacactgagggactgagcctggtgtatatggcagcaagactggatggtggctttgcagcagtctccagagcattccatgagatccgggctcgaaatccagcatttcagccacaaactttgatggactttggctcaggtactggttctgtcacctgggctgctcacagtatttggggccagagcctacgtgaatatatgtgtgtggacagatcagctgccatgttggttttggcagaaaaactactgaaaggtggttcagaatctggggagccttatattccaggtgtctttttcagacagtttctacctgtatcacccaaggtgcagtttgatgtagtagtgtcagctttttccttaagtgaactgcccagcaaggctgaccgcactgaggtagttcaaaccttatggcgtaagacaggtcatttcctggtactggtggagaatggaacaaaagctgggcacagccttctcatggatgccagggatctggtccttaagggaaaagagaagtcacctttggaccctcgacctggttttgtctttgccccgtgtccccatgaactcccttgtccccagttgaccaacctggcctgtagcttctcacaggcgtaccatcccatccccttcagctggaacaagaaaccaaaggaagaaaagttctctatggtgatccttgctcgggggtctccagaggaggctcatcgctggccccgtatcactcaacctgtccttaaacggcctcgccctgtgcattgtcacttgtg

SEQ ID NO: 194025 - DNA, 1344 bp, Homo Sapiens; identical to SEQ ID NO: 186925

SEQ ID NO: 194026 - DNA, 1889 bp, Homo Sapiens; identical to SEQ ID NO: 181181
  misc_feature (602)..(643): n is a, c, g, or t
  misc_feature (1575)..(1583): n is a, c, g, or t

SEQ ID NO: 194027 - DNA, 1018 bp, Homo Sapiens; identical to SEQ ID NO: 186928

SEQ ID NO: 194028 - DNA, 1593 bp, Homo Sapiens; identical to SEQ ID NO: 181183
  misc_feature (1464)..(1481): n is a, c, g, or t

SEQ ID NO: 194029 - DNA, 1370 bp, Homo Sapiens; identical to SEQ ID NO: 181191
  misc_feature (114)..(136): n is a, c, g, or t
  misc_feature (241)..(303): n is a, c, g, or t

SEQ ID NO: 194030 - DNA, 1709 bp, Homo Sapiens; identical to SEQ ID NO: 186940

SEQ ID NO: 194031 - DNA, 1936 bp, Homo Sapiens; identical to SEQ ID NO: 181193
  misc_feature (159)..(173): n is a, c, g, or t
  misc_feature (256)..(265): n is a, c, g, or t

SEQ ID NO: 194032 - DNA, 2660 bp, Homo Sapiens; identical to SEQ ID NO: 186948
  misc_feature (2517)..(2530): n is a, c, g, or t

SEQ ID NO: 194033 - DNA, 1442 bp, Homo Sapiens; identical to SEQ ID NO: 186949
  misc_feature (1014)..(1027): n is a, c, g, or t
  misc_feature (1158)..(1169): n is a, c, g, or t

SEQ ID NO: 194034 - DNA, 889 bp, Homo Sapiens
ttggcgagtactccccgtaacgaggaggtgttctcggccgtcccacccttcactgccgtctccgggctgcgccgccggagccgggacgcgcctccgcagccctcgccgcctccatccccgcggccgcagctcctctcgccgtccgcgcgcacaccatgacgaagaacgagaagaagtccctcaaccagagcctggccgagtggaagctcttcatctacaacccgaccaccggagaattcctggggcgcaccgccaagagctggggtttgatcttgctcttctacctagttttttatgggttcctggctgcactcttctcattcacgatgtgggttatgcttcagactctcaacgatgaggttccaaaataccgtgaccagattcctagcccaggactcatggtttttccaaaaccagtgaccgcattggaatatacattcagtaggtctgatccaacttcgtatgcagggtacattgaagaccttaagaagtttctaaaaccatatactttagaagaacagaagaacctcacagtctgtcctgatggagcactttttgaacagaagggtccagtttatgttgcatgtcagtttcctatttcattacttcaagcatgcagtggtatgaatgatcctgattttggctattctcaaggaaacccttgtattcttgtgaaaatgaacagaataattggattaaagcctgaaggagtgccaaggatagattgtgtttcaaagaatgaagatataccaaatgtagcagtttatcctcataatggaatgatagacttaaaatatttcccatattatgggaaaaaactgcatgttgggtatctacagccattggttgctgttcaggtcagctttgctcctacaacactgggaaagaa

SEQ ID NO: 194035 - DNA, 964 bp, Homo Sapiens
ctttgtacaaaaaagttggctgaaagccggaagggggcaagacgggttcagttcgtcatggggctgtttggaaagacccaggagaagccgcccaaagaactggtcaatgagtggtcattgaagataagaaaggaaatgagagttgttgacaggcaaataagggatatccaaagagaagaagaaaaagtgaaacgatctgtgaaagatgctgccaagaagggccagaaggatgtctgcatagttctggccaaggagatgatcaggtcaaggaaggctgtgagcaagctgtatgcatccaaagcacacatgaactcagtgctcatggggatgaagaaccagctcgcggtcttgcgagtggctggttccctgcagaagagcacagaagtgatgaaggccatgcaaagtcttgtgaagattccagagattcaggccaccatgagggagttgtccaaagaaatgatgaaggctgggatcatagaggagatgttagaggacacttttgaaagcatggacgatcaggaagaaatggaggaagaagcagaaatggaaattgacagaattctctttgaaattacagcaggggccttgggcaaagcacccagtaaagtgactgatgcccttccagagccagaacctccaggagcgatggctgcctcagaggatgaggaggaggaggaagaggctctggaggccatgcagtcccggctggccacactccgcagctaggggctgcctaccccgctgggtgtgcacacactcctctcaagagctgccattttatgtgtctcttgcactacacctctgttgtgaggactaccattttggagaaaggttctgtttgtctcttttcattctctgcccaggttttgggatcgcaaagggattgttcttataaaagtggcataaataaatgcatcatttttaggagtatagacagatatatcttattgtggggagggggaaa

SEQ ID NO: 194036 - DNA, 2245 bp, Homo Sapiens; identical to SEQ ID NO: 186955

SEQ ID NO: 194037 - DNA, 1813 bp, Homo Sapiens; identical to SEQ ID NO: 181197

SEQ ID NO: 194038 - DNA, 2271 bp, Homo Sapiens; identical to SEQ ID NO: 186959

SEQ ID NO: 194039 - DNA, 1056 bp, Homo Sapiens
ttggcctagaaagagcatcatctttgagccttatccctctgtggtggaccccactgatcccaagactctggcctttaaccctaagaagaagaattatgagcggcttcagaaagctctggatagtgtgatgtctattcgggagatgacccagggctcatatttggaaatcaagaaacagatggacaagttggatcccctggcccatcctctcctgcagtggatcatctctagcaacaggtcacacattgtcaaactacctctcagcaggctgaagttcatgcacacctcacaccagttcctcctgctgagcagccctcctgccaaggaggctcggttccggaccgccaagaagctctatggcagcacctttgccttccatgggtcccacattgagaactggcattcgatcctgcgcaatgggctggtcaatgcatcctacaccaaactgcaggaatgggaaaaggacagcacaggatgccctccaaggatgagctggtccagagatacaacaggatgaataccatcccccagacccgatccattcagtcacggttcctgcagagtcggaatctaaactgtatagcactttgtgaagtgattacatctaaggacctccagaagcatgggaacatctgggtgtgccctgtgtccgaccatgtctgcacaagattcttctttgtatatgaggatggtcaggtgggcgatgccaacattaatactcaggaccccaagatacagaaggaaatcatgcgtgtgatcggaactcaggtttacacaaactgagggggccccagccctcgtaccacccctgttaccccaggatccatctgccctcataaaagtgttcaggtacagcagctgaggctgccctgaggaatcaaggggccattaccaaggggcaggaaaaggatatgtaagaggtggccttcatggtagagcttgacccaagaactactccacattcggatggcccagactgactccatcccctgactttccctttgacttcaccctgtttgtaaataaaacaataaaatggaaggtgctgtggactgg

SEQ ID NO: 194040 - DNA, 786 bp, Homo Sapiens
caaaaaagttggatgaagtcagaactggaagccatatttggggtcagtgataaatttgttgattttcagatgaatttattgaatttgaaatgtcaggataatgggcaaataaaaatactgaaccagcagttgaggatttaggatgggagtagctgaagcaccgaagagaggatgggactggaaatagagacgtagagtttaaccacacacacacatcttgcatgcctgtgactgtatccatgtgcatgtccatcactaggtgtacctgtccatcttcatgtcctgtgtgggtgagaatgggtgggaatggcagtcttgggagtgttcctgggaacctcatatcataaggagacatgtattctaccctgccttacagtgggtcccacattgagaactggcattcgatcctgcgcaatgggctggtcaatgcatcctacaccaaactgcaggaatgggaaaaggacagcacaggatgccctccaaggatgagctggtccagagatacaacaggatgaataccatcccccagacccgatccattcagtcacggttcctgcagagtcggaatctaaactgtatagcactttgtgaagtgattacatctaaggacctccagaagcatgggaacatctgggtgtgccctgtgtccgaccatgtctgcacaagattcctctttgtatatgaggatcgtcaggtgggcgatgccaacattaatactcaggaccccaagatacacaaggaaatcatgcgtgtgatcggaactcaagtttacacaaaactgaaggg

SEQ ID NO: 194041 - DNA, 2471 bp, Homo Sapiens; identical to SEQ ID NO: 186962
  misc_feature (2134)..(2142): n is a, c, g, or t

SEQ ID NO: 194042 - DNA, 1056 bp, Homo Sapiens; identical to SEQ ID NO: 186964

SEQ ID NO: 194043 - DNA, 711 bp, Homo Sapiens; identical to SEQ ID NO: 181202
  misc_feature (516)..(524): n is a, c, g, or t

SEQ ID NO: 194044 - DNA, 1178 bp, Homo Sapiens; identical to SEQ ID NO: 186973
  misc_feature (75)..(107): n is a, c, g, or t

SEQ ID NO: 194045 - DNA, 851 bp, Homo Sapiens; identical to SEQ ID NO: 181204

SEQ ID NO: 194046 - DNA, 1467 bp, Homo Sapiens; identical to SEQ ID NO: 186980
  misc_feature (1051)..(1059): n is a, c, g, or t

SEQ ID NO: 194047 - DNA, 1024 bp, Homo Sapiens; identical to SEQ ID NO: 181206

SEQ ID NO: 194048 - DNA, 748 bp, Homo Sapiens
ttgtacaaaaaagttggggattatatcccataccgagtcctctttgaccaattatttgacattcctaaagaaaggaagaatgcagagtataagagatacctagagatgctgcttgagtaccttcaggattacacagatagagtgaagcctctccaagatcagaatgaactttttgggaagattcaggctgagtttgagaagaaatgggagaatgggacctttcctggatggccgaaagagacaagcagtgccctgacccatgctggagcccatcttgacctctctgcattctcctcctgggaggagttggcttctctgggtttggacagattgaaatctgctctcttagctttaggcttgaaatgtggcgggaccctagaagagcgagcccagagactattcagtaccaaaggaaagtccctggagtcacttgatacctctttgtttgccaaaaatcccaagtcaaagggcaccaagcgagacactgaaaggaacaaagacattgcttttctagaagcccagatctatgaatatgtagagattctcggggaacagcgacatctcactcatgaaaatgtacagcgcaagcaagccaggacaggagaagagcgagaagaataggaagaaaagcacatcagtgagagtgagagtgaacattaagagaacgagatcatttacaaccccaaaaacctgccacttggctgggatggtaaacctattccttactggatgtataagcttcatggcc

SEQ ID NO: 194049 - DNA, 1641 bp, Homo Sapiens; identical to SEQ ID NO: 186985

SEQ ID NO: 194050 - DNA, 853 bp, Homo Sapiens; identical to SEQ ID NO: 181211
  misc_feature (665)..(707): n is a, c, g, or t

SEQ ID NO: 194051 - DNA, 867 bp, Homo Sapiens
actttgtacaaaaaagttggcttcaactcagttaccttcctcaccttttggagactatcgacaatatcagtaggacttctttcctaggatttctttaacagaacgagttgtggttcgagaaggatttcagaagatcaagttacagtctgtttttaaaaccataggtgggacagctatggccaataggctataaagagacatttagcacttttttctatttaaaggaacaagcggggaagggtgctaaaagataatacgtttatttattcacacttgaattgcatttgtgatcaaaataaatgtttaaatcgctaaaggaaaatacagtaagtgcttgaaagatgaaggaccaaaaggccaaaaaacagtgaaatatgatcatcatttccttgcggacttctctgcctggttttgtgtgttctgttattcaaacaataaaaagctggtggaacttactctttcttttaagataagttgtagacttcgatgtttcatgctcatgtacttcaaataatgcatgttttatagttagtccctcatcacttgaagtgacttctgagaattatgcagagtcaacatggatcatttcacagtgagatgctttatggattgaaggatatggtaaaatgtttatagtttactttgaaagtaaaatatactatgtcttggttttgaggatattggatacaaaactctcttcctttagggctactgagtcttgattcctgatcatcagaaatttcaccagaaacaacttgcttccaatatacccaattctatatgaagaattcatggaagagtgtactggcactggaagagtttagtgtttcttgtatgcttgaaaataagtatgtactgttttgaatg

SEQ ID NO: 194052 - DNA, 1729 bp, Homo Sapiens; identical to SEQ ID NO: 186986

SEQ ID NO: 194053 - DNA, 1611 bp, Homo Sapiens; identical to SEQ ID NO: 181215
  misc_feature (117)..(130): n is a, c, g, or t
  misc_feature (848)..(1099): n is a, c, g, or t
  misc_feature (1110)..(1124): n is a, c, g, or t
  misc_feature (1140)..(1154): n is a, c, g, or t

SEQ ID NO: 194054 - DNA, 1025 bp, Homo Sapiens; identical to SEQ ID NO: 186994

SEQ ID NO: 194055 - DNA, 1158 bp, Homo Sapiens
tttgtacaaaaaagttggctttaataccttccctaggaggtgtcacaatgtagggtaccaagggttggattgtgatggggcatggtcgtacactgctcattgtgccacaggtgtgactggaaagcatgatattctagggttggtttgtagattcaaataatccagaaatatacctaataagattgagtgaaaaatttgagtcaaatatctagggcattcacagagtagctgtgagttcttggtaatgtgaaaaaggccttgtttttcagaaactcctgggtttcctgttaaaaaatcttaaagcccaaccttaggaatatagtgccccaaaaggcggatgcttcttccattatcttattttctttgatactttatttaattagatgtttataaagaaatgggtttatttttccagcataaacctcagaatttaaggaaagaaaatgatgtctgttgttatagttcattgttttgcctactcagcagaagtgatgactcttaaaaattggctttgaccaaagttctcttgttttcagggaaagaacataaaagctttttgaactacagcctttttaaaagagggatgggaggatattacagtaagaaattaggctttctaaaagtatgaaacatccttcaactgggctctcttgttaataggacatcatatggtaatagactggtttgactatattgttagctgccacagtaagcaggtcattgtataggtaaatgcctgcacccataattttctagtaatagccacgaccaatttattaacagtcagggcctatccttgcctgtagttctcagtcactggatgcacaaaatcactgtgtaacattggctcacttggtgagcatagggttgactgataaaatgtttaattcccttgctagcttgtgagaagaatgagttgatgacatgctccataccagtggctagatggagtattaaggtggagcagaaaagaagtgagaacatcttgattcccctttcttttacttgatggtgtttatgaacatgccgtagtgcctttatggccagtttgagtcctgcctactttgacttttacgttcccattcctgtgttacccccttcctcccgatttgttcacctattttgtgctttaaatctcaataaaatacttactgaggg

SEQ ID NO: 194056 - DNA, 1459 bp, Homo Sapiens; identical to SEQ ID NO: 186996
  misc_feature (45)..(58): n is a, c, g, or t

SEQ ID NO: 194057 - DNA, 1576 bp, Homo Sapiens; identical to SEQ ID NO: 186997

SEQ ID NO: 194058 - DNA, 1229 bp, Homo Sapiens
  misc_feature (237)..(274): n is a, c, g, or t
  misc_feature (965)..(1019): n is a, c, g, or t
ttggcgggcagtgatggcggctggtgatggggacgtgaagctaggcaccctggggagtggcagcgagagcagcaacgacggcggcagcgagagtccaggcgacgcgggagcggcagcggaagggggaggctgggcggcggcggcgttggcgcttctgacggggggcggggaaatgctgctgaacgtggcgctggtggctctggtgctgctgggggcctaccggctgtgggtgcgctnnnnnnnnnnnnnnnnnnnnnnnnnnnnnnnnnnnnnngaggagagccccgccacctctctgcctcgcatgaagaagcgggacttcagcttggagcagctgcgccagtacgacggctcccgcaacccgcgcatcctgctcgcggtcaatgggaaagtcttcgacgtgaccaaaggcagcaagttctacggcccggcgggtccatatggaatatttgctggtagggatgcctccagaggactggccacattttgcctagataaagatgcacttagagatgaatatgatgatctctcagatttgaatgcagtacaaatggagagtgttcgagaatgggaaatgcagtttaaagaaaaatatgattatgtaggcagactcctaaaaccaggagaagaaccatcagaatatacagatgaagaagataccaaggatcacaataaacaggattgaactttgtaaacaaccaaagtcaggggccttcagaactgcaattcttactccctttcacagactgtccggagtctttgggtttgattcacctgctgcgaaaaacattcaacaaattgtgtacaagataaattaatctcactatgaagatttgaataactagacattatttatgctgccaaactcatttgttgcagttgtttgtaatgtctagtggggcttcatcatcctgaaaagaaggagacagggatttttttaaagagcaagaaagtcacaatattannnnnnnnnnnnnnnnnnnnnnnnnnnnnnnnnnnnnnnnnnnnnnnnnnnnnnnaaaatatattgaagacaaccagatatgtatttgctactcaagtgtacagatctcctcaagaaacatcaagggactcctgtgtcacatactgtgtttttattttaacatgggtgagggaggcgacctgatcacggaggtgggggtacacatcaatttgagttgttcagctactgaaacattaaaatgtgaattcccaaacttttctttttg

SEQ ID NO: 194059 - DNA, 944 bp, Homo Sapiens; identical to SEQ ID NO: 187000
  misc_feature (462)..(516): n is a, c, g, or t

SEQ ID NO: 194060 - DNA, 1315 bp, Homo Sapiens; identical to SEQ ID NO: 187004
  misc_feature (234)..(248): n is a, c, g, or t
  misc_feature (828)..(878): n is a, c, g, or t

SEQ ID NO: 194061 - DNA, 1469 bp, Homo Sapiens; identical to SEQ ID NO: 187005
  misc_feature (1268)..(1279): n is a, c, g, or t

SEQ ID NO: 194062 - DNA, 722 bp, Homo Sapiens
  misc_feature (365)..(377): n is a, c, g, or t
ttggggtctggtatacctagaaaaaaggtaaactaattacaattttgctttccaacctcctcaagtatttaaaagacccaactcagcccatcttagaggccttggacaaggacagctcaccaaaggatgacgtctgggactctgtgtccattatctcgtttccggaaaaggagcaagaagatgttctccaaacgctttgaaccaaagcatgggcctagcccactggctccctggaagagatcaagccatcggagctgctagagttctgtctggactttccagagaccagtattcccttttgctgcctctaaaaggcctgtccctgcagacatgagagacagcaggtctcatgggggtgacaagcnnnnnnnnnnnnncttaaagaattttcaaaatcaaattccagaatgattttacggagatatcccaggaaaattaaggcttctcttaaacactaaaaaggcatgtaattgcttgttagcaaaatggatatgacacatctctgatacttttttcattattggttgggctgagcagtcagaaaacctggtcgtcgtcttgactttggcaaatgagccggagccccttgggcaggtcaaacaacctgtcccagcgagggacaccgagtggcccttcatgtacatccagggtgtgctggcttaaaatgtaattaatcttgtgaaatactcctagtaatttaagattttgttattaaactggaa

SEQ ID NO: 194063 - DNA, 1119 bp, Homo Sapiens; identical to SEQ ID NO: 187006
  misc_feature (155)..(163): n is a, c, g, or t
  misc_feature (871)..(879): n is a, c, g, or t

SEQ ID NO: 194064 - DNA, 968 bp, Homo Sapiens
tggattctctcttggtttgcttcttaggcctgcacagaagtagtcatgcccttttgtactaatggtgtcgatgacatgtttgaacctcactcatggaacttaaaggaactttctgatgactgttttcaacagtggggtgtgagaccaaggccctcctggatcactactatgtatggaggcaaaaacattagttcacacacaaacattgttttcagcaatggtgaactagacccctggtcaggaggtggagtaactaaggatatcacagacactctggttgcagtcaccatctcagagggggcccaccacttagatctccgcaccaagaatgccttggatcctatgtctgtgctgttagcccgctccttggaagttagacatatgaagaattggatcagagatttctatgacagtgcgggaaagcagcactgagaaacttttgattgttttcaatttcttcttttatgttcacaccaccacattcccattcactttgattttctacatgtaattaccttcttttgtttatcattagatttgatggggccaaagttgagatagaatagagggtgatgacggtaagagcaagtgtcccatgaatgtgatttcctgggttctcactgtctttgcacaacgtctaggaagaatcttcttgatagctctcccacaccatcagtggccctcataactggagtagagttcctggttgcttttcataagagggagagttactttctttgtatctctgcaagcagagatttctctttggttttgaggttgaagtgtctttggcccatttgtaagtccccatccctaccctacacaaagtaaaagcagaagatagataaaaaatgatgtaattgcagctggtaggatgtctggtgccaatccaggaagtgagagccatttcttttgtaccggatttaatgactttgaactgtgctgtaaataaataatacagctggacc

SEQ ID NO: 194065 - DNA, 1616 bp, Homo Sapiens; identical to SEQ ID NO: 187009

SEQ ID NO: 194066 - DNA, 844 bp, Homo Sapiens; identical to SEQ ID NO: 181220

SEQ ID NO: 194067 - DNA, 1025 bp, Homo Sapiens; identical to SEQ ID NO: 187014

SEQ ID NO: 194068 - DNA, 964 bp, Homo Sapiens
ttggggtggcgggtccgtgctgctcgggggcttctccatccaggtccctggagttcctggtccctggagctccgcacttggcggcgcaacctgcgtgaggcagcgcgactctggcgactggccggccatgccttcccgggctgaggactatgaagtgttgtacaccattggcacaggctcctacggccgctgccagaagatccggaggaagagtgatggcaagatattagtttggaaagaacttgactatggctccatgacagaagctgagaaacagatgcttgtttctgaagtgaatttgcttcgtgaactgaaacatccaaacatcgttcgttactatgatcggattattgaccggaccaatacaacactgtacattgtaatggaatattgtgaaggaggggatctggctagtgtaattacaaagggaaccaaggaaaggcaatacttagatgaagagtttgttcttcgagtgatgactcagttgactctggccctgaaggaatgccacagacgaagtgatggtggtcataccgtattgcatcgggatctgaaaccagccaatgttttcctggatggcaagcaaaacgtcaagcttggagactttgggctagctagaatattaaaccatgacacgagttttgcaaaaacatttgttggcacaccttattacatgtctcctgaacaaatgaatcgcatgtcctacaatgagaaatcagatatctggtcattgggctgcttgctgtatgagttatgtgcattaatgcctccatttacagcttttagccagaaagaactcgctgggaaaatcagagaagcaaattcacgcgaattccataccgttactctgatgaattgaatgaaattattacgaggatgttaaacttaaaggattaccatcgaccttctgttgaagaaattcttgagaaccctttaatagcagatttggttgcagacgagcaaa

SEQ ID NO: 194069 - DNA, 658 bp, Homo Sapiens
cataaaaaacaactttgtacaaaaaagttggggctggttgtggatccttgttcctctcctgaccccatctggctgctgccccgtctcccacccctgtccccggggctcgctggccctgcactccgccttagtcctggggccggcgacacagtgggggctcctcacttgctgcagtgtcatagcaataaaatgtgattcttggggtccccccagggagctgcccatggctttatttatgaacctggttttcgggagtcaggggaggagatgactttgcttctgtgcacagccccgtcttccaggagccacgactcagaagaaaagggtgctcagacttttgttatacacatttgctttgtgtaaataaatgtttacaattttatatgaaagatggaataagcgctagagcttccaactgtatattttttacttttatagattttaaaactatgatcctttatatgtgtgttttgggggagctatgataagttttatggcaaacggttggtattgttaactttttattgtcatcaaaagttcataaaagtcctattaatccccatattcttctactgcccttaactctggtatacaccaaaaagaaatctttactttccttgttttatcattataaaaataaagtattttgctagtatgg

SEQ ID NO: 194070 - DNA, 972 bp, Homo Sapiens; identical to SEQ ID NO: 187025

SEQ ID NO: 194071 - DNA, 1123 bp, Homo Sapiens; identical to SEQ ID NO: 181225

SEQ ID NO: 194072 - DNA, 889 bp, Homo Sapiens
ttgatgagcaatgctttttcataatagagaactttgtacaaaaaagttggtggcggctgtgtcggtgtatgctccaccagttggaggcttctcttttgataactgccgcaggaatgccgtcttggaagccgattttgcaaagaggggatacaagcttccaaaggtccggaaaactggcacgaccatcgctggggtggtctataaggatggcatagttcttggagcagatacaagagcaactgaagggatggttgttgctgacaagaactgttcaaaaatacacttcatatctcctaatatttattgttgtggtgctgggacagctgcagacacagacatgacaacccagctcatttcttccaacctggagctccactccctctccactggccgtcttcccagagttgtgacagccaatcggatgctgaagcagatgcttttcaggtatcaaggttacattggtgcagccctagttttagggggagtagatgttactggacctcacctctacagcatctatcctcatggatcaactgataagttgccttatgtcaccatgggttctggctccttggcagcaatggctgtatttgaagataagtttaggccagacatggaggaggaggaagccaagaatctggtgagcgaagccatcgcagctggcatcttcaacgacctgggctccggaagcaacattgacctctgcgtcatcagcaagaacaagctggattttctctcgcccatacacagtgcccaacaagaaagggaccaggcttggccggtacaggtgtgagaaagagactactgcagtcctcactgagaaaatcactcctctggagattgaggtgctggaagaaacagtccaaacaatggacactttcctgaatgg

SEQ ID NO: 194073 - DNA, 1244 bp, Homo Sapiens; identical to SEQ ID NO: 187027

SEQ ID NO: 194074 - DNA, 1205 bp, Homo Sapiens; identical to SEQ ID NO: 181227
  misc_feature (277)..(289): n is a, c, g, or t

SEQ ID NO: 194075 - DNA, 1342 bp, Homo Sapiens; identical to SEQ ID NO: 187034
  misc_feature (371)..(379): n is a, c, g, or t
  misc_feature (457)..(477): n is a, c, g, or t

SEQ ID NO: 194076 - DNA, 909 bp, Homo Sapiens; identical to SEQ ID NO: 187036
  misc_feature (110)..(149): n is a, c, g, or t
  misc_feature (645)..(670): n is a, c, g, or t

SEQ ID NO: 194077 - DNA, 1338 bp, Homo Sapiens; identical to SEQ ID NO: 187038
  misc_feature (94)..(108): n is a, c, g, or t

SEQ ID NO: 194078 - DNA, 1070 bp, Homo Sapiens
ttggttatcatcttaatgacaaagggaataatgaactagaaaccagcaagtgaaagtgtttatttcctattttcttaaacctgatatatattttataacactatttaagttatggctttttctaaaccagtgctttttaaggtaatagttataaatgcaaagagaaaggaagcaggcccgttggaagtggttgtgacaaccccagcaatgtggagaagcctggggcttgccctggctctctgtctcctcccatcgggaggaacagagagccaggaccaaagctccttatgtaagcaacccccagcctggagcataagagatcaagatccaatgctaaactccaatggttcagtgactgtggttgctcttcttcaagccagctgatacctgtgcatactgcaggcatctaaattagaagacctgcgagtaaaactgaagaaagaaggatattctaatatttcttatattgttgttaatcatcaaggaatctcttctcgattaaaatacacacatcttaagaataaggtttcagagcatattcctgtttatcaacaagaagaaaaccaaacagatgtctggactcttttaaatggaagcaaagatgacttcctcatatatgatagatgtggccgtcttgtatatcatcttggtttgcctttttccttcctaactttcccatatgtagaagaagccattaagattgcttactgtgaaaagaaatgtggaaactgctctctcacgactctcaaagatgaagacttttgtaaacgtgtatctttggctactgtggataaaacagttgaaactccatcgcctcattaccatcatgagcatcatcacaatcatggacatcagcaccttggcagcagtgagctttcagagaatcagcaaccaggagcaccaaatgctcctactcatcctgctcctccaggccttcatcaccaccataagcacaagggtcagcataggcagggtcacccagagaaccgagatatgccagccaagtgaagatttacaagattacaaaagaaactctgtcgaaagagatgtataaatccattactctgtaa

SEQ ID NO: 194079 - DNA, 936 bp, Homo Sapiens
ctttgtacaaaaaagttgggcaaagagaaaggaagcaggcccgttggaagtggttgtgacaaccccagcaatgtggagaagcctggggcttgccctggctctctgtctcctcccatcgggaggaacagagagccaggaccaaagctccttatgtaagcaacccccagcctggagcataagagatcaagatccaatgctaaactccaatggttcagtgactgtggttgctcttcttcaagccagctgatacctgtgcatactgcaggcatctaaattagaagacctgcgagtaaaactgaagaaagaaggatattctaatatttcttatattgttgttaatcatcaaggaatctcttctcgattaaaatacacacatcttaagaataaggtttcagagcatattcctgtttatcaacaagaagaaaaccaaacagatgtctggactcttttaaatggaagcaaagatgacttcctcatatatgatagatgtggccgtcttgtatatcatcttggtttgcctttttccttcctaactttcccatatgtagaagaagccattaagattgcttactgtgaaaagaaatgtggaaactgctctctcacgactctcaaagatgaagacttttgtaaacgtgtatctttggctactgtggataaaacagttgaaactccatcgcctcattaccatcatgagcatcatcacaatcatggacatcagcaccttggcagcagtgagctttcagagaatcagcaaccaggagcaccaaatgctcctactcatcctgctcctccaggccttcatcaccaccataagcacaagggtcagcataggcagggtcacccagagaaccgagatatgccagcaagtgaagatttacaagatttacaaaagaagctctgtcgaaagagatgtataaatcaattactctgtaattg

SEQ ID NO: 194080 - DNA, 1231 bp, Homo Sapiens; identical to SEQ ID NO: 187039
  misc_feature (1112)..(1125): n is a, c, g, or t

SEQ ID NO: 194081 - DNA, 1103 bp, Homo Sapiens
ttggagcggttgtgtgaagatggagtttcccggaggaaatgacaattacctgacgatcacagggccttcgcaccccttcctgtcaggggccgagacattccatacaccaagcttgggtgatgaggaatttgaaatcccacctatctccttggattctgatccctcattggctgtctcagatgtggttggccactttgatgacctggcagacccttcctcttcacaggatggcagtttttcagcccagtatggggtccagacattggacatgcctgtgggcatgacccatggcttgatggagcagggcggggggctcctgagtgggggcttgaccatggacttggaccactctataggaactcagtatagtgccaacccacctgttacaattgatgtaccaatgacagacatgacatctggcttgatggggcatagccagttgaccaccattgatcagtcagaactgagttcccagctgggtttgagcctagggggtggcaccatcctgccacctgcccagtcacctgaagatcgtctttcaaccaccccttcacctactagttcacttcacgaggatggtgttgaggatttccggaggcaacttcccagccagaagacagtcgtggtggaagcagggaaaaagcagaaggccccaaagaagagaaaaaagaaagatcctaatgaacctcagaaaccagtttcagcatatgctttattctttcgtgatacacaggctgccatcaagggacagaatcctaatgccacttttggtgaggtttcaaaaattgtggcctccatgtgggatagtcttggagaggagcaaaaacaggtatataagaggaaaactgaggctgccaagaaagagtatctgaaggcactggctgcttacaaagacaaccaggagtgtcaggccactgtggaaacagtggaattggatccagcaccaccatcacaaactccttctccacctcctatggctactgttgacccagcatctccagcaccagcttcaatagagccccctgccctgtccccatccattgttgttaactccaccctttcatcctatgtggcaaaccaggcatcttctggagctgggggtc

SEQ ID NO: 194082 - DNA, 879 bp, Homo Sapiens
tttgtacaaaaaagttggatcatctctggcctaatgattacacaaaaccttttaaaattttaaaaaattatttctaattctataaataaactctgcagttgtacagccactgtacagctaacatctcaacactggaaatgaggctggtttcttccagtttggctcagattcttcagggaagcccagttaagacaaacagctctctatactcaatccttactttgctgagaagatacaggcctgcccactcgctcccacctgctcttcatgaggagtcctttattcctgcatgtttcctgttctttgggacctttaggagctaacctccacagatgctgatagtctgtagagtcaggaataccatgtaacatgttgaagtagactaaagattagttctttggcaatagcccagtctggacttactatgtacttttgaaaatacaactgcttatttgtaaactctgtaattaggaccttttgctatttgagttatattcctttctaacttcaaacgtctgcattcatgtataatagccattttatgcacagatgaggtgattcccacacttcttttcgcagatgtttcattatctggatgagtgtattacataataaatttgaataatggtagtcttccaaatgacaaaaagcaagctagttgatttgtcaattttgagtttaaatgttttgactgcttatcagcaaaaaaaatcaaagaatagcatactaatattaatggaaatgcagagtatatttaattggcatgattttttcatggatgtgtgcttcatttgatctattgtatgtagctcgtgatcacattttctgttggttaacattgttcctagcttatatgatggaattaaatatattctgtgt

SEQ ID NO: 194083 - DNA, 1144 bp, Homo Sapiens; identical to SEQ ID NO: 187046

SEQ ID NO: 194084 - DNA, 825 bp, Homo Sapiens; identical to SEQ ID NO: 187048

SEQ ID NO: 194085 - DNA, 1229 bp, Homo Sapiens; identical to SEQ ID NO: 187050

SEQ ID NO: 194086 - DNA, 1275 bp, Homo Sapiens; identical to SEQ ID NO: 187051

SEQ ID NO: 194087 - DNA, 924 bp, Homo Sapiens
ttggcccaatcctaagccctcaggaggttgtgtcttgtagccagtatgctcaaggaaagtacgcccaagattttgggctggtggaagaagcttgcttcccctacacaggcactgattctccatgcaaaatgaaggaagactgctttcgttattactcctctgagtaccactatgtaggaggtttctatggaggctgcaatgaagccctgatgaagcttgagttggtccatcatgggcccatggcagttgcttttgaagtatatgatgacttcctccactacaaaaaggggatctaccaccacactggtctaagagaccctttcaacccctttgagctgactaatcatgctgttctgcttgtgggctatggcactgactcagcctctgggatggattactggattgttaaaaacagctggggcaccggctggggtgagaatggctacttccggatccgcagaggaactgatgagtgtgcaattgagagcatagcagtggcagccacaccaattcctaaattgtagggtatgccttccagtatttcataatgatctgcatcagttgtaaaggggaattggtatattcacagactgtagactttcagcagcaatctcagaagcttacaaatagatttccatgaagatatttgtcttcagaattaaaactgcccttaattttaatatacctttcaatcggccactggccatttttttctaagtattcaattaagtgggaattttctggaaaatggtcagctatgaagtaatagagtttgcttaatcatttgtaattcaaacatgctatattttttaaaatcaatgtgaaaacatagacttatttttaaattgtaccatcacaagaaaataatggcaataattatcaaaacttttaaaatagatgctcctatttttaaaataaagtttt

SEQ ID NO: 194088 - DNA, 870 bp, Homo Sapiens
ttgggtttccggacctcggcgctcactgttcggagccgagctgtcagcgcttggattttctgccgcttaagtgtgatgcctgctcaggcatcttctgcgcagaccatgtggcctacgcccagcatcactgtggatctgcttaccaaaaggtgagggggcgatcctcagggtgaaagcaggcagatggagaatgcgtgcagaatcccccaaatctgtgtctcacgtttcttctcccttttgtccttctgaggctgtcagtgctgggaaacactgtttttttgcgtgtttgtggtgggtcatatccaagttctttcaggaccagagatttgttggactggagtgggccacagactgacccttgctccttgactacaggatatccaggtacctgtgtgccctctctgtaatgtgcctgtgcctgtggccagaggggagccccctgaccgtgctgtgggagagcacattgacagagactgtcgctctgatccagcacagcaaaaacgtaaggtaaacattgtaggggtcagccacaacccagctgggactacggatgcctggaaacccaaacagctaatcagagtctcagcagagacaaccttctcacttcacctcagatcttcaccaataagtgtgaacgcgctggctgccggcagcgagaaatgatgaaactgacctgtgaacgctgtagccgaaacttctgcatcaagcaccggcatccactggaccatgattgctctggggaggggcacccaaccagccgggcaggacttgctgccatctccagagcacaagctgtggcttctacaagcactgtccccagcccaagtcaaaccatgccttcctgtacctctcccagcaggtggcctgccc

SEQ ID NO: 194089 - DNA, 290 bp, Homo Sapiens; identical to SEQ ID NO: 181241

SEQ ID NO: 194090 - DNA, 1432 bp, Homo Sapiens; identical to SEQ ID NO: 181246
  misc_feature (159)..(170): n is a, c, g, or t
  misc_feature (318)..(326): n is a, c, g, or t

SEQ ID NO: 194091 - DNA, 966 bp, Homo Sapiens; identical to SEQ ID NO: 187059
  misc_feature (279)..(290): n is a, c, g, or t

SEQ ID NO: 194092 - DNA, 1561 bp, Homo Sapiens; identical to SEQ ID NO: 187060
  misc_feature (909)..(970): n is a, c, g, or t
  misc_feature (1306)..(1317): n is a, c, g, or t

SEQ ID NO: 194093 - DNA, 1980 bp, Homo Sapiens; identical to SEQ ID NO: 181251
  misc_feature (1257)..(1294): n is a, c, g, or t
  misc_feature (1368)..(1415): n is a, c, g, or t

SEQ ID NO: 194094 - DNA, 1241 bp, Homo Sapiens; identical to SEQ ID NO: 187074

SEQ ID NO: 194095 - DNA, 1675 bp, Homo Sapiens; identical to SEQ ID NO: 187078
  misc_feature (1270)..(1292): n is a, c, g, or t

SEQ ID NO: 194096 - DNA, 1197 bp, Homo Sapiens; identical to SEQ ID NO: 187079

SEQ ID NO: 194097 - DNA, 840 bp, Homo Sapiens; identical to SEQ ID NO: 187081
  misc_feature (518)..(574): n is a, c, g, or t
  misc_feature (648)..(688): n is a, c, g, or t
  misc_feature (753)..(762): n is a, c, g, or t

SEQ ID NO: 194098 - DNA, 965 bp, Homo Sapiens; identical to SEQ ID NO: 187087

SEQ ID NO: 194099 - DNA, 975 bp, Homo Sapiens; identical to SEQ ID NO: 187095

SEQ ID NO: 194100 - DNA, 1837 bp, Homo Sapiens; identical to SEQ ID NO: 187097
  misc_feature (1527)..(1538): n is a, c, g, or t

SEQ ID NO: 194101 - DNA, 1201 bp, Homo Sapiens; identical to SEQ ID NO: 187098
  misc_feature (789)..(829): n is a, c, g, or t

SEQ ID NO: 194102 - DNA, 1098 bp, Homo Sapiens; identical to SEQ ID NO: 187099
  misc_feature (219)..(268): n is a, c, g, or t
  misc_feature (925)..(965): n is a, c, g, or t

SEQ ID NO: 194103 - DNA, 1017 bp, Homo Sapiens
tttgtacaaaaaagttggcttttatctgctgttagccagtgctttgcacacaagctctgcgccaatcacagggcaagtctccgctgctgtggaaaagaaccctgctgtttggcttaacacatctcaacccctctgcaaagcttttattgtcacagatgaagacatcaggaaacaggaagagcgagtacagcaagtacgcaagaaattggaagaagcactgatggcagacatcttgtcgcgagctgctgatacagaagagatggatattgaaatggacagtggagatgaagcctaagaatatgatcaggtaactttcgaccgactttccccaagagaaaattcctagaaattgaacaaaaatgtttccactggcttttgcctgtaagaaaaaaaatgtacccgagcacatagagctttttaatagcactaaccaatgcctttttagatgtatttttgatgtatatatctattattcaaaaaatcatgtttattttgagtcctaggacttaaaattagtcttttgtaatatcaagcaggaccctaagatgaagctgagcttttgatgccaggtgcaatctactggaaatgtagcacttacgtaaaacatttgtttcccccacagttttaataagaacagatcaggaattctaaataaatttcccagttaaagattattgtgacttcactgtatataaacatatttttatactttattgaaaggggacacctgtacattcttccatcgtcactgtaaagacaaataaatgattatattcacagactgattggaattctttctgttgaaaagcacacacaataaagaacccctcgttagccttcctctgatttacattcaactctgatccctgggccttaatttgacatggaggtggaggaagatagcgcatatatttgcagtatgaactattgcctctgggacgttgtgagaattgtgctttcaccagaatttctaagaatttctgctaaatatcacctagcatgtgtaattttttttcc

SEQ ID NO: 194104 - DNA, 2450 bp, Homo Sapiens; identical to SEQ ID NO: 187105

SEQ ID NO: 194105 - DNA, 674 bp, Homo Sapiens
  misc_feature (55)..(75): n is a, c, g, or t
ctttgtacaaaaaagttggcatggttgagaatcactgatcaagaaagtggggggnnnnnnnnnnnnnnnnnnnnncctcaatcctcagtaggaaggtagattacattaggtgaaattataggtaatctatgtatgtgctaatggggttggaaagaaccttacagagcatattacctgataaactggagtgggtttgggagaacaaactaataggattattgtgtctcctagttggtacctgggagcaattgacatgcccccttcagaaccttaactgttagtagcagtggctgtaacaacacaaaccagtgaccagagataacagcttttaggccaagctggcctgacggtatggctgcaggaagtgactgagcagtagcggtactcagccagaccaagacggagagggaagagtccacagctttctggaagctaaggcattctggtggtagaaaagtgtgccccaagccttcatggacgagttataggtcttaagattagtctcctcttgtttggattccatacttgctaaataacctgataataacctggttttccatgtaactgcctctaggaagaaaatgtactgttcatgctgacacagatatttcagtctgcatggtaaaagttctaaatcttactactaaataataaactggctggtttataatgtg

SEQ ID NO: 194106 - DNA, 965 bp, Homo Sapiens
ttggcgcagagccttggtacttggacctgaaccttgctccgagagggagtcctcgcggacgtcagccaagattccagaatgactactatcttgacttacccctttaaaaatcttcccactgcatcaaaatgggccctcagattttccataagacctctgagctgttcctcccagctacgagctgccccagctgtccagaccaaaacgaagaagacgttagccaaacccaatataaggaatgttgtggtggtggatggtgttcgcactccatttttgctgtctggcacttcatataaagacctgatgccacatgatttggctagagcagcgcttacgggtttgttgcatcggaccagtgtccctaaggaagtagttgattatatcatctttggtacagttattcaggaagtgaaaacaagcaatgtggctagagaggctgcccttggagctggcttctctgacaagactcctgctcacactgtcaccatggcttgtatctctgccaaccaagccatgaccacaggtgttggcttgattgcttctggccagtgtgatgtgatcgtggcaggtggtgttgagttgatgtccgatgtccctattcgtcactcaaggaaaatgagaaaactgatgcttgatctcaataaggccaaatctatgggccagcgactgtctttaatctctaaattccgatttaatttcctagcacctgagctccctgcggtttctgagttctccaccagtgagaccatgggccactctgcagaccgactggccgctgcctttgctgtttctcggctggaacaggatgaatatgcactgcgctctcacagtctagccaagaaggcacaggatgaaggactcctttctgatgtggtacccttcaaagtaccaggaaaagatacagttaccaaagataatggcatccgtccttcctcactggagcagatgggccaaactaaaacctg

SEQ ID NO: 194107 - DNA, 1160 bp, Homo Sapiens
gtaaaagtcatcagactttatatattttaattagtagtttttgtttttaaactttatcttaaagctgtccagaccaaaacgaagaagacgttagccaaacccaatataaggaatgttgtggtggtggatggtgttcgcactccatttttgctgtctggcacttcatataaagacctgatgccacatgatttggctagagcagcgcttacgggtttgttgcatcggaccagtgtccctaaggaagtagttgattatatcatctttggtacagttattcaggaagtgaaaacaagcaatgtggctagagaggctgcccttggagctggcttctctgacaagactcctgctcacactgtcaccatggcttgtatctctgccaaccaagccatgaccacaggtgttggcttgattgcttctggccagtgtgatgtgatcgtggcaggtggtgttgagttgatgtccgatgtccctattcgtcactcaaggaaaatgagaaaactgatgcttgatctcaataaggccaaatctatgggccagcgactgtctttaatctctaaattccgatttaatttcctagcacctgagctccctgcggtttctgagttctccaccagtgagaccatgggccactctgcagaccgactggccgctgcctttgctgtttctcggctggaacaggatgaatatgcactgcgctctcacagtctagccaagaaggcacaggatgaaggactcctttctgatgtggtacccttcaaagtaccaggaaaagatacagtcaccaaagataatggcatccgtccttcctcactggagcagatggccaaactaaaacctgcattcatcaagccctacggcacagtgacagctgcaaattcttctttcttgactgatggtgcatctgcaatgttaatcatggcggaggaaaaggctctggccatgggttataagccgacgcatatttgagggattttatgtatgtgtctcaggatccaaaagatcaactattacttggaccaacatatgctactccaaaagttctagaaaaggcacgattgaccatgaatgatattgatgcttttgaatttcatgaagctttctcgggtcagattttggcaaattttaaagccatggattctgattggtttgcagaaaactac

SEQ ID NO: 194108 - DNA, 970 bp, Homo Sapiens
actttgtacaaaaaagttgggaaccttgctccgagagggagtcctcgcggacgtcagccaagattccagaatgactactatcttgacttacccctttaaaaatcttcccactgcatcaaaatgggccctcagattttccataagacctctgagctgttcctcccagctacgagctgccccagctgtccagaccaaaacgaagaagacgttagccaaacccaatataaggaatgttgtggtggtggatggtgttcgcactccatttttgctgtctggcacttcatataaagacctgatgccacatgatttggctagagcagcgcttacgggtttgttgcatcggaccagtgtccctaaggaagtagttgattatatcatctttggtacagttattcaggaagtgaaaacaagcaatgtggctagagaggctgcccttggagctggcttctctgacaagactcctgctcacactgtcaccatggcttgtatctctgccaaccaagccatgaccacaggtgttggcttgattgcttctggccagtgtgatgtgatcgtggcaggtggtgttgagttgatgtccgatgtccctattcgtcactcaaggaaaatgagaaaactgatgcttgatctcaataaggccaaatctatgggccagcgactgtctttaatctctaaattccgatttaatttcctagcacctgagctccctgcggtttctgagttctccaccagtgagaccatgggccactctgcagaccgactggccgctgcctttgctgttttctcggctggaacaggatgaatatgcactgcgctctcacagtctagccaaaaagcacaggatgaaggactcctttctgatgtggtacccttcaaagtaccaggaaaagatacagttaccaaagataatggcatccgtccttcctcactggagcagatggccaaactaaaacctgcattcatcaagccc

SEQ ID NO: 194109 - DNA, 965 bp, Homo Sapiens
ttgggttacttgaggctcggttgggaagagatgggcagctctcaaaaaaggcacaaacaattgaaggatggataccatggcatatgttaaaagcgtgttgaaaggaaaataagaaagccaggaatctcaggatgaatcagtctagatcgagatcagatggtggcagtgaagaaaccttacctcaagaccataatcatcatgaaaatgagagaagatggcagcaagagcgtctccacagagaagaggcctattatcagtttattaatgaactcaatgatgaagattatcggcttatgagagaccataatcttttaggcacccctggagaaataacatcagaagaactgcaacagcggttagatggcgtcaaggaacaactagcatctcagcctgacttgagagatggaacgaattacagagactcagaagtccctagagaaagttcacatgaagattctcttctagaatggttgaacacctttcggcgcacaggaaatgcaactcgaagtggacaaaatgggaaccaaacttggagagctgtgagtcgaacaaacccgaacaatggagagtttcggtttagtttggaaatccacgtaaatcatgaaaatagaggatttgaaattcatggagaagattatacagacattccactttcagatagtaacagagatcatactgcaaataggcaacaaaggtcaactagtcctgtggctaggcgaacaagaagccaaacctcagtgaatttcaatggtagtagttccaacattccaaggactaggcttgcttcaagggggcaaaatccagctgaagatctttctcaacattgggaagttaagaaatggaattgggggagcagctggcattcctcgagctaacgcttcacgcactaatttcagtagtcacacaaaccaatcagtggtagtgaactcagcaaagggaggggcaacggtttggagcagcacatg

SEQ ID NO: 194110 - DNA, 671 bp, Homo Sapiens
ctttgtacaaaaaagttggcgagtgtgagctcctaggacatagcaagaacatccgcactgtggtgacaggcattgagatgttccacaagagcctggagagggccgaggccggagataacctcggggccctggtccgaggcttgaagcgggaggacttgcggcggggcctggtcatggtcaagccaggttccatcaagccccaccagaaggtggaggcccaggtttacatcctcagcaaggaggaaggtggccgccacaagccctttgtgtcccacttcatgcctgtcatgttctccctgacttgggacatggcctgtcggattatcctgcccccagagaaggagcttgccatgcccggggaggacctgaagttcaacctaatcttgcggcagccaatgatcttagagaaaggccagcgtttcaccctgcgagatggcaaccggactattggcaccggtctagtcaccaacacgctggccatgactgaggaggagaagaatatcaaatggggttgagtgtgcagatctctgctcagcttcccttgcgtttaaggcctgccctagccagggctccctcctgcttccagtaccctctcatggcataggctgcaacccaacatagggcagctagatggacatttcccctgctcggaaggttggcctgcctggctg

SEQ ID NO: 194111 - DNA, 729 bp, Homo Sapiens
actttgtacaaaaaagttggccctgagttaggcctgaagtctgtgcagaagctactggatgctgtggacacttacatcccagtgcccgcccgggacctggagaagcctttcctgctgcctgtggaggcggtgtactccgtccctggccgtggcaccgtggtgacaggtacactagagcgtggcattttaaagaagggagacgagtgtgagctcctaggacatagcaagaacatccgcactgtggtgacaggcattgagatgttccacaagagcctggagagggccgaggccggagataacctcggggccctggtccgaggcttgaagcgggaggacttgcggcggggcctggtcatggtcaagccaggttccatcaagccccaccagaaggtggaggcccaggtttacatcctcagcaaggaggaaggtggccgccacaagccctttgtgtcccacttcatgcctgtcatgttctccctgacttgggacatggcctgtcggattatcctgcccccagagaaggagcttgccatgcccggggaggacctgaagttcaacctaatcttgcggcagccaatgatcttagagaaaggccagcgtttcaccctgcgagatggcaacccggactattggcaccggtctagtcaccaacacgctggccatgactgaggaggagaggaatatcaaatggggttgagtgtgcagatctctgctcagcttcccttgcgt

SEQ ID NO: 194112 - DNA, 899 bp, Homo Sapiens
  misc_feature (159)..(195): n is a, c, g, or t
ttggcaacgagagccttcgctgactccaccgaagaggtgcgccactgggagccaccccagcgccaggcgcccgtccagggacacacacagtcttcactgtgctgcagccagatgaagtctctcagatgggtggggagggtcagctccttccagcgatcnnnnnnnnnnnnnnnnnnnnnnnnnnnnnnnnnnnnnaccatagtgcacatattccaggaaagtgtctttaaaaacaaaaacaaaccctgaaatgtatatttgggattatgataaggcaactaaagacatgaaacctcaggtatcctgctttaagttgataactccctctgggagctggagaatcgctctggtggatgggtgtacagatttgtatataatgtcatttttacggaaaccctttcggcgtgcataaggaatcactgtgtacaaactggccaagtgcttctgtagataacgtcagtggagtaaatattcgacaggccataacttgagtctattgccttgcctttattacatgtacattttgaattctgtgaccagtgatttgggttttattttgtatttgcagggtttgtcattaataattaatgcccctctcttacagaacactcctatttgtacctcaacaaatgcaaattttccccgtttgccctacgccccttttggtacacctggaggttgatttcctttttcatcgatggtactatttcttagtgttttaaattggaacatatcttgcctcatgaagctttaaattataattttcagtttctccccatgaagcgctctcgtctgacatttgtttggaatcgtgccactgctggtctgcgccagatgtaccgtcctttccatacgattttctgttgcaccttgtagtggattctgcatatcatctttcc

SEQ ID NO: 194113 - DNA, 389 bp, Homo Sapiens; identical to SEQ ID NO: 187130

SEQ ID NO: 194114 - DNA, 368 bp, Homo Sapiens
ctttgtacaaaaaagttgggtctggcccccccgacccacggcccacgacccaccgacccacgaatcggcccggccgtcgcgtgcaccatgtctggctcctccagcgtcgccgctatgaagaaagtggttcaacagctccggctggaggccggactcaaccgcgtaaaagtttcccaggcagctgcagacttgaaacagttctgtctgcagaatgctcaacatgaccctctgctgactggagtatcttcaagtacaaatcccttcagaccccaaaaagtctgttcctttttgtaataaaatgaatctttcaaaggtttcccaaaccactccttatgatcctgtgaatattccagagagctacatttgaa

SEQ ID NO: 194115 - DNA, 1495 bp, Homo Sapiens; identical to SEQ ID NO: 187134

SEQ ID NO: 194116 - DNA, 1747 bp, Homo Sapiens; identical to SEQ ID NO: 187135
  misc_feature (1605)..(1615): n is a, c, g, or t

SEQ ID NO: 194117 - DNA, 1275 bp, Homo Sapiens; identical to SEQ ID NO: 187137
  misc_feature (436)..(451): n is a, c, g, or t
  misc_feature (1142)..(1150): n is a, c, g, or t
  misc_feature (1194)..(1207): n is a, c, g, or t

SEQ ID NO: 194118 - DNA, 1181 bp, Homo Sapiens; identical to SEQ ID NO: 187138
  misc_feature (44)..(52): n is a, c, g, or t
  misc_feature (743)..(758): n is a, c, g, or t

SEQ ID NO: 194119 - DNA, 1944 bp, Homo Sapiens; identical to SEQ ID NO: 187141
  misc_feature (1548)..(1572): n is a, c, g, or t

SEQ ID NO: 194120 - DNA, 1581 bp, Homo Sapiens; identical to SEQ ID NO: 187142

SEQ ID NO: 194121 - DNA, 245 bp, Homo Sapiens; identical to SEQ ID NO: 187143

SEQ ID NO: 194122 - DNA, 1274 bp, Homo Sapiens; identical to SEQ ID NO: 187146

SEQ ID NO: 194123 - DNA, 910 bp, Homo Sapiens
tcccacgtatcacttaagaacaagggcattcattctgttacatgaccacaatacaatcagcacagatagatattaacattgagacaatgctctgatgtattggtatctactatgcagttcataatcaaataagggttttggtaacttgggatccataaatggtctgcaaggtcagcccctgtagacctgcacttagtgggtgccatttccctgtctcaggtgcctgctctactggtgatatttttcactggctctgttgctcacttagaattttttctcccagctgttgacattttattttctgcatagttctgaagctgcagcagttgttcttatgccttcttgattgtaaatttcatagaagctgtcaatttctaagggatttcatctcctttgatgcagccaggtcaatagctacaaacctatctgagaatgtctgccatcggcctcctctctgtctagaaaggtgtcttagtctctcagcactttgggaggttgagggtcctgacccgacctcattctgctatagccatcagtcccctgctgtggctttggggatcagaacttcccagctagggctcccactgttggactcaggggacggaggcaggctagctgaaggggcagtgcccatgagctgggccccccgcagagcaggctcctctctctgcctggcctccacacctctactggtctccacgcccttgcatgaggtgacaggagctgaaatcacacatcccaggggctgaggcagctgtctgatttggagacttgctctgtggcccagggatccgtgcctcagcccagcctcacagggagtggggaagagagggagtaaatcagtggggcttcccttgtccacaggttatttagaaaaacagaacataataaatataccaattctttcctt

SEQ ID NO: 194124 - DNA, 1479 bp, Homo Sapiens; identical to SEQ ID NO: 181273
  misc_feature (63)..(72): n is a, c, g, or t
  misc_feature (714)..(1018): n is a, c, g, or t

SEQ ID NO: 194125 - DNA, 1493 bp, Homo Sapiens; identical to SEQ ID NO: 181274

SEQ ID NO: 194126 - DNA, 1040 bp, Homo Sapiens; identical to SEQ ID NO: 181276

SEQ ID NO: 194127 - DNA, 919 bp, Homo Sapiens
ctttgtacaaaaaagttggcagcagcatcaagaaaatcgcagactttctcaactcgttcgatatgtcttgtcgttcaagacttgcaacactaaacgagaaattgacagcccttgaacggagaatagagtacattgaagctcgggtgacaaaaggtgagacactcacctagaacagtgccgtgctgctgctgggaagttgctttacacaacacaggccacatgggaaaggccccagcagccttcagctccttcctttctccttaaagagcaacagggcttattcttgtttttcttttttcaaaagtgtggcctttgggctctgccatctggggtgtggtgtggtatgtgggaagaagttcagaggaaccgttggaaacgacgttaggcattttaccttttcagtaacattttatacatctacttgtcaatgtatttgagacattcacagccaaaagcctgggactctttgtgaaggtcctcctcacctctatctttctttctctctctctcaaactttccttaaagttctcattgcctttgcactgcttctgtgaacagtctttgtctcctccccacctttggtgggaagtgcggggcagtcctggtcaagacactcatgccctggcaatgtggctgccagagaatgttgttgctaacccaccagtttcttgttgatttggagaggtcaaggccaggcccccacttggcttgaagggacattttcagacttttctttctgtcacttggagtgtctatgcctctcatatttccctaataaactcctcaactttttatctgactgctgtgattatggtgggggagaggagctagagatgggttcacttattgcacagaaatgtaatacatggcgttattattctaacataaaactttcgatgtagctgtttgattcaaagcc

SEQ ID NO: 194128 - DNA, 563 bp, Homo Sapiens; identical to SEQ ID NO: 181282

SEQ ID NO: 194129 - DNA, 908 bp, Homo Sapiens
ctttgtacaaaaaagttggatctgttgctgatgatcagaaacttatgatatgggacaccaggtccaataccacctccaagccgagtcacttggtggatgcgcacactgccgaagtcaactgcctctcattcaatccctacagcgaatttattctagccaccggctctgcggataagaccgtagctttatgggatctgcgtaacttaaaattaaaactccataccttcgaatctcataaagatgaaattttccaggtccactggtctccacataatgaaactattctggcttcaagtggtactgaccgccgcctgaatgtgtgggatttaagtaaaattggggaagaacaatcagcagaagatgcagaagatgggcctccagaactcctgtttattcatggaggacacactgctaagatttcagattttagctggaaccccaatgagccttgggtcatttgctcagtgtctgaggataacatcatgcagatatggcaaatggctgaaaatatttacaatgatgaagagtcagatgtcacgacatccgaactggagggacaaggatcttaaacccaaagtacgagaaatgtttctgttgaatgtaatgctacatgaatgcttgatttatcaagcgccaaaaaggcattgtatagtaggaaatgtaagtggggtggcttatggcttctttatcctctgattctagcactttcaagtgagctgttgcgtactgtatcatattgtagctattacggaagagaagaatgttgcttaagaaagaacatcaccattgattttaaatacaagtaacagggtattgcctttgattcaactgttttatgtcctcattttctcaaactaagtgcttgctgttccccaccaccgcaccaataacttttacactttttcctt

SEQ ID NO: 194130 - DNA, 1003 bp, Homo Sapiens; identical to SEQ ID NO: 187172

SEQ ID NO: 194131 - DNA, 797 bp, Homo Sapiens; identical to SEQ ID NO: 181285

SEQ ID NO: 194132 - DNA, 764 bp, Homo Sapiens
caactttgtacaaaaaagttggaacaaagtagagaggatttggggtgattgtacagtcaggaagaagtactctcatgtggacctggtggtgatggtagatggctttgaaggcgaaaagggggccgtggtggctgggagtcgagggtacttcttgaagggggtcctggtgttcctggaacaggctctcatccagtatgcccttcgcaccttgggaagtcggggctacattcccatttataccccctttttcatgaggaaggaggtcatgcaggaggtggcacagctcagccagtttgatgaagaactttataaggtgattggcaaaggcagtgaaaagtctgatgacaactcctatgatgagaagtacctgattgccacctcagagcagcccattgctgccctgcaccgggatgagtggctccggccggaggacctgcccatcaagtatgctggcctgtctacctgcttccgtcaggaggtgggctcccatggccgtgacacccgtggcatcttccgagtccatcagtttgagaagattgaacagtttgtgtactcatcaccccatgacaacaagtcatgggagatgtttgaagagatgattaccaccgcagaggagttctaccagtccctggggattccttaccacattgtgaatattgtctcaattctttgaatcatgctgccagtaagaagcttgacctggaggcctggtttccgggctcagagccttccgtgagttggtctcctgttctaattgcacggat

SEQ ID NO: 194133 - DNA, 1279 bp, Homo Sapiens; identical to SEQ ID NO: 181288
  misc_feature (252)..(262): n is a, c, g, or t
  misc_feature (1154)..(1165): n is a, c, g, or t

SEQ ID NO: 194134 - DNA, 1755 bp, Homo Sapiens; identical to SEQ ID NO: 187174
  misc_feature (1396)..(1407): n is a, c, g, or t

SEQ ID NO: 194135 - DNA, 803 bp, Homo Sapiens; identical to SEQ ID NO: 181291

SEQ ID NO: 194136 - DNA, 3112 bp, Homo Sapiens; identical to SEQ ID NO: 181293
  misc_feature (118)..(135): n is a, c, g, or t

SEQ ID NO: 194137 - DNA, 1898 bp, Homo Sapiens; identical to SEQ ID NO: 187177
  misc_feature (1533)..(1555): n is a, c, g, or t

SEQ ID NO: 194138 - DNA, 850 bp, Homo Sapiens
  misc_feature (459)..(481): n is a, c, g, or t
ttggatccactaggctgccgagtggccatcgcagcccttgaggttttagaagaagaaaaccttgctgaaaatgcagacaaattgggcattatcttgagaaatgaactcatgaagctaccttctgatgttgtaactgccgtaagaggaaaaggattattaaacgctattgtcattaaagaaaccaaagattgggatgcttggaaggtgtgtctacgacttcgagataatggacttctggccaagccaacccatggcgacattatcaggtttgcgcctccgctggtgatcaaggaggatgagcttcgagagtccattgaaattattaacaagaccatcttgtctttctgagggtagccagctgttttcagtggtccctgggagccagctggagacaggtggtcctgtaaaagctttattcctaatgtgggcacattccactcccatgagtcttcaaaaacnnnnnnnnnnnnnnnnnnnnnnncagttgatacataatagaacaacgtttatgaacctgccgtttgctttgtaacgtaactaaataatgtaatggcatctatattcagttgaagtgttttgatgtgcatgtgtacttcctaaggtgaaatgcatctatatacagacagcctctaaatcaagtccttcagtataattgatatatgtttttataatttcctcactggtataagtgtttcatatttgaaaaagttatctctgggtattgcataaaaggcttcatcttataaagtgaaatcattgttattgaattttaggaaggattaatggttaagtgtatataaaatactaatattaagtaaacttcatatttggcaacaccagggttgtattc

SEQ ID NO: 194139 - DNA, 965 bp, Homo Sapiens
gcttttcctataatagccaactttgtacaaaaaagttggcgctgtgccacctggtttcaagaccctacccgcttcactggcaccatggatgccttcgtgaagatcgtgaggcacgagggcaccaggaccctctggagcggcctccccgccaccctggtgatgactgtgccagctaccgccatctacttcactgcctatgaccaactgaaggccttcctgtgtggtcgagccctgacctctgacctctacgcacccatggtggctggcgcgctggcccgcttgggcaccgtgactgtgatcagccccctggagcttatgcggacaaagctgcaggctcagcatgtgtcgtaccgggagctgggtgcctgtgttcgaactgcagtggctcagggtggctggcgctcactgtggctgggctggggccccactgcccttcgagatgtgcccttctcagccctgtactggttcaactatgagctggtgaagagctggctcaatgggttcaggccgaaggaccagacttctgtgggcatgagctttgtggctggtggcatctcagggacggtggctgcagtgctgactctaccctttgacgtggtaaagacccaacgccaggtcgctctgggagcgatggaggctgtgagagtgaaccccctgcatgtggactccacctggctgctgctgcggaggatccgggccgagtcgggcaccaagggactctttgcaggcttccttcctcggatcatcaaggctgccccctcctgtgccatcatgatcagcacctatgagttcggcaaaagcttcttccagaggctgaaccaggaccggcttctgggcggctgaaaggggcaaggaggcaaggaccctctctctctcacggatgggggagagggcaggaggagacccagcccagttgctcttttcctcagccactgaagggagggggctttgtttcctttccctcc

SEQ ID NO: 194140 - DNA, 1560 bp, Homo Sapiens; identical to SEQ ID NO: 187182

SEQ ID NO: 194141 - DNA, 907 bp, Homo Sapiens
tccagcatcgtgcgctgcacttcactgtcccctccagaaccccctccagccgcgaggagccgatggagtcgatttcgtccatgaagatgatagatggagcatgttcccgtgccatgacaaacagctccctcaccattcttgccccttcccctatgaatttctgtaccagttcagagccagagacacgaataaaggtacagtccgtatgatgagccacagcccgggccaacagtgtcttcccagtgcctggaggtccatacagcagcactcccttgggctgagcaatgcccagtgcttcgaagagctcaggatgcttaacaggcagctcgatcacttctttgatctccttgatctgtttgtccagtccaccaatcatctcataagttgaatctggtactttctccaccatcatcagtgacactaatgggtctaccttgttgggcaggatcttgtgcagagtgtagctgtcattccttagagccacccggcaattgggtgtcacatcattgatgtcaatgtttttgtccacgtctacaacaaatttaccttcaggatgtaccttgaccaacactttcttcttatccatggcccggactacttcccccacataggagccctgctcctgcagcagctgtagctcctcccgcaataggcgaactttagcatttagttcgttcctctgtgcctgcagcctccggaggttttggctcttatcattcacaatcagctggagttcttcaatcttggacagataatattggcggagtccgctgcctgccttcccctcctccagctccatctgctctggtccgtcaagcgccatcttctctcttcagcagagaccgccggcatccgagccgtcttggcgcgcaagcgcggaagcggaggattgccaacttttttgtac

SEQ ID NO: 194142 - DNA, 875 bp, Homo Sapiens; identical to SEQ ID NO: 181298

SEQ ID NO: 194143 - DNA, 943 bp, Homo Sapiens; identical to SEQ ID NO: 187183

SEQ ID NO: 194144 - DNA, 1617 bp, Homo Sapiens; identical to SEQ ID NO: 187187

SEQ ID NO: 194145 - DNA, 2443 bp, Homo Sapiens; identical to SEQ ID NO: 187188
  misc_feature (138)..(170): n is a, c, g, or t
  misc_feature (2013)..(2025): n is a, c, g, or t
  misc_feature (2187)..(2217): n is a, c, g, or t

SEQ ID NO: 194146 - DNA, 894 bp, Homo Sapiens
ctttgtacaaaaaagttggctcgccgtggggacagcaagtgtcggatccgcaggcgcagccgtgcgatgttgtcctctacagccatgtattcggctgctggcagagacttggggatggaaccgcacagagccgcgggccctttgcagctgcgattttcgccctacgttttcaacggaggtactatactggcaattgctggagaagattttgcaattgttgcttctgatactcgattgagtgaagggttttcaattcatacgcgggatagccccaaatgttacaaattaacagacaaaacagtcattggatgcagcggttttcatggagactgtcttacgctgacaaagattattgaagcaagactaaagatgtataagcattccaataataaggccatgactacgggggcaattgctgcaatgctgtctacaatcctgtattcaaggcgcttctttccatactatgtttacaacatcatcggtggacttgatgaagaaggaaagggggctgtatacagctttgatccagtagggtcttaccagagagactccttcaaggctggaggctcagcaagtgccatgctacagcccctgcttgacaaccaggttggttttaagaacatgcagaatgtggagcatgttccgctgtccttggacagagccatgcggctggtgaaagatgtcttcatttctgcggctgagagagatgtgtacactggggacgcactccggatctgcatagtgaccaaagagggcatcagggaggaaactgtttccttaaggaaggactgatctgtgtgctcttatcaccaatcagttcagacctggttgattttgtactttggaactgtaccttggatgggtttgtttattaaaagagaaacctgaagtact

SEQ ID NO: 194147 - DNA, 841 bp, Homo Sapiens
ttggccgctttccggcccagccagcgcccgcgatgactgccactctccgcccctacctgagtgccgtgcgggccacattgcaggctgccctctgcctggagaacttctcctcccaggttgtggaacgacacaacaagccggaagtggaagtcaggagtagcaaagagctcctgttacaacctgtgaccatcagcaggaatgagaaggaaaaggttctgattgagggctccatcaactctgtccgggtcagcattgctgtgaaacaggctgatgagatcgagaagattttgtgccacaagttcatgcgcttcatgatgatgcgagcagagaacttctttatccttcgaaggaagcctgtggaggggtatgatatcagctttctgatcaccaacttccacacagagcagatgtacaaacacaagttggtggactttgtgatccacttcatggaggagattgacaaggagatcagtgagatgaagctgtcagtcaatgcccgtgcccgcattgtggctgaagagttccttaagaatttttaaaccatctggctggatctcgtggccttccccctcagactacccatgtctccacgaaggcgtcctggagtcactccccgagcagcgcggcggcggcagggagttgggttggggtgggcatttgatgcgggaggtgggtggtgtgcttgctagctgggcaagaaagcagcagtggacctgccccaaggccacacgtgcctggtcaggctggcttctgatgttcagtcccctgggccgggacagattttttttaaacgtcttgaaacttaaactctgtgcttgtaagatactgtaacctttttgtc

SEQ ID NO: 194148 - DNA, 1754 bp, Homo Sapiens; identical to SEQ ID NO: 187190
  misc_feature (1269)..(1281): n is a, c, g, or t
  misc_feature (1294)..(1356): n is a, c, g, or t
  misc_feature (1421)..(1491): n is a, c, g, or t

SEQ ID NO: 194149 - DNA, 946 bp, Homo Sapiens; identical to SEQ ID NO: 181304

SEQ ID NO: 194150 - DNA, 609 bp, Homo Sapiens
ttggggcttgtgtgcctggtgcgggagctacggggcccagggattgtgtttaaagtagtgcttctaccaacatgtcccgtggttccagcgccggttttgaccgccacattaccattttttcacccgagggtcggctctaccaagtagaatatgcttttaaggctattaaccagggtggccttacatcagtagctgtcagagggaaagactgtgcagtaattgtcacacagaagaaagtacctgacaaattattggattccagcacagtgactcacttattcaagataactgaaaacattggttgtgtgatgaccggaatgacagctgacagcagatcccaggtacagagggcacgctatgaggcagctaactggaaatacaagtatggctatgagattcctgtggacatgctgtgtaaaagaattgccgatatttctcaggtctacacacagaatgctgaaatgaggcctcttggttgttgtatgattttaattggtatagatgaagagcaaggccctcaggtatataagtgtgatcctgcaggttactactgtgggtttaaagccactgcagcgggagttaaacaaactgagtcaaccagcttccttg

SEQ ID NO: 194151 - DNA, 935 bp, Homo Sapiens
ttggcaagatttggctccaagagctattcgcagagaaacagcctcgcacaaaaagccaccgcccccgaaacccgcgggaaatctgtttcctgtgaaaggcctggcctccgggcattggcggtttccctgatcctctctcccaaattttccggcaggggattgatcgaggcgacatttaggactggggtgggcgagggagtggcggttctcgtcccaagttacaggtgaggacgttcaggccaaggcgtagccaagatcgcgccgccctgtagcttgaggaggcgccgggattcgaaccaaggctgtgcccaatcctaagccctgcgaggtcttgtggaaccgacatgacccactctttggtttgtccagagacagtgagcagggtgagttcagtgctgaatcgcaacactcggcagtttggaaaaaaacatcttttcgaccaggatgaggagacatgttggaactcagaccagggcccctcccagtgggtgacgctggagtttccccagctcatccgtgtctcccagctgcagatccagtttcagggtggcttctccagtcgccggggctgcctggaaggttcacagggcactcaggctctccacaagattgtagatttctaccctgaggacaacaactcgcttcagactttccccataccagctgctgaagtggaccggctgaaggtgacgtttgaggatgccactgacttttttggccgtgtggtcatctaccacctgcgggtgcttggggagaaggtgtgagacctctaggggctgtctcctccaggaagccctccgggaagcacagcaaagtccctcattctgcacagaagtttattggttcctcttgggaagggtcccctcccaccacctgtccagaagctgcctttgaagtcagttctgggtttccccagctctggctgaccattttgt

SEQ ID NO: 194152 - DNA, 913 bp, Homo Sapiens; identical to SEQ ID NO: 187199
  misc_feature (839)..(847): n is a, c, g, or t

SEQ ID NO: 194153 - DNA, 2646 bp, Homo Sapiens; identical to SEQ ID NO: 187201
  misc_feature (2326)..(2343): n is a, c, g, or t

SEQ ID NO: 194154 - DNA, 1375 bp, Homo Sapiens; identical to SEQ ID NO: 187209
  misc_feature (253)..(267): n is a, c, g, or t

SEQ ID NO: 194155 - DNA, 825 bp, Homo Sapiens
  misc_feature (191)..(244): n is a, c, g, or t
ttggataaaatattagatttatatcaaattttccaatttgaaccagtggggaaaatcccacagaaatcagtaagtttacatttcaatttctatcttatttgactaagtggaaagagattctttaaaatgtataacctgccattatgtaatttggtttcattttattctacctgttgtgtgagtttagtatnnnnnnnnnnnnnnnnnnnnnnnnnnnnnnnnnnnnnnnnnnnnnnnnnnnnnnattgaagatggactgttgaaattgtataggaccagtgtcttattaatatgattaatatatttagaagagccacgtgaaacccatgacaaaatgaatgtgaatattctttctaaaaatttagaaaatgttatctttttgcatttattatgtaaaactgttttacagtatcaaaatttttcacttaaagaaaaaaaatgccatgaaacatttgaactgatgagccacagaacttcagttgaaatttttttcactttttagcatgctaaatatacatctgagtttaaatgttctgtttaatggccattcataaattcaagcactaccactggtcagttttgtgtgatagaataaaaatatgttacctgcagtgtaagtacagcacactgtcaaattcttttccttaaggtgcacagtaaatgtacagatagttataggccactgttttgtaatgtagtacatttctaatctattattcctaacctattataactgtttgcagaaagaaaagaatttttctaataatctgtaaaattatgctaacttctacaagtaggcttctaaataaaatttttaaaaagagc

SEQ ID NO: 194156 - DNA, 957 bp, Homo Sapiens; identical to SEQ ID NO: 181315
  misc_feature (163)..(193): n is a, c, g, or t
  misc_feature (239)..(266): n is a, c, g, or t

SEQ ID NO: 194157 - DNA, 922 bp, Homo Sapiens
  misc_feature (747)..(764): n is a, c, g, or t
  misc_feature (811)..(837): n is a, c, g, or t
ctttgtacaaaaaagttggtttgtgctcccccgagaatcgctgttcgtccgggttttttacgttttaatttccaggacttgaactgccatgtcctctgaagaaggaaagctcttcgtgggagggctcaactttaacaccgacgagcaggcactggaagaccacttcagcagtttcggacctatctctgaggtggtcgttgtcaaggaccgggagactcagcggtccaggggttttggtttcatcaccttcaccaacccagagcatgcttcagttgccatgagagccatgaacggagagtctctggatggtcgtcagatccgtgtggatcatgcaggcaagtctgctcggggaaccagaggaggtggctttggggcccatgggcgtggtcgcagctactctagaggtggtggggaccagggctatgggagtggcaggtattatgacagtcgacctggagggtatggatatggatatggacgttccagagactataatggcagaaaccagggtggttatgaccgctactcaggaggaaattacagagacaattatgacaactgaaatgagacatgcacataatatagatacacaaggaataatttctgatccaggatcgtccttccaaatggctgtatttataaaggtttttggagctgcactgaagcatcttattttatagtatatcaaccttttgtttttaaattgacctgccaaggtagctgaagaccttttagacagttccatcnnnnnnnnnnnnnnnnnnctgcctatttaaagacaaattatgggacgtttgtagaacctgagtannnnnnnnnnnnnnnnnnnnnnnnnnngagctcttagtttattggagctagcaataattggttctggcaagtttggccagactgacttcaaaaattaatgtgtatccaggga

SEQ ID NO: 194158 - DNA, 680 bp, Homo Sapiens
  misc_feature (46)..(56): n is a, c, g, or t
  misc_feature (160)..(367): n is a, c, g, or t
  misc_feature (529)..(555): n is a, c, g, or t
  misc_feature (602)..(619): n is a, c, g, or t
taagcactgtatgagacacaacagaatattttttcttccagtattnnnnnnnnnnngacatttgcaaacattttaaagccaactcttctatataatcagtttgatgatctgaattagaaaatacccctggataatcatgttcttgatacacatatcctannnnnnnnnnnnnnnnnnnnnnnnnnnnnnnnnnnnnnnnnnnnnnnnnnnnnnnnnnnnnnnnnnnnnnnnnnnnnnnnnnnnnnnnnnnnnnnnnnnnnnnnnnnnnnnnnnnnnnnnnnnnnnnnnnnnnnnnnnnnnnnnnnnnnnnnnnnnnnnnnnnnnnnnnnnnnnnnnnnnnnnnnnnnnnnnnnnnnnnnnnnnnnnntgcacatttcttataggtacattgggaaattgcttcctaaccacaataaacactgtgtacaggtttttaaaatgtccctggatacacattaattttttgaagtcagtctggccaaacttgccagaaccaattattgctagctccaataaacctaagagctcnnnnnnnnnnnnnnnnnnnnnnnnnnntactcaggttctacaaacgtcccataatttgtctttaaataggcagnnnnnnnnnnnnnnnnnngatggaactgtctaaaaggtcttcagctaccttggcaggtcaagggtaaaaacaaaagcca

SEQ ID NO: 194159 - DNA, 936 bp, Homo Sapiens
  misc_feature (737)..(754): n is a, c, g, or t
  misc_feature (801)..(827): n is a, c, g, or t
ctttgtacaaaaaagttggctccgagctcgctgttcgtccgggttttttacgttttaatttccaggacttgaactgccatgtcctctgaagaaggaaagctcttcgtgggagggctcaactttaacaccgacgagcaggcactggaagaccacttcagcagtttcggacctatctctgaggtggtcgttgtcaaggaccgggagactcagcggtccaggggttttggtttcatcaccttcaccaacccagagcatgcttcagttgccatgagagccatgaacggagagtctctggatggtcgtcagatccgtgtggatcatgcaggcaagtctgctcggggaaccagaggaggtggctttggggcccatgggcgtggtcgcagctactctagaggtggtggggaccagggctatgggagtggcaggtattatgacagtcgacctggagggtatggatatggatatggacgttccagagactataatggcagaaaccagggtggttatgaccgctactcaggaggaaattacagagacaattatgacaactgaaatgagacatgcacataatatagatacacaaggaataatttctgatccaggatcgtccttccaaatggctgtatttataaaggtttttggagctgcactgaagcatcttattttatagtatatcaaccttttgtttttaaattgacctgccaaggtagctgaagaccttttagacagttccatcnnnnnnnnnnnnnnnnnnctgcctatttaaagacaaattatgggacgtttgtagaacctgagtannnnnnnnnnnnnnnnnnnnnnnnnnngagctcttagttattggagctagcaataattggtttctggcaagtttggccagactgacttcaaaaattaatgtgtatcaagggacattttaaaaacctgtacacagtg

SEQ ID NO: 194160 - DNA, 912 bp, Homo Sapiens
  misc_feature (720)..(737): n is a, c, g, or t
  misc_feature (784)..(810): n is a, c, g, or t
ttggactttgtacaactaaagttgggttttttacgttttaatttccaggacttgaactgccatgtcctctgaagaaggaaagctcttcgtgggagggctcaactttaacaccgacgagcaggcactggaagaccacttcagcagtttcggacctatctctgaggtggtcgttgtcaaggaccgggagactcagcggtccaggggttttggtttcatcaccttcaccaacccagagcatgcttcagttgccatgagagccatgaacggagagtctctggatggtcgtcagatccgtgtggatcatgcaggcaagtctgctcggggaaccagaggaggtggctttggggcccatgggcgtggtcgcagctactctagaggtggtggggaccagggctatgggagtggcaggtattatgacagtcgacctggagggtatggatatggatatggacgttccagagactataatggcagaaaccagggtggttatgaccgctactcaggaggaaattacagagacaattatgacaactgaaatgagacatgcacataatatagatacacaaggaataatttctgatccaggatcgtccttccaaatggctgtatttataaaggtttttggagctgcactgaagcatcttattttatagtatatcaaccttttgtttttaaattgacctgccaaggtagctgaagaccttttagacagttccatcnnnnnnnnnnnnnnnnnnctgcctatttaaagacaaattatgggacgtttgtagaacctgagtannnnnnnnnnnnnnnnnnnnnnnnnnngagctcttggtttattggagctagcaataaattgggttctggcaagtttggccagactgacttcaaaaaaattaatgtgtatccagggacattttaaaaacc

SEQ ID NO: 194161 - DNA, 960 bp, Homo Sapiens
  misc_feature (709)..(726): n is a, c, g, or t
  misc_feature (773)..(799): n is a, c, g, or t
ctttgtacaaaaaagttggcgttttagtttccttggacattagaactgccatgtcctctgaagaaggaaagctcttcgtgggagggctcaactttaacaccgacgagcaggcactggaagaccacttcagcagtttcggacctatctctgaggtggtcgttgtcaaggaccgggagactcagcggtccaggggttttggtttcatcaccttcaccaacccagagcatgcttcagttgccatgagagccatgaacggagagtctctggatggtcgtcagatccgtgtggatcatgcaggcaagtctgctcggggaaccaaaggaggtggctttggggcccatgggcgtggtcgcagctactctagaggtggtggggaccagggctatgggagtggcaggtattatgacagtcgacctggagggtatggatatggatatggacgttccagagactataatggcagaaaccagggtggttatgaccgctactcaggaggaaattacagagacaattatgacaactgaaatgagacatgcacataatatagatacacaaggaataatttctgatccaggatcgtccttccaaatggctgtatttataaaggtttttggagctgcactgaagcatcttattttatagtatatcaaccttttgtttttaaattgacctgccaaggtagctgaagaccttttagacagttccatcnnnnnnnnnnnnnnnnnnctgcctatttaaagacaaattatgggacgtttgtagaacctgagtannnnnnnnnnnnnnnnnnnnnnnnnnngagctcttaggtttattggagctagcaataattggttctggcaagtttggccagactgacttcaaaaaattaatgtgtatccagggacattttaaaaacctgtacacagtgtttattgtggttaggaagcaatttcccaatgtacctataagaaatgtgca

SEQ ID NO: 194162 - DNA, 987 bp, Homo Sapiens
  misc_feature (776)..(793): n is a, c, g, or t
  misc_feature (840)..(866): n is a, c, g, or t
attgatgagcaatgctttttctctttatagccaactttgtacaaaaaagttgggctcctccgagctcgctgttcgtccgggttttttacgttttaatttccaggacttgaactgccatgtcctctgaagaaggaaagctcttcgtgggagggctcaactttaacaccgacgagcaggcactggaagaccacttcagcagtttcggacctatctctgaggtggtcgttgtcaaggaccgggagactcagcggtccaggggttttggtttcatcaccttcaccaacccagagcatgcttcagttgccatgagagccatgaacggagagtctctggatggtcgtcagatccgtgtggatcatgcaggcaagtctgctcggggaaccagaggaggtggctttggggcccatgggcgtggtcgcagctactctagaggtggtggggaccagggctatgggagtggcaggtattatgacagtcgacctggagggtatggatatggatatggacgttccagagactataatggcagaaaccagggtggttatgaccgctactcaggaggaaattacagagacaattatgacaactgaaatgagacatgcacataatatagatacacaaggaataatttctgatccaggatcgtccttccaaatggctgtatttataaaggtttttggagctgcactgaagcatcttattttatagtatatcaaccttttgtttttaaattgacctgccaaggtagctgaagacctttttagacagttccatcnnnnnnnnnnnnnnnnnnctgcctatttaaagacaaattatgggacgtttgtagaacctgagtannnnnnnnnnnnnnnnnnnnnnnnnnngagctcttaggtttattggagctagcaataattgggttctggcaagttttggccagactgacttccaaaaattaattgtgtatccaggacatttttaaaaacctgtacacagtgtttattg

SEQ ID NO: 194163 - DNA, 894 bp, Homo Sapiens; identical to SEQ ID NO: 181319
  misc_feature (99)..(111): n is a, c, g, or t

SEQ ID NO: 194164 - DNA, 2076 bp, Homo Sapiens; identical to SEQ ID NO: 187230

SEQ ID NO: 194165 - DNA, 922 bp, Homo Sapiens
  misc_feature (777)..(795): n is a, c, g, or t
tgtacaaaaaagttggctccatgtctgctttaaccatttatgtaagggtagggcacttttaatttaaatgacttcttgcaccatcttgcctaatggactagattggactgtatcaacattgatttactccactttttatgccttccattgtgatgacgtcaaacacagtgaaagccttcagtcatgctatgggatttaattgtgtatcctcattactgtatcatttgtggggtacaccccttccccctttttttaaattaaatacagctcattcttactgtggcttgtagcattcctcctcttctggcctcctggactgctccccttcatctcttacccttgccccctccacccggtcttggtggtggtatattaaaaaaagaaagaatgaaagcacacaaaatgagtcagtttggggtcagtggtataaagggggtatatgttgcaaacaaatgttttagtaacagttggctgtaatcactcctcgccgtgtctggcactgaaaataaggaaaaaaaacctactactgaataaaagtgacaaagaatggagaatctggttttctttttctttttaacctacctcttgtagccaatattttgtgtcatacctttgggcacagtgaaacaaaatgggttttcattgtttattggtatttttgttaattatttttaacaagtgttcttttacatgcaggaggagaggtattggttctctatgaacatattttgaatataggttttattaacgatttcacaatctataaatgctactagnnnnnnnnnnnnnnnnnnnaccatcatgagggtattggatacattgtgtctctatttaactcattatgtgttaatgaaattgttgtaaatgggaaccaatttgtagaacttaatttctactttttagagtgcttaatttcattttt

SEQ ID NO: 194166 - DNA, 894 bp, Homo Sapiens; identical to SEQ ID NO: 187232

SEQ ID NO: 194167 - DNA, 1127 bp, Homo Sapiens; identical to SEQ ID NO: 187233
  misc_feature (44)..(71): n is a, c, g, or t
  misc_feature (381)..(404): n is a, c, g, or t

SEQ ID NO: 194168 - DNA, 1409 bp, Homo Sapiens; identical to SEQ ID NO: 187235
  misc_feature (329)..(343): n is a, c, g, or t
  misc_feature (399)..(419): n is a, c, g, or t
  misc_feature (430)..(698): n is a, c, g, or t
  misc_feature (1174)..(1184): n is a, c, g, or t
  misc_feature (1252)..(1262): n is a, c, g, or t

SEQ ID NO: 194169 - DNA, 866 bp, Homo Sapiens; identical to SEQ ID NO: 187240

SEQ ID NO: 194170 - DNA, 986 bp, Homo Sapiens
gagcaatgcttttttataatagcgcaactttgtacaaaaaagttggctctggaagaggtgaagttgggaaactgcggattgccaagactcaaggaaggactgaggtgtcatttactttgaatgaggatcttgcaaatattcatgatattggtggaaaaccagcttcagtcagtgctcctagagaacatccatttgtcttgcaaagtgttggaggacagacattaacagtatttactgagagctcatcagataagctgtcattggaaggaatagtggtacaaagagctgaatgccgaccagctgccagtgaaaactacatgcgattaaaaagattgcaaatagaagagtcttccaaaccagtgaggctatcacaacagctggacaaagttgtaacaaccaattacaaacctgttgctaatcatcaatacaatatcgaatatgaaaggaaaaagaaagaagacggaaagcgagctcgagctgataaacaacatgttttagacatgctattttcagcctttgagaaacatcaatactataatcttaaggacttggtggacatcacaaagcaacctgtggtgtacctgaaggaaatcttaaaagaaattggtgttcagaatgtaaaagggatccacaaaaacacatgggagctgaagccagagtacagacactatcaaggagaagaaaagagtgactaagaagactcctagccagcatgctagtgaaacgactagcagcgatgctatgcaaaaggcgctgatactggaaggcttgaacaccgtatgttaataggggttaagtgacagtactttgatttctctcggtaaatttttttaaacctgtaattcttgtaaagtttcttaactgttttttgaggagaaagaacagattttatttatagacttaaccttgtattaaacccgattattcccagtaggaatagggggttggaggattaagagggtttttcttaaatattagccttttaa

SEQ ID NO: 194171 - DNA, 1719 bp, Homo Sapiens; identical to SEQ ID NO: 187243
  misc_feature (896)..(912): n is a, c, g, or t
  misc_feature (1225)..(1242): n is a, c, g, or t

SEQ ID NO: 194172 - DNA, 1182 bp, Homo Sapiens
  misc_feature (92)..(115): n is a, c, g, or t
ttggctcaccatccagaaggactggaaggactgagcccagccagaggcgggcagggcagactgacggacggacgacggacaggcggatgtgnnnnnnnnnnnnnnnnnnnnnnnnataccaaagtgctgacaggccctccgtgcccctcccaccctggtccgcctccctggcctggctcaaccgagtgcctccgacccccctcctcagccctcccccacccacaggcccagcctcctcggtctcctgtctcgttgctgcttctgcctgtgctgtgggggagagaggccgcagccaggcctctgctgccctttctgtgccccccaggttctatctccccgtcacacccgaggcctggcttcaggagggagcggagcagccattctccaggccccgtggttgcccctggacgtgtgcgtctgctgctccggggtggagctggggtgtgggatgcacggcctcgtgggggccgggccgtcctccagccccgctgctccctggccagcccccttgtcgctgtcggtcccgtctaaccatgatgccttaacatgtggagtgtaccgtggggcctcactagcctctaactccctgtgtctgcatgagcatgtggcctccccgtcccttccccggtggcgaacccagtgacccagggacacgtggggtgtgctgctgctgctccccagcccaccagtgcctggccagcctgcccccttccctggacagggctgtggagatggctccggcggcttggggaaagccaaattgccaaaactcaagtcacctcagtaccatccaggaggctgggtattgtcctgcctctgccttttctgtctcagcgggcagtgcccagagcccacacccccccaagagccctcgatggacagcctcacccaccccacctgggcccagccaggagccccgcctggccatcagtatttattgcctccgtccgtgccgtccctgggccactggcctggcgcctgttcccccaggctctcagtgccaccacccccggcaggccttccctgacccagccaggaacaaacaagggaccaagtgcacacattgctgagagccgtctcctgtgcctcccccgccccatccccggtcttcgtgttgtgtctgccaagctcaggcagagcgcctgtccctgcctcttttctgaccgggaaataaatgcccct

SEQ ID NO: 194173 - DNA, 1406 bp, Homo Sapiens; identical to SEQ ID NO: 187245

SEQ ID NO: 194174 - DNA, 1610 bp, Homo Sapiens; identical to SEQ ID NO: 187247
  misc_feature (1138)..(1148): n is a, c, g, or t

SEQ ID NO: 194175 - DNA, 1390 bp, Homo Sapiens; identical to SEQ ID NO: 187248
  misc_feature (284)..(294): n is a, c, g, or t
  misc_feature (817)..(817): n is a, c, g, or t

SEQ ID NO: 194176 - DNA, 1133 bp, Homo Sapiens; identical to SEQ ID NO: 187249
  misc_feature (827)..(837): n is a, c, g, or t

SEQ ID NO: 194177 - DNA, 1570 bp, Homo Sapiens; identical to SEQ ID NO: 187251
  misc_feature (1118)..(1126): n is a, c, g, or t

SEQ ID NO: 194178 - DNA, 1466 bp, Homo Sapiens; identical to SEQ ID NO: 187252
  misc_feature (1137)..(1145): n is a, c, g, or t

SEQ ID NO: 194179 - DNA, 1402 bp, Homo Sapiens; identical to SEQ ID NO: 187253
  misc_feature (232)..(240): n is a, c, g, or t

SEQ ID NO: 194180 - DNA, 866 bp, Homo Sapiens
ttggctggactttgggtgaggcggttcagccatgaggctggctgtgcttttctcgggggccctgctggggctactggcagcccaggggacagggaatgactgtcctcacaaaaaatcagctactttgctgccatccttcacggtgacacccacggttacagagagcactggaacaaccagccacaggactaccaagagccacaaaaccaccactcacaggacaaccaccacaggcaccaccagccacggacccacgactgccactcacaaccccaccaccaccagccatggaaacgtcacagttcatccaacaagcaatagcactgccaccagccagggaccctcaactgccactcacagtcctgccaccactagtcatggaaatgccacggttcatccaacaagcaacagcactgccaccagcccaggattcaccagttctgcccacccagaaccacctccaccctctccgagtcctagcccaacctccaaggagaccattggagactacacgtggaccaatggttcccagccctgtgtccacctccaagcccagattcagattcgagtcatgtacacaacccagggtggaggagaggcctggggcatctctgtactgaaccccaacaaaaccaaggtccagggaagctgtgagggtgcccatccccacctgcttctctcattccccctatggacacctcagctttggattcatgcaggacctccagcagaaagttgtctacctgagctacatggcggtggagtacaatgtgtcctttcccccacgcagcacagtggacattctcgggctcaaatgcatcccttcgagatctccaggcacccctggggcagagctttcagttgca

SEQ ID NO: 194181 - DNA, 1193 bp, Homo Sapiens; identical to SEQ ID NO: 187262
  misc_feature (284)..(299): n is a, c, g, or t

SEQ ID NO: 194182 - DNA, 938 bp, Homo Sapiens; identical to SEQ ID NO: 187265
  misc_feature (715)..(724): n is a, c, g, or t

SEQ ID NO: 194183 - DNA, 963 bp, Homo Sapiens; identical to SEQ ID NO: 187267

SEQ ID NO: 194184 - DNA, 1089 bp, Homo Sapiens; identical to SEQ ID NO: 181332

SEQ ID NO: 194185 - DNA, 1493 bp, Homo Sapiens; identical to SEQ ID NO: 187272

SEQ ID NO: 194186 - DNA, 1739 bp, Homo Sapiens; identical to SEQ ID NO: 187273

SEQ ID NO: 194187 - DNA, 905 bp, Homo Sapiens; identical to SEQ ID NO: 187276

SEQ ID NO: 194188 - DNA, 676 bp, Homo Sapiens; identical to SEQ ID NO: 181335
  misc_feature (366)..(428): n is a, c, g, or t

SEQ ID NO: 194189 - DNA, 1976 bp, Homo Sapiens; identical to SEQ ID NO: 187281
  misc_feature (262)..(285): n is a, c, g, or t
  misc_feature (588)..(624): n is a, c, g, or t
  misc_feature (1545)..(1553): n is a, c, g, or t

SEQ ID NO: 194190 - DNA, 831 bp, Homo Sapiens; identical to SEQ ID NO: 187282
  misc_feature (51)..(80): n is a, c, g, or t
  misc_feature (372)..(380): n is a, c, g, or t

SEQ ID NO: 194191 - DNA, 334 bp, Homo Sapiens
ctttgtataaaaagttgggtaaaataagtgcctgaaaaaaacacttgcataaaagaatttaaggagtgatagctctttctgttctgccattcccaacattcctgggggaaaggagactcaatgagttaatactatttcactgagccccagatggaaacttggtttgacctaaaacatctgattaatatcggctagctgatttcttaaaaattccttgcattgaaggatattttgcatgtctgtaacacctgtcattacttgtttgtattgatttctgatattcttgcacctgactacatgtaattgggcagatcagctttgcagtatatttttt

SEQ ID NO: 194192 - DNA, 725 bp, Homo Sapiens
ttggcacacacacaccctcaaagtccaaatggtagcagggatccaaagggaacacagtatgtaggtcaaactggcagtaacagtgtacagcctttgacaaactagaaatattagagtaggccaaacacacctccaaactgtaaggctgtgcacaaacataaaaaatggcagccttccatctcctgcactggctgagtccatttacttgtgtacttgttctagtgagtggtgggactgtacatttttgaatagacctcaaaaatacttcattctgctgctgttcagttggctttttaaacctgtctgcagtaggacactgaaaacagcaagaacttcagggtgaacacccgctgatcctttaacaaggatttctggcaggaaactcacaaaaaggagaactgaaaatttagacatacagttggccattgtaaaaaacatcagtttcctctcatacattccaagtaaaccaagtaaaataagtgttggagtaacacttgcataaaagaatttaaggagtgatagctctttctgttctgccattcccaacattcctgggggaaaaggagactcaatgagttaatactatttcactgagcccaagatggaaacttggtttgacctaaaacatctgattatataggctagctgatttcttaaaaattccttgcattgaaggatattttgcatgtctgtaacacctgtccatacttgtttgtattgatttc

SEQ ID NO: 194193 - DNA, 2273 bp, Homo Sapiens; identical to SEQ ID NO: 187287
  misc_feature (1239)..(1269): n is a, c, g, or t
  misc_feature (1722)..(1750): n is a, c, g, or t
  misc_feature (1967)..(1977): n is a, c, g, or t

SEQ ID NO: 194194 - DNA, 1726 bp, Homo Sapiens; identical to SEQ ID NO: 187288

SEQ ID NO: 194195 - DNA, 944 bp, Homo Sapiens
ctttgtacaaaaaagttggccatggtttctctccgctcccgtgagtaacttggctccgggggctccgctcgcctgcccgcacgccgcccgccacccaggaccgcgccgccggcctccgccgctagcaaacccttccgacggccctcgctgcgcaagccgggacgcctctcccccctccgcccccgccgcggaaagttaagtttgaagaggggggaagaggggaacatggacatgaagaggaggatccacctggagctgaggaaccggaccccggcagctgttcgagaacttgtcttggacaattgcaaatcaaatgatggaaaaattgagggcttaacagctgaatttgtgaacttagagttcctcagtttaataaatgtaggcttgatctcagtttcaaatctccccaagctgcctaaattgaaaaagcttgaactcagtgaaaatagaatctttggaggtctggacatgttagctgaaaaacttccaaatctcacacatctaaacttaagtggaaataaactgaaagatatcagcaccttggaacctttgaaaaagttagaatgtctgaaaagcctggacctctttaactgtgaggttaccaacctgaatgactaccgagagagtgtcttcaagctcctgccccagcttacctacttggatggctatgaccgagaggaccaggaagcacctgactcagatgccgaggtggatggtgtggatgaagaggaggaggacgaagaaggagaagatgaggaagacgaggacgatgaggatggtgaagaagaggagtttgatgaagaagatgatgaagatgaagatgtagaaaggggatgaggacgacgatgaagtcagtgaggaggaagaaaatttggacttgatgaagaagatgaagatgacgatgagatgaaaaggaggagaaggtgggaaaggtgaaaagagga

SEQ ID NO: 194196 - DNA, 1055 bp, Homo Sapiens
actttgtacaaaaaagttggctccatggtttctctccgctcccgtgagtaacttggctccgggggctccgctcgcctgcccgcacgccgcccgccacccaggaccgcgccgccggcctccgccgctagcaaacccttccgacggccctcgctgcgcaagccgggacgcctctcccccctccgcccccgccgcggaaagttaagtttgaagaggggggaagaggggaacatggacatgaagaggaggatccacctggagctgaggaaccggaccccggcagctgttcgagaacttgtcttggacaattgcaaatcaaatgatggaaaaattgagggcttaacagctgaatttgtgaacttagagttcctcagtttaataaatgtaggcttgatctcagtttcaaatctccccaagctgcctaaattgaaaaagcttgaactcagtgaaaatagaatctttggaggtctggacatgttagctgaaaaacttccaaatctcacacatctaaacttaagtggaaataaactgaaagatatcagcaccttggaacctttgaaaaagttagaatgtctgaaaagcctggacctctttaactgtgaggttaccaacctgaatgactaccgagagagtgtcttcaagctcctgccccagcttacctacttggatggctatgaccgagaggaccaggaagcacctgactcagatgccgaggtggatggtgtggatgaagaggaggaggacgaagaaggagaagatgaggaagacgaggacgatgaggatggtgaagaagaggagtttgatgaagaagatgatgaagatgaagatgtagaaggggatgaggacgacgatgaagtcagtgaggaggaagaagaatttggacttgatgaagaagatgaagatgaggatgaggatgaagaggaggaagaaggtgggaaaggtgaaaagaggaagagagaaacagatgatgaaggagaagatgattaagacccccgatgacctgcagaaacagaactgttcagtattggttggactgctcatggattttgtagctgttt

SEQ ID NO: 194197 - DNA, 1113 bp, Homo Sapiens; identical to SEQ ID NO: 187291

SEQ ID NO: 194198 - DNA, 888 bp, Homo Sapiens
ttgggtctgggaaggagagaaaatggcggcggagccgaacaagaccgaaatccagactctttttaagaggcttcgcgcagttccaaccaacaaggcctgtttcgactgcggcgccaagaatccgagttgggccagcatcacgtacggtgttttcttgtgcattgactgttccggggtgcaccgctccctgggcgtccatctgagcttcatcaggtccacagagttggattccaactggaactggttccagctgaggtgtatgcaggtcggcgggaatgccaatgcgacggctttttttcgccaacatggatgcacagccaatgatgccaacaccaaatataatagccgagctgcccagatgtaccgggagaagatccggcagctggggagtgcggccctggctaggcatggcactgatctttggatagacaacatgagtagtgccgttcctaatcactccccagagaagaaggactctgatttcttcacagaacacactcaaccccctgcctgggatgcgccagccactgagccttcagggacccagcagccagccccgtctacagagagcagtggcctggcacagccggagcatggccccaacacagacctgcttggcacctcacccaaagcctcactggagtccgtgtatctgtcagctaaaggggcccttcctgccagagaactgaaaagctccatcattggcaagaagaagccagcagcagctaagaaagggctgggtgccaagaaaggcctaggggcccagaaatgagcagccagagcttcagtgagattgagcggcagctcacgtggcagagaagctccgtgagcagcagcagccgatgccaagaagcagcggaggagtccatggtcgcctccatgcgtctg

SEQ ID NO: 194199 - DNA, 446 bp, Homo Sapiens; identical to SEQ ID NO: 181343
  misc_feature (321)..(345): n is a, c, g, or t

SEQ ID NO: 194200 - DNA, 1178 bp, Homo Sapiens; identical to SEQ ID NO: 181345

SEQ ID NO: 194201 - DNA, 1639 bp, Homo Sapiens
tcaccaagctccaaagggcaacaccagtcctcccagcctccccattcaccttaccctggcctccacatgcacataccccatacctcaggccatgctagagaactggagtgtcccctccccggcccaagccgctggagaggcagccctctggcatcccaggagatgatggcggccagagccgcttgcatagattgaggaaagaaaagaaggaggcacctaacaggctccctgaaaacccccaacttacccctgtacaaaaaaagtggctcccacatagaaaacttgctcccaaaatagtgcaaatacccaaaggaaaggaaaaaaccagcagcaaggctgggcttgtaggaatggcaaagaactttggtttagaaaggctaggaagagtctgggctgcacctcctcttcctagcccagctccccagagccagctctgaccctcgccccagggggagtctgtaaacatgcaaacccagcagcctttggttcggaaatgtcttacaatgtcaaagcacagcctccagcagtcctacttgggcctgcctgcaggggggcagaggaggcatctgctgaacccaattaaagccaatgcaaaaagtataaggctttggggaccaagcaacaaggaatcctatcactacatttataaaactaaagctggagagtagagggtgacagcagacactcctcaccccagcctacgtgtctgcggccccagcaaggacccagagggtggtctccctccaggctccagggctgggaagaaagatccctgagcagttaggtcaggcgaattcccagcacctgttccagttcctgccttcgctgctgcaccttggcaaagatgtgcctgcctactgcttcctgggcccagggctggtggtagaaagcagctcgtctctcctcctcaggatttccaatcacatcagtgatgatcttgaggtctcggcgctgggaacggagccattcctggatgaagtcctgggggtcggtgctaaaactgagcatgaaatctctctgggtcttcagctggttgatggactcaatggtctcatggatcttgacatcaagggaggcgatctcctgctgattggtggtagaggccagaaaattgctcatttgggccttcagtgggtcgtccacctccacatcgatgtcgtaacaggctgtcttcttctggtcgttagggtcgacactaatgacatggttgatgacaatggggtctggatgctgcagcaaccctgccagcttcatgggaatctcggagaaacggagtcggccacaactgaagatctggcggaagtaacggttgcagttgatgtactcccgctcgtgcccatcctgcagctggttgtgcttgatgtaaagccacagggcctgcatgatggcggccctcgtctgcgtgtgcactcccagcagccttgccaatcgggggtccaatttgtactggggaggctgatgatccagcatgagcaggagggtgcacttgacgttgaggtctccaggccgttttacttggaagccatctgtctcctgggtggtgggcatccggtgccactccaccaggtgattgtcaggcccgtacagctccttgtccagctcaatgacgaggctcttaaaccaacttttttgtacaaag

SEQ ID NO: 194202 - DNA, 923 bp, Homo Sapiens; identical to SEQ ID NO: 187298

SEQ ID NO: 194203 - DNA, 1558 bp, Homo Sapiens; identical to SEQ ID NO: 187299

SEQ ID NO: 194204 - DNA, 824 bp, Homo Sapiens
ccccaggggtggagcatcagggagttttggcggtgtctctggctccaagcccagctctgcattcagctgctccagctccccctgatccagcaactcaaagtcctcagtggtgagtgcctcttcttcctcaggggcaggcaggggctggggtgagtctgtctcggggctcagtgtctccactggtcctccaggggagcatttcactccatcttggggggaccctgccccattgaagtgcgtgttcacaaagtggaggggggatgagagccgcaacaaggtttccttagctgccacatcctcttcctcttcctccgagtccagggcttgccttgacagagcttgaggacggcctagtaggtcttcgggaggggccagctctccctcctctccctcccctaggtcccggcttagggtctcctctggttcacttggcaggctctgctggtccaaatcctcggagacatcagtcagctgcggagttgtggcccgggatacggagaagccaccactctccaagatagaagcctcctcatctgacagctctgagtctgtaatggccaaggccaatgctgttttcttcacatccaccactggggagaagccagccagctctgcctcgctttcactctctgtctctgccagtggctcatcacctcctgggggtgcattcttcccctgacgcttcctcttgtcgtgtttgtgatgcagggcattggcttctgccttcatgctgtagtccagctgcatgagcaggggctccaggcgagtgtacatcctctggatcagctcatgataaaccaccaggccaacttttttgtacaaag

SEQ ID NO: 194205 - DNA, 798 bp, Homo Sapiens; identical to SEQ ID NO: 187300

SEQ ID NO: 194206 - DNA, 1313 bp, Homo Sapiens
ctttgtacaaaaaagttggcattcttaaaaataaatgaattttcactgttggcacatatgaggcttaaatataaggaacataacacttgcattctaatttttgcatatattgtaaatgtgtctggtatttacagcaaaatactgtgtatccttttatgggtaaaacaaaagtgaacattgcatgcatgtaatgtgatgaatttgtaatttaggagttctttggggcttctgtgacttgggaaatgcttacattcaggccttaatgttgcattagctagcatgttttccctctgatgtatatagtcactgttgtataaactaatctttgcttgttttctactctgtgatctttccatatcatatttcattaatgatcagttagtgtcaaggagtcaaaacagattaaaattaatttcatgtgtatatggtggaaatttgtggctagtgtgatttttgtttgtttccttttaagtactgttgatcagttgtgacacttactggttaaacttacgttgctaaagatttctctataataagccacacattatatttagactatattaagggaccttggttttcttctagatagcagctgtcccaaagaaaatatttcttctttgtctgttaagatttagctattatctgccagttgttaagaggttttggttccaaactcaaccagcaatgttgagagctgaacttaagatagctgttgtactttttgctttccatctgttactgtccttcattcttggctccctactatctataaacagctgctgtgaagaagaaaagttgaataagagttggcttaaattttaaaaaagataaagaaaattgaggttttaggattttcatggtaacaagctctggtataagctaaggctggcaagttcagatactaaaatattatttgatcatatcttggatccttttgaaaaagttaagactatatgaaggtaaattagaaataagtatgaatattaataaaatagcatttatcttatttctctattttatgttgtgacttaacctaattttatttttttaacattttcttatttcttataatatgaatgctgatatttaaaggtagatctatgtggtattctttgtgtttcttaattgtttaactcttaagattatttgtgatctggatttatgtatttgttagatacatacgaattgttaaaatggaatgcaagtttttcaaaagcccaggtctaaatgtaatgggttggtttattgttctataaccccagcccatcattttctgtgtaaatcataaaacaatagacagaatatactcggtg

SEQ ID NO: 194207 - DNA, 1064 bp, Homo Sapiens; identical to SEQ ID NO: 187306

SEQ ID NO: 194208 - DNA, 2642 bp, Homo Sapiens; identical to SEQ ID NO: 187312

SEQ ID NO: 194209 - DNA, 1544 bp, Homo Sapiens; identical to SEQ ID NO: 187313

SEQ ID NO: 194210 - DNA, 2196 bp, Homo Sapiens; identical to SEQ ID NO: 181350
  misc_feature (1481)..(1502): n is a, c, g, or t
  misc_feature (2041)..(2069): n is a, c, g, or t

SEQ ID NO: 194211 - DNA, 710 bp, Homo Sapiens; identical to SEQ ID NO: 181351

SEQ ID NO: 194212 - DNA, 1202 bp, Homo Sapiens; identical to SEQ ID NO: 187319
  misc_feature (1138)..(1150): n is a, c, g, or t

SEQ ID NO: 194213 - DNA, 550 bp, Homo Sapiens
  misc_feature (48)..(70): n is a, c, g, or t
gatgaatatggagggagttgtaaaattaaagaaggtacatgggtgcannnnnnnnnnnnnnnnnnnnnnnctgtctgtctaacaacagcaaaagcaggcaagggctactgtggtagtcactgttgttcctctccccattttgcttcacagtttacaagtccttccactttctctctgaggcagaaagagcaagggtttttctctccattttatggttgggaaaattgaggcctgcctgagtgtgtgacttgtggcaagtcactctggtcatctagggcagaggctccccagatcccaggcctcctgcctccagtccccagcccgcagcccaggattaggcagagccagctgctttcccgtggctgccctgactccttacagggatcactgagattctgatgaacagaccttctgcccgcaatgccttggggaatgtcttcgtcagtgaggtaagaaagggcgggcgccagggtgggctggggatgggctggcactatctaactgggtgtcctctgtagctgctggaaactctggcccagctgcgggagga

SEQ ID NO: 194214 - DNA, 1495 bp, Homo Sapiens; identical to SEQ ID NO: 181354

SEQ ID NO: 194215 - DNA, 915 bp, Homo Sapiens; identical to SEQ ID NO: 187326
  misc_feature (653)..(661): n is a, c, g, or t

SEQ ID NO: 194216 - DNA, 1579 bp, Homo Sapiens; identical to SEQ ID NO: 187328

SEQ ID NO: 194217 - DNA, 149 bp, Homo Sapiens
tttgtacaaaaaagttggaatcaacaccctcctagccttactactaataattattacattttgactaccgcaactcaacggctacataaaaaaatccaccccttacgagtgcggcttcgaccctatatcccccggccgcgtccttttct

SEQ ID NO: 194218 - DNA, 1310 bp, Homo Sapiens
  misc_feature (1228)..(1246): n is a, c, g, or t
actttgtacaaaaaagttgggttctgagggaagcaaggaggcggcggcggccgcagcgagtggcgagtagtggaaacgttgcttctgaggggagcccaagatgaccggttctaacgagttcaagctgaaccagccacccgaggatggcatctcctccgtgaagttcagccccaacacctcccagttcctgcttgtctcctcctgggacacgtccgtgcgtctctacgatgtgccggccaactccatgcggctcaagtaccagcacaccggcgccgtcctggactgcgccttctacgatccaacgcatgcctggagtggaggactagatcatcaattgaaaatgcatgatttgaacactgatcaagaaaatcttgttgggacccatgatgcccctatcagatgtgttgaatactgtccagaagtgaatgtgatggtcactggaagttgggatcagacagttaaactgtgggatcccagaactccttgtaatgctgggaccttctctcagcctgaaaaggtatataccctctcagtgtctggagaccggctgattgtgggaacagcaggccgcagagtgttggtgtgggacttacggaacatgggttacgtgcagcagcgcagggagtccagcctgaaataccagactcgctgcatacgagcgtttccaaacaagcagggttatgtattaagctctattgaaggccgagtggcagttgagtatttggacccaagccctgaggtacagaagaagaagtatgccttcaaatgtcacagactaaaagaaaataatattgagcagatttacccagtcaatgccatttcttttcacaatatccacaatacatttgccacaggtggttctgatggctttgtaaatatttgggatccatttaacaaaaagcgactgtgccaattccatcggtaccccacgagcatcgcatcacttgccttcagtaatgatgggactacgcttgcaatagcgtcatcatatatgtatgaaatggatgacacagaacatcctgaagatggtatcttcattcgccaagtgacagatgcagaaacaaaacccaagtcaccatgtacttgacaagatttcatttacttaagtgccatgttgatgataataaaacaattcgtactccccaatggtggatttattactattaaagaaaccagggaaaatattaattttaatattataacaacctgaaaataatggaaaagaggnnnnnnnnnnnnnnnnnnnaaataaacaccttcttaagtgcatgagatggtttgatggtttgctgcattaaacgtatttgggc

SEQ ID NO: 194219 - DNA, 1223 bp, Homo Sapiens
  misc_feature (70)..(88): n is a, c, g, or t
  misc_feature (831)..(843): n is a, c, g, or t
  misc_feature (1065)..(1076): n is a, c, g, or t
ttggattaaagaaaccagggaaaatattaattttaatattataacaacctgaaaataatggaaaagaggnnnnnnnnnnnnnnnnnnnaaataaacaccttcttaagtgcatgagatggtttgatggtttgctgcattaaaggtatttgggcaaacaaaattggagggcaagtgactgcagttttgagaatcagttttgaccttgatgattttttgtttccactgtggaaataaatgtttgtaaataagtgtaataaaaatccctttgcattctttctggaccttaaatggtagaggaaaaggctcgtgagccatttgtttcttttgctggttatagttgctaattctaaagctgcttcagactgcttcatgaggaggttaatctacaattaaacaatatttcctcttggccgtccattattttctgaagcagatggttcatcatttcctgggctgttaaacaaagcgaggttaaggttagactcttgggaatcagctagttttcaatcttattagggtgcagaaggaaaactaataagaaaacctcctaatatcattttgtgactgtaaacaattatttattagcaaacaattgatcccagaagggcaaattgtttgagtcagtaatgagctgagaaaagacagagcatatctgtgtatttggaaaaataattgtaacgtaattgcagtgcatttagacaggcatctatttggacctgtttctatctctaaatgaatttttggaaacattaatgaggtttacatatttctctgacatttatatagttcttatgtccatttcagttgaccagccgctggtgattaaagttnnnnnnnnnnnnnttatagtgagaatgagattcatttcaatgtaatgcactaaagcagaacacgaacttagcttggcctattctaagtagttccaaatagtatttttgttgtcaaaactttaaaatttatattaatttgcaaatgtatgtctctgagtaggacttggacctttcctgagatttattttatccgtgatgtattttttttaattcttttgatacagagaaagggtcnnnnnnnnnnnnaagtatttcagtgaaaacttggtgtaaagtctgaaacccatcttttgaaatgtattttcttcattgcaggtcccaccctaatcatcctggtgaaagtggttttctctatgggaaagctttggtttgcttcctacaaataacatgcct

SEQ ID NO: 194220 - DNA, 1164 bp, Homo Sapiens; identical to SEQ ID NO: 181356
  misc_feature (128)..(147): n is a, c, g, or t

SEQ ID NO: 194221 - DNA, 770 bp, Homo Sapiens; identical to SEQ ID NO: 187337
  misc_feature (76)..(85): n is a, c, g, or t
  misc_feature (329)..(346): n is a, c, g, or t

SEQ ID NO: 194222 - DNA, 963 bp, Homo Sapiens
tttgtacaaaaaagttggggaatattgccagtacaaatcatgttacagagttcccctaccttccagcatgctgtgtgtctcttcactcctagcctttcagaaacagttaatagagatggaccgcggcaagatacccaagctccagtggttccatactggcgcctgcctggtttaggcattatcatctacctgctgaaacagagtgctaatgatttcttcagctattatgacagtcatcgacagagtgtcagcaagctacaaaatgtagagcagcttcccccagatgagataaaagagttgtgtcagtctgtgatgcctgctggtgttgataaaatctccactgctcagaaatatgttctagcaagacggcgcttggtgaaggtgatcaacaatcgagctaaactgctttccctttgttcttttatcatagagacctgcctatttattctttggcgccatctggagtactacttgttacattgcatgcccacggattctcaagattccttatttgcctcgagaaccttgtttaaaagcagaagactgcaagattccttcgcctcagaaaccaatctagattttagaagtgggctggctatagtgagccaacatgatttagaccagcttcaggctgatgcaatcaacgcttttggagaatcactacaaaagaaacttctggacattgaaggattatattcaaaagttcgatctcgatatagtttcatacaggctcttgtcagacgtatccgtggcctcttgaggatatcaaggaactgagagcccgtgcttatgctcttctatgagagagatgaattggggagaattgtctccattttatagattagtttctttctaaattatgaccaaaaatattttgctatttctttctttgtatatggacatcttttctgtaaacttcttcccctagttccatcctcactagtaaaaaataaatacttttta

SEQ ID NO: 194223 - DNA, 512 bp, Homo Sapiens
ttgtacaaaaaagttggctgagagaccaaaaagttcatttttttaagtaccttggttaaagagtaaagattattcctcttattttttaaagaagaatgcactttaacaaacatagagctgcatgggcaattcaaacaaatctgtgaagtgcagtacccattcagaaatcacacttcctgaaaaccgttcaaaagcagagtccagacgggctgttgatctcactgcctgtaggttgaagctcagattctgatcaattttgagaggagcagggctgcttcaaaagagcaatgtgaatacagtcagaagcttcagactggtctgtaaaaatggcgggtcccgtatttaccactaactagcaaaactgacagaaaaactcacagagaaaaaatgtaagaatccttcctgctggtgtgcactccttacaatagacttttgcaaatggagttttacagtctatatttaaaaaaaattgtatgtttgtaacaaataaagtatgcagaaaagtgaatgac

SEQ ID NO: 194224 - DNA, 2393 bp, Homo Sapiens; identical to SEQ ID NO: 187346
  misc_feature (524)..(561): n is a, c, g, or t
  misc_feature (1050)..(1065): n is a, c, g, or t
  misc_feature (1171)..(1179): n is a, c, g, or t
  misc_feature (1603)..(1618): n is a, c, g, or t
  misc_feature (1709)..(1740): n is a, c, g, or t
  misc_feature (1809)..(1861): n is a, c, g, or t
  misc_feature (1944)..(1970): n is a, c, g, or t
  misc_feature (2135)..(2144): n is a, c, g, or t

SEQ ID NO: 194225 - DNA, 1247 bp, Homo Sapiens; identical to SEQ ID NO: 187347
  misc_feature (164)..(179): n is a, c, g, or t
  misc_feature (285)..(293): n is a, c, g, or t
  misc_feature (698)..(711): n is a, c, g, or t
  misc_feature (715)..(730): n is a, c, g, or t
  misc_feature (821)..(852): n is a, c, g, or t
  misc_feature (918)..(974): n is a, c, g, or t
  misc_feature (1056)..(1082): n is a, c, g, or t

SEQ ID NO: 194226 - DNA, 1050 bp, Homo Sapiens
gagcaatgcttttttataatgccaactttgtacaaaaaagttggatggaaacatctgccccacgtgccggaagccaagtggtggcgacaactgcgcgccactccgcggcctaccgcgcagatcctctacgtgtgtcctcgcgagacaagctcaccgaaatggccgcgtccagtcaaggaaactttgagggaaattttgagtcactggaccttgcggaatttgctaagaagcagccatggtggcgtaagctgttcgggcaggaatctggaccttcagcagaaaagtatagcgtggcaacccagctgttcattggaggtgtcactggatggtgcacaggtttcatattccagaaggttggaaagttggctgcaacagctgtgggaggtggattttttctccttcagcttgcaaaccatactgggtacatcaaagttgactggcaacgagtggagaaggacatgaagaaagccaaagagcagctgaagatccgtaagagcaatcagatacctactgaggtcaggagcaaagctgaggaggtggtgtcatttgtgaagaagaatgttctagtaactgggggatttttcggaggctttctgcttggcatggcatcctaaggaagatgacctcatgttcattgttcctggttttttccagccagcagcctctacactccatcataggacatcgagtccctcctcctcttctcccatgccttcttccctgccatggcaaatctgagtggcttctctaagcatctgctggtacaagtcaatgtggcaccatgagcttcatggtggcagaagagacaatagtccttagctctcctcccagtacaccccctacttggccagtctgtaggccaacaagaaggttcctttacccccatgcaagacacttatgagaacacattacaagatggctgaccgtggaggatgagtggatcctgaaaggttgtcccaaactgttgatttggaaaagaaataagcacataagataaccttattgtgtgctgcatggaaaggaactgaatacatttgccttttaagcatg

SEQ ID NO: 194227 - DNA, 786 bp, Homo Sapiens; identical to SEQ ID NO: 187352
  misc_feature (132)..(154): n is a, c, g, or t
  misc_feature (317)..(412): n is a, c, g, or t

SEQ ID NO: 194228 - DNA, 1476 bp, Homo Sapiens
taggaataaaagttaaaaggccccagagaaatgttgtcctttgtccacggcacctgcacttaccccttcccagaaagtgggcatgcagtttctcaggccaggcgagtgttcgttgctcactgaagaccagtgtttactagcaggattgtcgccagaagcagctgcattctccccggatgcagacctgccccgttggtagggactctgctcacacggaacatggacggttacacctgtgccgtggtgacgtccaccagcttctggatcatctcggcgtgggtgttgtggaagggcagcccatccacctccatgcccacgatgcccgtgacgccactccggactttgtgctgcaccaagatgcccagcattttttcttccttaatgaccgacgggagggcctgagtccaggcctgatctccaggtgccctggagggtccgactgctttcctcaggtactgactgtggacagcacatgagtacaggatgtagagtgcgcaggccagggcatagcctccccagttagaaacaccagcaatgacggcaaagtcagcctccacgtcgcaggcgatgacatccccgtgccgtatgtgcctcctcacagcctccttgactttacccatcccaagctcgttgcctccatcaccgactccagttgatgagattccaggaatcttcttcgcagcaagaaaaagatcgtcaatggggtcaaccaagtgcttgatgttcatcttccttgcattgtagtaattgccatcagcagctcttccggcacgctctatggccaccaggtggtcaaatctaggtgtctgcgggtccccatttttgcacaggaatgcctgagcagcttccactgatccaccttggtaagttaatatcgggatctgcgtcttcagaacacctctgaagaatgcattttgagggacacagagcgatcggtagcgggaggcaggtgagattcaccaggcttccagctcatgcctgataacacttccttgctcaacagcatcttcaacaatcttctggtgcaagttccaggctctctggtcaacgattatggcgacctccttctccaaggcctgcaggaaggcaaccagagcaacagctcctggtgggccatctgtctcttctggaggctcatgattgaaatgtgtggggaacccagtggtgatgagcactgagcgggcatgggacagcgagagagaggccttcagcagctcatctttacagagcaggtgcccaatcccccggttccctgggtctatgccgatcatagactctagttctctgatcttctgagaagcagagactgacgcgatgctgtagtgcagaggatcttgggaaatgtgatggacctctggaattctctctggggtgagacaaccaggtggagcctttgcatccttcaggtcagtcataactgtgcagcctgggatgctggcaaaagccagtggggtctcacagctccaacttttttgt

SEQ ID NO: 194229 - DNA, 1594 bp, Homo Sapiens
tttgtacaaaaaagttggtataaactggctgaagcccatccagactgtttgatgctgaacttcaccgttaagcttatttctgacgcagggtaccagggggagatcaccagtgtgtccacagcatgccagcagctagaagtgttctcgagagtgctccggacctctctagctacaattttagatggaggagaagaaaaccttgaaaaaaatctccctgagtttgccaagatggtgtgccacggggagcacacgtacctgtttgcccaggccatgatgtccgtgctggcccaggaggagcaggggggctccgctgtgcgcaggatcgcccaggaagtgcagcgctttgcccaggagaaaggtcatgacgccagtcagatcacactagccttgggcacagctgcctcctaccccagggcctgccaggctctcggggccatgctgtccaaaggagccctgaaccctgctgacatcaccgtcctgttcaagatgttcacaagcatggaccctcctccggttgaacttatccgcgttccagccttcctggacctgttcatgcagtcactctttaaaccaggggctcggatcaaccaggaccacaagcacaaatacatccacatcttggcgtacgcagcaagcgtggttgagacctggaagaagaacaagcgagtgagcatcaataaagatgagctgaagtcaacgtcaaaagctgtcgaaaccgttcacaatttgtgttgcaacgagaacaaaggggcctctgaactagtggcagaattgagcacactttatcagtgtattaggtttccagtggtagcaatgggtgtgctgaagtgggtggattggactgtatcagaaccaaggtactttcagctgcagactgaccatacccctgtccacctggcgttgctggatgagatcagcacctgccaccagctcctgcacccccaggtcctgcagctgcttgttaagctttttgagactgagcactcccagctggacgtgatggagcagcttgagttgaagaagacactgctggacaggatggttcacctgctgagtcgaggttatgtacttcctgttgtcagttacatccgaaagtgtctggagaagctggacactgacatttcactcattcgctattttgtcactgaggtgctggacgtcattgctcctccttatacctctgacttcgtgcaacttttcctccccatcctggagaatgacagcatcgcaggtaccatcaaaacggaaggcgagcatgaccctgtgacggagtttatagctcactgcaaatctaacttcatcatggtgaactaatttagagcatcctccagagctgaagcagaacattccagaacccgttgtggaaaaaccctttcaagaagctgttttaagaggctctggcagcgtcttgaaaatgggcaccgctgggaggaggtggatgacttctttacaaaggaaaatggtagcagcttcagtgagaaactgcccttacaacagtcccttctctgctgtcaatccaatactgctcccaaatcctgttttcagtgttcattttccctcaaggcaagcgctgggctcccacgacccctcagga

SEQ ID NO: 194230 - DNA, 1535 bp, Homo Sapiens; identical to SEQ ID NO: 187357

SEQ ID NO: 194231 - DNA, 945 bp, Homo Sapiens
cccgcagcaagggcacggaccgccggctctgagctgccagcatcaccagcacttccgcagctcattggggccaaaagtgctccaccaactccaggcacttgtttccaggcggttcattagtggctccgagaggtgtcccaccttcatcatgacggtcactaatgtgtgggaatcttcaatttctgtccaacgcctttccaggtgtgtgagcagttcagccagcagctcctgcgagtgctgctcctgtgagagggtggcacaggactctgccaggaaggccaggtgcttgtacttgagcttccgcatgcgccagcggacctcctgctccaccgactgcagctccttggaggccttggggatgcccagagcatacaggcttcccagcagcttcgagagggtaccatgccagaccgaggcaatctgactgttgagcagacagagaagttgatgaaagtgggcatcctgtatgagcaagcctttatcttctggcttctcagacagcaagtgagagagccggataagtaccattgctgcttgattgctgtccaagtcgtgactgccaccaagtagctccaggagctcctctggccttgtggccttcttgatgaggtggtccacctgcttctctatgtagggagtagatgctcgttccttctccaccggctccatcaaggaacctgggaggtgggaaatgggtgaggtggctgaggaagtcagagtcttatgggctacccaggcaagtctcagtcggccaactggagccatggcaggggcctgacgagcagcttctctcaggaggcacgtgcatcgctttaccaggtgagctgccatgatgtcctgggtggcagagagacaagactcctagcaagtgattccaaaccgcagcgagcaccaccgctgacctccatcccccgccctaacccaacttttttgtacaaagttggc

SEQ ID NO: 194232 - DNA, 1086 bp, Homo Sapiens; identical to SEQ ID NO: 187361
  misc_feature (110)..(124): n is a, c, g, or t
  misc_feature (141)..(156): n is a, c, g, or t

SEQ ID NO: 194233 - DNA, 1333 bp, Homo Sapiens; identical to SEQ ID NO: 181369
  misc_feature (798)..(814): n is a, c, g, or t

SEQ ID NO: 194234 - DNA, 2211 bp, Homo Sapiens; identical to SEQ ID NO: 187362
  misc_feature (248)..(264): n is a, c, g, or t

SEQ ID NO: 194235 - DNA, 950 bp, Homo Sapiens; identical to SEQ ID NO: 181370

SEQ ID NO: 194236 - DNA, 1486 bp, Homo Sapiens
actttgtacaaaaaagttggatggacactaacttccagaatgcttgttatatgtgagggcacaaagttatataagaataaaaacataaaaccaatgtttgttagtcttctggattttaatttttcacgtgtcttataatgaggaatgtctttgttttgtatagttgtgccacagaataatgaatttaaaagtcagtaggcttatcagggtgtaaaaatggatcttttaattggtataaaatctctttcttccccatttgaacagtgaaggagagcagggtccaaatggaagtcagaactctagctacagccaatcttaaaacattccgaagaattccatagtggaccacttggaaataaaccattggacagatttcagtaatgtcttcagtggaacacaaatgaaaatgaatagcttgtttctgtcaagcatattggaaagtgattttatttttgcaaaataagtttttctttaatatgattctagtacataattgattaaaatctcttgattataaatgtttggaaaggttctaaggggacctacagacagacatacatagacatttcaaaattaatagcttttgattagtataatatttcttaatttggataataaaaattgtagctttttattaagccaggaaacatgaagcataatttgtttaaaattctctttggtcattgagggaccaaaaaaggacgtaaaatttacagtcaatctatgagggtttttttccctccataagtttaactttaaaactgtatttaaggaatcaaatcttacaaaatcctggaagattttggtaatgatgttgataatttcagggaaattaatcaagtacctatattgatttaaaagtgtattttattcagtagtttgaggatcttgccatggaagatactagcccagcctagcagaaaagtgcaatatgtatagcatactttgacattttaaacatgatagtccataaccattttgaaatgctgggcaaactacatgaagttatttataattaattcacagctaatcaggcattttgaaagcttaattggattcaaaaaccataatgttggaatttggtaaaattttaatgttgatttttactgtgaaaaggtttttataagatatacacaccctagtttaatgttgtgtcttggtgtggatttacagatttactacaggtattctgaaccaggaacacaatcaggtttcaggccagtttgatactggctgtccttaattctaatatgagagtaggacatcatactaaatgttatgtcagtgggactgtactgtctgtggaacttagcaaattaatcattttcttcagacttgaaggagagtgataaataaaatttggagtcataggatattgatgcacaatttaaggattaaacatttttaatcaattgtggatgatggcttattaaatgttgacttcctagtataaaacccaacttttttgtacaaagttctttttatg

SEQ ID NO: 194237 - DNA, 1311 bp, Homo Sapiens
tgtacaaaaaagttggtgtattaatggctcctacatgtgtgtttttggcatccaaagtagaggaatttggagtagtttcaaatacaagattgattgctgctgctacttctgtattaaaaactagattttcatatgcctttccaaaggaatttccttataggatgaatcatatattagaatgtgaattctatctgttagaactaatggattgttgcttgatagtgtatcatccttatagacctttgctccagtatgtgcaggacatgggccaagaagacatgttgcttccccttgcatggaggatagtgaatgatacctacagaacggatctttgcctactgtatcctcctttcatgatagctttagcttgcctacatgtagcctgtgttgtacagcagaaagatgccaggcaatggtttgctgagctttctgtggatatggaaaagattttggaaataatcagggttattttaaaactatatgagcagtggaagaatttcgatgagagaaaagagatggcaaccattcttagtaagatgccaaaaccaaaaccacctccaaacagtgaaggagagcagggtccaaatggaagtcagaactctagctacagccaatcttaaaacattccgaagaattccatagtggaccacttggaaataaaccattggacagatttcagtaatgtcttcagtggaacacaaatgaaaatgaatagcttgtttctgtcaagcatattggaaagtgattttatttttgcaaaataagtttttctttaatatgattctagtacataattgattaaaatctcttgattataaatgtttggaaaggttctaaggggacctacagacagacatacatagacatttcaaaattaatagcttttgattagtataatatttcttaatttggataataaaaattgtagctttttattaagccaggaaacatgaagcataatttgtttaaaattctctttggtcattgagggaccaaaaaaggacgtaaaatttacagtcaatctatgagggtttttttccctccataagtttaactttaaaactgtatttaaggaatcaatcttacaaaatcctggaagattttggtaatgatgttgataatttcagggaaattaatcaagtacctatattgatttaaaagtgtattttattcagtagtttgaggatcttgccatggaagatactagccccagccctagcagaaaagtgcaatatgtatagcatactttgacattttaaacatgatagtccataaccattttgaaatgctgggcaaactacatgaaggtta

SEQ ID NO: 194238 - DNA, 1619 bp, Homo Sapiens; identical to SEQ ID NO: 187368

SEQ ID NO: 194239 - DNA, 1722 bp, Homo Sapiens; identical to SEQ ID NO: 187370
  misc_feature (1123)..(1268): n is a, c, g, or t
  misc_feature (1507)..(1515): n is a, c, g, or t

SEQ ID NO: 194240 - DNA, 695 bp, Homo Sapiens; identical to SEQ ID NO: 187371

SEQ ID NO: 194241 - DNA, 684 bp, Homo Sapiens
  misc_feature (606)..(626): n is a, c, g, or t
caactttgtacaaaaaagttggccacagtcccggtcccgccatgtcccagaaacaagaagaagagaaccctgcggaggagaccggcgaggagaagcaggacacgcaggagaaagaaggtattctgcctgagagagctgaagaggcaaagctaaaggccaaatacccaagcctaggacaaaagcctggaggctccgacttcctcatgaagagactccagaaagggcaaaagtactttgactcaggagactacaacatggccaaagccaagatgaagaataagcagctgccaagtgcaggaccagacaagaacctggtgactggtgatcacatccccaccccacaggatctgccccagagaaagtcctcgctcgtcaccagcaagcttgcgggtggccaagttgaatgatgctgcccggggctctgccagatcctgagacgcttcccctccctgccccacccgggtcctgtgctggctcctgccccttcctgcttttgcagccaggggtcaggaggtggctcgggtgtgggctggagaggcagaagccctttcctgttggtgtcccagcacatggagccccttgggctgagcaccaagaccttgaacnnnnnnnnnnnnnnnnnnnnnccaaataacagttgggagaaatatcaatgaaattctgggggtgggggtggggttgaaa

SEQ ID NO: 194242 - DNA, 1171 bp, Homo Sapiens
cataaagaaaactttgtacaaaaaagttggtgctctggctgcgcgcggagcgggctccggggggaagtcccgagacaaagggaagcgccgccgccgccgccccgctcggtcctccacctgtccgctacgctcgccggggctgcggccgcccgagggactttgaacatgtcggggatcgccctcagcagactcgcccaggagaggaaagcatggaggaaagaccacccatttggtttcgtggctgtcccaacaaaaaatcccgatggcacgatgaacctcatgaactgggagtgcgccattccaggaaagaaagggactccgtgggaaggaggcttgtttaaactacggatgcttttcaaagatgattatccatcttcgccaccaaaatgtaaattcgaaccaccattatttcacccgaatgtgtacccttcggggacagtgtgcctgtccatcttagaggaggacaaggactggaggccagccatcacaatcaaacagatcctattaggaatacaggaacttctaaatgaaccaaatatccaagacccagctcaagcagaggcctacacgatttactgccaaaacagagtggagtacgagaaaagggtccgagcacaagccaagaagtttgcgccctcataagcagcgaccttgtggcatcgtcagaaggaagggattggtttggcaagaacttgtttacaacatttttgcaaatctaaagttgctccatacaatgactagtcacctgggggggttgggcgggcgccatcttccattgccgccgcgggtgtgcggtctcgattcgctgaattgcccgtttccatacagggtctcttccttcggtcttttgtatttttgattgttatgtaaaactcgcttttattttaatattgatgtcagtatttcaactgctgtaaaattataaacttttatacttgggtaagtcccccaggggcgagttcctcgctctgggatgcaggcatgcttctcaccgtgcagagctgcacttggcctcagctggctgtatggaaatgcaccctccctcctgccgctcctctctagaaccttctagaacctgggctgtgctgcttttgagcctcagaccccagggcagcatctcggttctgcgccacttcctttgtgtttatatggcgttttgtctgtgttgctg

SEQ ID NO: 194243 - DNA, 1125 bp, Homo Sapiens; identical to SEQ ID NO: 181372

SEQ ID NO: 194244 - DNA, 981 bp, Homo Sapiens
ccaactttgtacaaaaaagttgggcaatgttttctaaatatcgttgatttaattgtaagcttctttttaatggaattcttggttaaaatgaattgatgattatgaatatccctaggaggagttagcatggagtttgatcattttctttgtactcctttaggacaaggaaacaggtatcagcatgatggtagcagaaaccttatcaccaaggtgcaggagctgacttcttccaaagagttgtggttccgggcagcggtcattgccgtgcccattgctggagggctgattttagtgttgcttattatgttggccctgaggatgcttcgaagtgaaaataagaggctgcaggatcagcggcaacagatgctctcccgtttgcactacagctttcacggacaccattccaaaaaggggcaggttgcaaagttagacttggaatgcatggtgccggtcagtgggcacgagaactgctgtctgacctgtgataaaatgagacaagcagacctcagcaacgataagatcctctcgcttgttcactggggcatgtacagtgggcacgggaagctggaattcgtatgacggagtcttatctgaactacacttactgaacagcttgaaggccttttgagttctgctggacaggagcactttatctgaagacaaactcatttaatcatctttgagagacaaaatgacctctgcaaacagaatcttggatatttcttctgaaggattatttgcacagacttaaatacagttaaatgtgttatttgctttaaaattataaaaagcaaagagaagactttgtacacactgtcaccagggttatttgcatccaagggagctggaattgagtacctaaataaacaaaaatgtgccctatgtaagcttctacatcttgatttattgtaaagatttaaaagaaatatatatattttgtctgaaatttaatagtgtctttcataaatttaactgggaaac

SEQ ID NO: 194245 - DNA, 1895 bp, Homo Sapiens; identical to SEQ ID NO: 181374
  misc_feature (526)..(832): n is a, c, g, or t
  misc_feature (1517)..(1566): n is a, c, g, or t
  misc_feature (1647)..(1676): n is a, c, g, or t

SEQ ID NO: 194246 - DNA, 448 bp, Homo Sapiens
actttgtacaaaaaagttggcagtgatcgacacattcgcatctggaatgtgtgctctggggcctgtctgagtgccgtggatgcccattcccaggtgtgctccatcctctggtctccccattacaaggagctcatctcaggccatggctttgcacagaaccagctagttatttggaagtacccaaccatggccaaggtggctgaactcaaaggtcacacatcccgggtcctgagtctgaccatgagcccagatggggccacagtggcatccgcagcagcagatgagaccctgaggctatggcgctgttttgagttggaccctgcgcggcgtcgggagcgggagaaggccagtgcagccaaaagcagcctcctccaccaaggcatccgctgaagaccaacccaacacctcagttgttttttatttttctaataaagtcatgtctcccttc

SEQ ID NO: 194247 - DNA, 1657 bp, Homo Sapiens; identical to SEQ ID NO: 187386

SEQ ID NO: 194248 - DNA, 886 bp, Homo Sapiens; identical to SEQ ID NO: 187391

SEQ ID NO: 194249 - DNA, 1550 bp, Homo Sapiens; identical to SEQ ID NO: 187396
  misc_feature (595)..(612): n is a, c, g, or t
  misc_feature (1087)..(1106): n is a, c, g, or t

SEQ ID NO: 194250 - DNA, 840 bp, Homo Sapiens; identical to SEQ ID NO: 181380

SEQ ID NO: 194251 - DNA, 1067 bp, Homo Sapiens
ctttgtacaaaaaagttggtgaggatcgttggatctctggcggggtgcagaactgagcccaggccacagtaccctattcacgctctgtgcttgtgccaagggggcaatggcggcttcctgtgttctactgcacactgggcagaagatgcctctgattggtctgggtacctggaagagtgagcctggtcaggtaaaagcagctgttaagtatgcccttagcgtaggctaccgccacattgattgtgctgctatctacggcaatgagcctgagattggggaggccctgaaggaggacgtgggaccaggcaaggcggtgcctcgggaggagctgtttgtgacatccaagctgtggaacaccaagcaccaccccgaggatgtggagcctgccctccggaagactctggctgacctccagctggagtatctggacctgtacctgatgcactggccttatgcctttgagcggggagacaaccccttccccaagaatgctgatgggactatatgctacgactccacccactacaaggagacttggaaggctctggaggcactggtggctaaggggctggtgcaggcgctgggcctgtccaacttcaacagtcggcagattgatgacatactcagtgtggcctccgtgcgtccagctgtcttgcaggtggaatgccacccatacttggctcaaaatgagctaattgcccactgccaagcacgtggcctggaggtaactgcttatagccctttgggctcctctgatcgtgcatggcgtgatcctgatgagcctgtcctgctggaggaaccagtagtcctggcattggctgaaaagtatggccgatctccagctcagatcttgctcaggtggcaggtccagcggaaagtgatctgcatccccaaaagtatcactccttctcgaatccttcaaaacatcaggtgtttgacttcacctttagcccagaagagatgaagcagctaaatgccctgaaacaaaattggagatatattgtgcctatgcttacggtggatgggagagagtccccaaggatgcaggcatcctctgtaccccttta

SEQ ID NO: 194252 - DNA, 1420 bp, Homo Sapiens; identical to SEQ ID NO: 187403

SEQ ID NO: 194253 - DNA, 932 bp, Homo Sapiens; identical to SEQ ID NO: 187404

SEQ ID NO: 194254 - DNA, 1629 bp, Homo Sapiens; identical to SEQ ID NO: 181383
  misc_feature (1405)..(1419): n is a, c, g, or t

SEQ ID NO: 194255 - DNA, 902 bp, Homo Sapiens
ccggctgatttgctgtaaaagctgagggttctcctggcccagctgctggagcagggcgggcagcagcgcagggttctgctgaatcacctgccgcatgttctggaactggggctggtcccgcaggaactccagggggttctctctgctgcttccgtggccggctgctccgatacctggctctcctggacagaaccgtgttccggctcggggctcccaggaattcccgtgagcagatactccacggctcggtgggggttgttgtagctggctctcagggcggccacgacccgctctcgctcatagcccatggacatgatctccgtcagcatcgtctcatactcagagcccgtcactagcgtggaggccgcgtcttcctctcgcccgctgctacctgaagagggaacagagcctgacacagactctggggacgtcgtgggggcggattcctctgatgggctcttgtcctctctggcggcaggtgggggatgggacatgcctgaggtgggggcaggcgggaaggatgtagaggactctggggcagctgtgggtgaggcctctgggggtgctgaggtaccctggccggctttggtcttggtcaccatgacgaccacaaagttcttctcatcgatgcgatagtccctgatagggacatcgtcactcaagatcttgccggcatagatgagtttctgtccagccacggggaaggcatcacgacccttctcagcttctatcttctcctttagcaccttcaccgtctcgtcaggctccatgcggatcttgaaggtctgctgctgcagcgttttgagcgtgatggtgacggccatggcggggcccgagcgacgcggcggccccgggatcctcacacaacaggcaactcacccaacttttttgtacaaagtggg

SEQ ID NO: 194256 - DNA, 1188 bp, Homo Sapiens
aaaactttcatggaataaaggttagggtggggggctaggtggcctggcttcctggcatcaatcgtcatcaaagttctgattcaggaggaagtggcagccaaagtttcatttttttcacacgcgaaataggcctggatgaccaggctctctgggaagcccagggctttccaacctctctatagcttctttctcctgcggcgtcacctggatgtagttcatctgcggggcctcctctcatatggcgcccacctccccctccacatctgagatgtccgccagctccccagggggctcgttcagcatctggatgaactgctcctggtgccggctgatttgctgtaaaagctgagggttctcctggcccagctgctggagcagggcgggcagcagcgcagggttctgctgaatcacctgccgcatgttctggaactggggctggtcccgcaggaactccagggggttctctcctgctgcttccgtggccggctgctccgatacctggctctcctggacagaaccgtgttccggctcggggctcccaggaattcccgtgagcagatactccacggctcggtgggggttgttgtagctggctctcagggcggccacgacccgctctcgctcatagcccatggacatgatctccgtcagcatcgtctcatactcagagcccgtcactagcgtggaggccgcgtcttcctctcgcccgctgctacctgaagagggaacagagcctgacacagactctggggacgtcgtgggggcggattcctctgatgggctcttgtcctctctggcggcaggtgggggatgggacatgcctgaggtgggggcaggcgggaaggatgtagaggactctggggcagctgtgggtgaggcctctgggggtgctgaggtaccctggccggctttggtcttggtcaccatgacgaccacaaagttcttctcatcgatgcgatagtccctgatagggacatcgtcactcaagatcttgccggcatagatgagtttctgtccagccacggggaaggcatcacgacccttctcagcttctatcttctcctttagcaccttcaccgtctcgtcaggctccatgcggatcttgaaggtctgctgctgcagcgttttgagcgtgatggtgacggccatggcggggcgccgagcgacgccaacttttttgtacaaagt

SEQ ID NO: 194257 - DNA, 808 bp, Homo Sapiens; identical to SEQ ID NO: 181384

SEQ ID NO: 194258 - DNA, 2330 bp, Homo Sapiens; identical to SEQ ID NO: 181386
  misc_feature (220)..(233): n is a, c, g, or t
  misc_feature (542)..(604): n is a, c, g, or t
  misc_feature (914)..(1138): n is a, c, g, or t

SEQ ID NO: 194259 - DNA, 1410 bp, Homo Sapiens
  misc_feature (851)..(860): n is a, c, g, or t
cccaggaagacttggcaaatgttagggctgttgctgaggggtcaccgggccagagctgggaaacttggaggcagaggctgtgggtagggactgagtttccttggtgatgtcttcaggcatgaaagctacggccccctcaagcagattagtgatagtcaagtctacacagccagtcttggccaggtctctctagatgacacccaatggcacatggggcaaaacttccttgactctctgagccagagttgccagttgcacatcaggagaaggaccaggggagggagggaaagaagactgggctgactgggggcgcaatctggggtgtctttgtcgcttcatgtgctctgctttgtcagctggagtgagccgtgtccctgtctggcccaattccttggccaccagctgttgtacacggagtgcaaactcctcattcgcttcccctagttggcgatgaacaggacgaagccaccttacttgatacaccgtgaaagggacgaaaagtgaccacagcagttctgagacccaggaggcatctgacaccgtcacagagaccaggggtctctgaacttgcagggtaagaggttgtaccacatcttggatagaaaatggccaggaactgaagcgcaggagcccctcccggccattggtggcctcttcctcagggaatagcagcagaggagtggggggaagcctcgtggaagcacagaatctcttgagtgactccaccaactccccccgcccattcatctccatgaagccccgagaccagcacacaaagctggggggactattgagtagaggctgggaaccaggagaagagaaagcaagaagaaaaatattgaggaaaatgnnnnnnnnnnctgacatgttgggtagaggatcggggttaggggtaaggctcagtatcctccatggggaacgcgagtggggacaggggggccttcagctgggccccagggaaccgccccgtggcgctctcggcctcgctctcactcacggtgctacaggtggtaagcaaattgactatgttgtggtcgaaaggtgtcacatggttggaaatgaggaccctgacactgtgatcccggagtccggagtcctcctgccgggccacgagccctagcaccgcacacatggtccgcactacgaatctgcgaaggacgctgtctggcagcgcgcagctgaccaggaagacgtggatcccgagaaagaggcgcaggacgaggaggcagaacccgactggcgcgtagagcagcagcacgagcagtaggaagcagtcacccggaagccggtgcgagtcaaagagccgctccggccccggccctgagggaagctccataactgctgcttcaggagcgcccggccgtcgccgccgccgccattttcgcgcccggccgcaggggctcttgccaa

SEQ ID NO: 194260 - DNA, 1233 bp, Homo Sapiens
ttggccagctgctgatttgcacataccaagaacatgaacattttccaacggagaatttccctagcttaataagaaaaagtccaagagccggtcacagcattaacatttagtgggagtgcagtgagaattgggtttaacttctggcatttctgggcttgtggcttgtggttgattttttatttactttgcaaaagtttctgataggcggagcatctagtttcaacttccttttgcagcaagttctttcctgcactaatcacaattcttggaagaggagaactggacgttgtgaacagagttagctggtaaatgtcctcttaaaagatccaaaaaatgagacttctagcaaagattatttgccttatgttatgggctatttgtgtagcagaagattgcaatgaacttcctccaagaagaaatacagaaattctgacaggttcctggtctgaccaaacatatccagaaggcacccaggctatctataaatgccgccctggatatagatctcttggaaatgtaataatggtatgcaggaagggagaatgggttgctcttaatccattaaggaaatgtcagaaaaggccctgtggacatcctggagatactccttttggtacttttacccttacaggaggaaatgtgtttgaatatggtgtaaaagctgtgtatacatgtaatgaggggtatcaattgctaggtgagattaattaccgtgaatgtgacacagatggatggaccaatgatattcctatatgtgaagttgtgaagtgtttaccagtgacagcaccagagaatggaaaaattgtcagtagtgcaatggaaccagatcgggaataccattttggacaagcagtacggtttgtatgtaactcaggctacaagattgaaggagatgaagaaatgcattgttcagacgatggtttttggagtaaagagaaaccaaagtgtgtggaaatttcatgcaaatccccagatgttataaatggatctcctatatctcagaagattatttataaggagaatgaacgatttcaatataaatgtaacatgggttatgaatacagtgaaagaggagatgctgtatgcactgaatctggatggcgtccgttgccttcatgtgaagaaaaatcatgtgataatccttatattccaaatggtgactactcccctttaagattaaacacagaactggagatgaaatcacgtaccagtgtagaaatggttttatcctgc

SEQ ID NO: 194261 - DNA, 2542 bp, Homo Sapiens; identical to SEQ ID NO: 187415

SEQ ID NO: 194262 - DNA, 872 bp, Homo Sapiens; identical to SEQ ID NO: 181388
  misc_feature (775)..(783): n is a, c, g, or t

SEQ ID NO: 194263 - DNA, 569 bp, Homo Sapiens
ttggcgaagcctccaccgctacccgcaccctaaatcccagaggttggccccctgaggtgcctctctgctcctgtcttttgtttggatgccggcgctgctgcctgtggcctcccgccttttgttgctaccccgagtcttgctgaccatggcctctggaagccctccgacccagccctcgccggcctcggattccggctctggctacgttccgggctcggtctctgcagcctttgttacttgccccaacgagaaggtcgccaaggagatcgccagggccgtggtggagaagcgcctagcagcctgcgtcaacctcatccctcagattacatccatctatgagtggaaagggaagatcgaggaagacaatgaggtgctgatgatgattaaaacccaaagttccttggtcccagctttgacagattttgttcgttctgtgcacccttacgaagtggccgaggtaattgcattgcctgtggaacaggggaactttccgtacctgcggtgggtgcgccaggtcacagagtcagtttctgactctatcttttttttgccatgatgagccctgttca

SEQ ID NO: 194264 - DNA, 959 bp, Homo Sapiens; identical to SEQ ID NO: 187423
  misc_feature (785)..(810): n is a, c, g, or t

SEQ ID NO: 194265 - DNA, 958 bp, Homo Sapiens; identical to SEQ ID NO: 181392
  misc_feature (369)..(391): n is a, c, g, or t
  misc_feature (609)..(618): n is a, c, g, or t

SEQ ID NO: 194266 - DNA, 1231 bp, Homo Sapiens; identical to SEQ ID NO: 181393
  misc_feature (170)..(180): n is a, c, g, or t
  misc_feature (620)..(632): n is a, c, g, or t

SEQ ID NO: 194267 - DNA, 798 bp, Homo Sapiens; identical to SEQ ID NO: 187425
  misc_feature (345)..(360): n is a, c, g, or t

SEQ ID NO: 194268 - DNA, 925 bp, Homo Sapiens
gattttcagattattttaagaaagcagctagaacttttaaggaacagggctgatgacagcagacatgtaaggccatgttatgatatttatccattagctctgtcttcttcctgactcttttaatccctcctccccatcaatccgggcaaaagaagatatctaactccaggctgtttcgagtcctcccttgcaaggaaacactgtatcactcatggcactgctttttccatgtttccctcaggaggtccagggtcgagaccctcgtgaaagctagtcatccacagtgatgtttcggaaaaggtaggccatggactctccattgtggattctccgaatggcttcagaaagaatcaaactgatatccacagtctttatcttgggacattgcagcttctgaacctcatgagggacagtattcgtcaccaccacctcgtctacggaggactcctcaatcaggcgaggggcctctgcagacaggatgccgtgggtggccataacatagatcttataggcgcctctctctttcaggatctccgcggcagcaacaaaactctccacatcgtcaataatgtcatccacgatgattgcgatgcggcctccaacatctccaactacagttatcggtggcttctctttggccatcatcaatggcaactccaggcctgggtgcacagtagcatttttgaccataggcggggagtgacgaccatcgtccatgtccagttccgtgcactgagcttccccgtgaatgacggccaaacccagacgcagtctctccgcataggactgggccctctttgcagcatcaggagacttagctacaatgactgcatttctgtaatttggaatttcttcctggatatactgaagcaggaaaggtgaggctctaaggttgtccacaggaaagctgaaaaagccttgccaa

SEQ ID NO: 194269 - DNA, 412 bp, Homo Sapiens; identical to SEQ ID NO: 187429
  misc_feature (165)..(173): n is a, c, g, or t

SEQ ID NO: 194270 - DNA, 1889 bp, Homo Sapiens; identical to SEQ ID NO: 187431

SEQ ID NO: 194271 - DNA, 856 bp, Homo Sapiens; identical to SEQ ID NO: 187438

SEQ ID NO: 194272 - DNA, 1793 bp, Homo Sapiens; identical to SEQ ID NO: 187442

SEQ ID NO: 194273 - DNA, 1673 bp, Homo Sapiens; identical to SEQ ID NO: 181400
  misc_feature (317)..(333): n is a, c, g, or t

SEQ ID NO: 194274 - DNA, 837 bp, Homo Sapiens
  misc_feature (538)..(593): n is a, c, g, or t
  misc_feature (674)..(712): n is a, c, g, or t
actttgtacaaaaaagttgggtcagataaaactgatacatgatgtagttataaaaatgctgttatgaagaaaaaaggaatgcttttttcctcggtggcctttgataaaaatatgaatgattgactctcagagttggaggataaactaatcatcttctagcacagccctgttgtgttgcaggagaggaatcaggctaaagtctgctggtatttcagtgacagattaaaactttctaacagtggcctagtgctttctccattgtaatgtactgaaaggaagttgttcatggatcagaaatgtgggaggcccttccttgcccaaggcaagtcgctgtagatggttaaactgataccaaggataggtaagggaaattccaaattccattggaagatggccttttactgacactgcagacatgtagataacaatagtttaatgtcctctgaaaaggtaaaaattccataaatccttgcaaacaatttttagcaatattgtttattgctaccacagccaagaatgggtatttcaaagccagggnnnnnnnnnnnnnnnnnnnnnnnnnnnnnnnnnnnnnnnnnnnnnnnnnnnnnnnngggggggaccttttaatttgggaagaaaatgctgagtatacttttctttcacaaccattgcaaacccaggtagccctggannnnnnnnnnnnnnnnnnnnnnnnnnnnnnnnnnnnnnnatggttcaagacttttgcaatacatgaattaaaaataagcagttctttaaagcatagcgctctaaaaactattcttagtttataccctcaaaagttgggtctttcatgaaacacagtggtttgaa

SEQ ID NO: 194275 - DNA, 656 bp, Homo Sapiens; identical to SEQ ID NO: 187453

SEQ ID NO: 194276 - DNA, 1352 bp, Homo Sapiens; identical to SEQ ID NO: 187456

SEQ ID NO: 194277 - DNA, 574 bp, Homo Sapiens; identical to SEQ ID NO: 187457

SEQ ID NO: 194278 - DNA, 1003 bp, Homo Sapiens
ttgggccaacctaaaatacgtttccctgggaattttggtctttcagactaccagtttggttctaacaatgcgttattccagaactttaaaagaagaaggacctcgttatctatcttctacagcagtggttgttgctgaacttttgaagataatggcctgcattttattggtctacaaagacagcaaatgtagtctaagagcactgaatcgagtactacatgatgaaattcttaataaacctatggaaacacttaaacttgctattccatcagggatctatactcttcagaataatttactgtatgtggcactatcaaatctagatgcagctacttatcaggtcacgtatcagttaaaaattcttacaacagcattattttctgtgtctatgcttagtaaaaaattgggtgtataccagtggctgtccctagtaattttgatgacaggagttgcttttgtacagtggccctcagattctcagcttgattctaaggaactttcagctggttctcaatttgtaggactcatggcagttctcacagcatgtttttcaagtggctttgctggggtttactttgagaaaatcttaaaagaaacaaaacaatcagtgtggataagaaatattcagcttggtttctttggaagtatatttggattaatgggtgtatacatttatgatggagaactggtatcaaagaatggattttttcagggatataaccgactgacctggatagtagttgttcttcaggcacttggaggccttgtaatagctgctgttattaagtatgcagataatattttaaaaggatttgcaacctctttatcgataatattatcaacattgatctcctatttttggcttcaagattttgtgccaaccagtgtctttttccttggagccatccttgtaataacagctacttttttgtatggttatgatcccaaacctgcaggaaatcccactaaagcatagttgtatactatctttaactggtttttc

SEQ ID NO: 194279 - DNA, 403 bp, Homo Sapiens
ttggcgccgagcgggtgcgggtgcgggcgcatcggccatcaccgcgcggccgcgcagcggacaccgtgcgtaccggcctgcggcgcccggccaccggggcggaccgcggaacccgaggccatgtcccatgaaaagagttttttggtgtctggggacaactatcctccccccaaccctggatatccgggggggccccagccacccatgcccccctatgctcagcctccctaccctggggccccttacccacagccccctttccagccctccccctacggtcagccagggtacccccatggccccagcccctacccccaagggggctacccacagggtccctacccccaagggggctacccacagggcccctacccacaaaagggctacccacagggcccctacc

SEQ ID NO: 194280 - DNA, 749 bp, Homo Sapiens
ctttgtacaaaaaagttggcacagccgtctgcttcaccgtcgtcatcttctccatgcagacccgctacgacttcacctcatgcatgggcgtgctcctggtgagcatggtggtgctcttcatcttcgccattctctgcatcttcatccggaaccgcatcctggagatcgtgtacgcctcactgggcgctctgctcttcacctgcttcctcgcagtggacacccagctgctgctggggaacaagcagctgtccctgagcccagaagagtatgtgtttgctgcgctgaacctgtacacagacatcatcaacatcttcctgtacatcctcaccatcattggccgcgccaaggagtagccgagctccagctcgctgtgcccgctcaggtggcacggctggcctggaccctgcccctggcacggcagtgccagctgtacttcccctctctcttgtccccaggcacagcctagggaaaaggatgcctctctccaaccctcctgtatgtacactgcagatacttccatttggacccgctgtggccacagcatggcccctttagtcctcccgcccccgccaaggggcaccaaggccacgtttccgtgccacctcctgtctactcattgttgcatgagccctgtctgccagcccaccccagggactgggggcagcaccaggtcccggggagagggattgagccaagaggtgagggtgcacgtcttccctcctgtcccagctccccagcctggcgtagag

SEQ ID NO: 194281 - DNA, 923 bp, Homo Sapiens
tttgtacaaaaaagttgggaaatcttctccctggagatgagcaagaccgaggcgctgacgcaggccttccggcggtccatcggcgttcgcatcaaggaggagacggagatcatcgaaggggaggtggtggagatccagattgatcgaccagcaacagggacgggctccaaggtgggcaaactgaccctcaagaccacagagatggagaccatctacgacctgggcaccaagatgattgagtccctgaccaaggacaaggtccaggccggggacgtgatcaccatcgacaaggcgacgggcaagatctccaagttgggccgctccttcacacgcgcccgcgactacgacgctatgggctcccagaccaagttcgtgcagtgcccagatggggagctccagaaacgcaaggaggtggtgcacaccgtgtccctgcacgagatcgacgtcatcaactctcgcacccagggcttcctggcgctcttctcaggtgacacaggggagatcaagtcagaagtccgtgagcagatcaatgccaaggtggctgagtggcgcgaggagggcaaggcggagatcatccctggagtgctgttcatcgacgaggtccacatgctggacatcgagagcttctccttcctcaaccgggccctggagagtgacatggcgcctgtcctgatcatggccaccaaccgtggcatcacgcgaatccggggcaccagctaccagagccctcacggcatccccatagacctgctggaccggctgcttatcgtctccaccaccccctacagcgagaaagacacgaagcagatcctccgcatccggtgcgaggaagaagatgtggagatgagtgaggacgcctacacggtgctgacccgcatcgggctgggagacgtcactgcgctacgccatccagctcatcacag

SEQ ID NO: 194282 - DNA, 662 bp, Homo Sapiens
ctttgtacaaaaaagttggcacatagggagcagagggaaggttccctgcaggtgggcaatgaggcccctgtgaccggctcctccccgctgggcgccacgcagctggacactgatggagccctgtggcttgggggcctgccggagctgcccgtgggcccagcactgcccaaggcctacggcacaggctttgtgggctgcttgcgggatgtggtggtgggccggcacccgctgcacctgctggaggacgccgtcaccaagccagagctgcggccctgccccaccccatgagctggcaccagagccccgcgcccgctgtaattattttctatttttgtaaacttgtcgctttttgatatgattttcttgcctgagtgttggccggagggactgctggcccggcctcccttccgtccaggcagccgtgctgcagacagacctagtgctgagggatggacaggcgaggtggcagcgtggagggctcggcgtggatggcagcctcaggacacacacccctgcctcaaggtgctgagcccccgccttgcactgcgcctgccccacggtgtccccgccgggaagcagccccggctcctgaatcaccctcgctccgtcaggcgggactcgtggcccataaaggaaggcgctgctgaagtctgatggggccc

SEQ ID NO: 194283 - DNA, 2775 bp, Homo Sapiens; identical to SEQ ID NO: 187464
  misc_feature (253)..(310): n is a, c, g, or t

SEQ ID NO: 194284 - DNA, 1547 bp, Homo Sapiens; identical to SEQ ID NO: 187468
  misc_feature (417)..(426): n is a, c, g, or t
  misc_feature (648)..(658): n is a, c, g, or t
  misc_feature (1040)..(1066): n is a, c, g, or t

SEQ ID NO: 194285 - DNA, 1219 bp, Homo Sapiens; identical to SEQ ID NO: 181408
  misc_feature (253)..(267): n is a, c, g, or t
  misc_feature (560)..(706): n is a, c, g, or t
  misc_feature (708)..(829): n is a, c, g, or t
  misc_feature (1022)..(1030): n is a, c, g, or t

SEQ ID NO: 194286 - DNA, 1529 bp, Homo Sapiens
  misc_feature (1220)..(1260): n is a, c, g, or t
ttgggaatcatttattgagtctgtgcccctccttaaatcactagaggtgtcagaacgaatgaagattgtggatgtaataggagagaagatctataaggatggagaacgcataatcactcagggtgaaaaggctgatagcttttacatcatagagtctggcgaagtgagcatcttgattagaagcaggactaaatcaaacaaggatggtgggaaccaggaggtcgagattgcccgctgccataaggggcagtactttggagagcttgccctggtcaccaacaaacccagagctgcctcagcttatgcagttggagatgtcaaatgcttagttatggatgtacaagcattcgagaggcttctggggccctgcatggacatcatgaagaggaacatctcacactatgaggaacagctggtgaagatgtttggctccagcgtggatctgggcaacctcgggcagtaggtgtgccacaccccagagccttcttagtgtgacaccaaaaccttctggtcagccacagaacacatacagaaaacagacatgacagaactgttcctgccgttgccgccactgctgccattgctgtggttatgggcatttagaaaacttgaaagtcagcactaaaggatgggcagaggttcaacccacacctccactttgcttctgaaggcccattcattagaccacttgtaaagattactccaacccagtttttatatctttggttcaaaacggcatgtctctccaacaatttaagtgcctgatacaaagtccaaagtataaacatgctccctttcctctcttgctgctactcttgcttttggaagttaccacagggtctgcagaaacctgttgtataactgtagacactctctaatggttctcaaaggaggaaatgtagccttcagtctcctcatttgtcctttgaggaagtccacatttgttcacagttgcagcctttggttttacagtgggaaatggtggtggatgatatggacatatgtagcccagtggcattgtactttctgctgacagctgcacacattacagctgtctccaaacccacagtgatgcttagggaaagaccctgctcaggacccagcaggtcagcaccccagagcagactgataggtccgtgggacccatgttagagcagaaaatttgggctcagcacattttactgttagtagagagccaggaaacgttttctgggttgggnnnnnnnnnnnnnnnnnnnnnnnnnnnnnnnnnnnnnnnnnaacctctgtgcagtttgtatgaatgaattgctatacatttataaggagccagggtctggagggttgctatcactttgtccagcccaaataccttcctgggcaactcctaccatttgtttgcagttgcctctactagctgatggcagtatgctggaaagaggttgtactataaagagagttctttccttctactccagagttgttgtgtagctttgccattgaaccgatcaatttttaaactctttaaagaagcagcagctatttttttg

SEQ ID NO: 194287 - DNA, 1269 bp, Homo Sapiens; identical to SEQ ID NO: 187474

SEQ ID NO: 194288 - DNA, 900 bp, Homo Sapiens; identical to SEQ ID NO: 187480

SEQ ID NO: 194289 - DNA, 1549 bp, Homo Sapiens; identical to SEQ ID NO: 187481
  misc_feature (411)..(463): n is a, c, g, or t
  misc_feature (1159)..(1200): n is a, c, g, or t

SEQ ID NO: 194290 - DNA, 1555 bp, Homo Sapiens; identical to SEQ ID NO: 187482
  misc_feature (411)..(463): n is a, c, g, or t
  misc_feature (1159)..(1231): n is a, c, g, or t

SEQ ID NO: 194291 - DNA, 349 bp, Homo Sapiens
ttaacctctgagtataaagcatcagtgggcagaatcaatgtggggagggaaatgactaatgaagctaattaaaagaagcattcaaatctgctttctaccctcattaacaattagcagggcactggccagagtttgtaccctgtgttttaccttaacaacattctatttgctctttgtatatttaagtgttgtaaggaaacgtgtttcaatcaaaactgaccatgagataaaggaaagagatgtggcttttgtgatattctatcacaaacacttattgtatctctgtaaaatacaatgtatgtatgcatgtaagtgtttttgtcctaatgttgctactcccatggcaaag

SEQ ID NO: 194292 - DNA, 1632 bp, Homo Sapiens; identical to SEQ ID NO: 187487
  misc_feature (604)..(700): n is a, c, g, or t

SEQ ID NO: 194293 - DNA, 961 bp, Homo Sapiens; identical to SEQ ID NO: 187488

SEQ ID NO: 194294 - DNA, 2111 bp, Homo Sapiens; identical to SEQ ID NO: 187489

SEQ ID NO: 194295 - DNA, 547 bp, Homo Sapiens
cacttgaaggtcagcagtaagtgtaggatgcccagctctgccgtccagtccctctggaacaagttgacgcagatctagccattggcgcccacgttcgggtggaagatcatggtcaggaagtagccctagggtggggaggcagggaagtccttccccagcaggagtttcatgcggaacagacctccagcatatggggtcccctcagggacctcgatggtgacctggaggtcggtgaggtcctcctcgttgggaaagaccttgatgccatcgggtgggtctgcggtcagtgtcgtcacctccttgtacaccaggcggatgatgtgcgggggtaggttctccacgttggagttcatggctgcagccgcccgggggcgggtccccccggcccccttcctgcgttattcggtccgccggccggggcggggggcccaactgctgccgctgcggccctggagaggccccggcggccccgctccgctccccgctgcctccgacgtccgccgcgcacagcgtagcccaacttttttgtacaaagttggctttatag

SEQ ID NO: 194296 - DNA, 1544 bp, Homo Sapiens; identical to SEQ ID NO: 187491
  misc_feature (1353)..(1367): n is a, c, g, or t

SEQ ID NO: 194297 - DNA, 1296 bp, Homo Sapiens; identical to SEQ ID NO: 187496

SEQ ID NO: 194298 - DNA, 1075 bp, Homo Sapiens; identical to SEQ ID NO: 187497

SEQ ID NO: 194299 - DNA, 677 bp, Homo Sapiens
ttggcgatttttcagaaatagacgagtctgatgatacagacgattctggtgttagttctctgtagaaataactccaagaacacttttaatagtttattttcacattgaaaatcagatttgctccagcctcaaagagtatatttatgtaaaattaggtaagcgatatagaagcaagctgcactttttttctaaatgggaaggtattaaaaaagaaaagtctcattttagtaacatagtcttccttaaactctatgccacttgtaagatttctgaaaactgaagacatagaagggaaagggcttgatatgaacgacagctttgctggtaaataaacccaactgaacctaagattatctaaggtaacctctttttctagtcttttattgtgtgaacagttacctcctgctgagttgttggcagaatttccatataatcttgcttatgaccatttctacattatttgtatcatcttttagaagtcttacccaggttgatataggttaccgttctctagatctgtgtctccaattcttcttacatggcattaggtattttaagcttgttttttttcagacatcgtatagtcaattcttgaatgtgttgagaggtgctatatcattgtaagctttattcttcttctctgaatgattagcttgtttaaattttaccttaaattc

SEQ ID NO: 194300 - DNA, 1475 bp, Homo Sapiens
ttggattctttcttcccaccatggggttcagttactgagaagaccctgagattctgtttcttaaagcagcagcaatagaccaggtgtacagtgcctccagcctacccatgtctctaagatgtgttggtgtgatttggtcttgtggcactgccaaagggatcgataagcagagaccccatgcttcagatcaagagcctgatgaaagtagttcaaagatgcgatgccctttctcaccatccctttccagaaatatgaacagggattcatcacagaccctgtggtcctcagccccaaggatcgcgtgcgggatgtttttgaggccaaggcccggcatggtttctgcggtatcccaatcacagacacaggccggatggggagccgcttggtgggcatcatctcctccagggacattgattttctcaaagaggaggaacatgactgtttcttggaagagataatgacaaagagggaagacttggtggtagcccctgcaggcatcacactgaaggaggcaaatgaaattctgcagcgcagcaagaagggtaagtcctagagctgggaaagggcctggaactaatgcctagggtcctgattcatgtcctgccctgaccacaggaaagttgcccattgtaaatgaagatgatgagcttgtggccatcattgcccggacagacctgaagaagaatcgggactacccactagcctccaaagatgccaagaaacagctgctgtgtggggcagccattggcactcatgaggatgacaagtataggctggacttgctcgcccaggctggtgtggatgtagtggttttggactcttcccagggaaattccatcttccagatcaatatgatcaagtacatcaaagacaaataccctaatctccaagtcattggaggcaatgtggtcactgctgcccaggccaagaacctcattgatgcaggtgtggatgccctgcgggtgggcatgggaagtggctccatctgcattacgcaggaaggtaagaatatactttgatagggcccacagagaccccagtttcaggccccacataccttggaaccaagcactcttatggggacaatagagccctccaataggggcaaccctggggccaaattggcctcttggatgggtgacatggctggaagcaagacaaggtcttgtcatccatcacctgccactcccttgcctagcctggccttcttgctcctgctctgcaccttctctaaactctggtctgtttgttttatttagtggctcccaagatccctccagacataaagtcccacagccccaaatgcccttctactgtcacgggttgctatagtaagtccagcccggcccactggcccggcccagctgcccactgcccggctgcttggttgacgtagctgtagctcccggggtttgtggtgctgatgggtgggcaaggccaactgatacacagaccatggtttgggggtggtgctc

SEQ ID NO: 194301 - DNA, 894 bp, Homo Sapiens
gatggaatttccctgggaagagtccaaaaccactacatccacaccagcctgggcgagcaagtccagcctatacttgtcatcctcatgagtgccaatggctgccccacacagcagctgtttcttggcatctttggaggctagtgggtagtcccgattcttcttcaggtctgtccgggcaatgatggccacaagctcatcatcttcatttacaatgggcaactttcccttcttgctgcgctgcagaatttcatttgcctccttcagtgtgatgcctgcaggggctaccaccaagtcttccctctttgtcattatctcttccaagaaacagtcatgttcctcctctttgagaaaatcaatgtccctggaggagatgatgcccaccaagcggctccccatccggcctgtgtctgtgattgggataccgcagaaaccatgccgggccttggcctcaaaaacatcccgcacgcgatccttggggctgaggaccacagggtctgtgatgaatccctgttcatatttcttcactttccgaacttcattggcctggaattcaggtgtacagttgtggtggatgaagccaataccgcctgtaagcgccattgctatggccatcccagcctctgtgactgtgtccatgggagaggaaaccagtggggtcttaagagtgattttcttggtcagagcagaagtcaggtccacctggtctgcagtgaagtcgatgtacccagggagaatgagaaagtcattgtaggtgaggccgtctccgcagttgaagagctgctgtgctgtgagtccgtcgtctggcacgtaggacgtgcccccactaatcaggtagtcggccatggccaacacaggacaccgccgcgtgtctccgccaacttttttgtacaaagt

SEQ ID NO: 194302 - DNA, 1623 bp, Homo Sapiens
ctttgtacaaaaaagttggtctcggagacacgcggcggtgtcctgtgttggccatggccgactacctgattagtgggggcacgtcctacgtgccagacgacggactcacagcacagcagctcttcaactgcggagacggcctcacctacaatgactttctcattctccctgggtacatcgacttcactgcagaccaggtggacctgacttctgctctgaccaagaaaatcactcttaagaccccactggtttcctctcccatggacacagtcacagaggctgggatggccatagcaatggcgcttacaggcggtattggcttcatccaccacaactgtacacctgaattccaggccaatgaagttcggaaagtgaagaaatatgaacagggattcatcacagaccctgtggtcctcagccccaaggatcgcgtgcgggatgtttttgaggccaaggcccggcatggtttctgcggtatcccaatcacagacacaggccggatggggagccgcttggtgggcatcatctcctccagggacattgattttctcaaagaggaggaacatgactgtttcttggaagagataatgacaaagagggaagacttggtggtagcccctgcaggcatcacactgaaggaggcaaatgaaattctgcagcgcagcaagaagggaaagttgcccattgtaaatgaagatgatgagcttgtggccatcattgcccggacagacctgaagaagaatcgggactacccactagcctccaaagatgccaagaaacagctgctgtgtggggcagccattggcactcatgaggatgacaagtataggctggacttgctcgcccaggctggtgtggatgtagtggttttggactcttcccagggaaattccatcttccagatcaatatgatcaagtacatcaaagacaaataccctaatctccaagtcattggaggcaatgtggtcactgctgcccaggccaagaacctcattgatgcaggtgtggatgccctgcgggtgggcatgggaagtggctccatctgcattacgcaggaagtgctggcctgtgggcggccccaagcaacagcagtgtacaaggtgtcagagtatgcacggcgctttggtgttccggtcattgctgatggaggaatccaaaatgtgggtcatattgcgaaagccttggcccttggggcctccacagtcatgatgggctctctcctggctgccaccactgaggcccctggtgaatacttcttttccgatgggatccggctaaagaaatatcgcggtatgggttctctcgatgccatggacaagcacctcagcagccagaacagatatttcagtgaagctgacaaaatcaaagtggcccagggagtgtctggtgctgtgcaggacaaagggtcaatccacaaatttgtcccttacctgattgctggcatccaacactcatgccaggacattggtgccaagagcttgacccaagtccgagccatgatgtactctggggagcttaagtttgagaagagaacgtcctcagcccaggtggaaggtggcgtccatagcctccattcgtatgagaagcggcttttctgaaaagggatccagcacacctcctcgg

SEQ ID NO: 194303 - DNA, 950 bp, Homo Sapiens; identical to SEQ ID NO: 187502

SEQ ID NO: 194304 - DNA, 901 bp, Homo Sapiens; identical to SEQ ID NO: 187505

SEQ ID NO: 194305 - DNA, 1379 bp, Homo Sapiens; identical to SEQ ID NO: 181413
  misc_feature (91)..(128): n is a, c, g, or t
  misc_feature (864)..(872): n is a, c, g, or t

SEQ ID NO: 194306 - DNA, 1195 bp, Homo Sapiens
  misc_feature (278)..(286): n is a, c, g, or t
ttggctcagggaactgttggaggcgtgttcatcacgacggcaggttccacgtctaacggcacaaggttctctgccagtgacctgaccaacggtgcagatgggatgctggccacaagctccaatgggtctcagtacagcggctccagggtggagactccggtgtcctacgtcggggaggacgacgaggaggacgatgacttcaacgagaatgacgaggacgactgacgtcctccccacttcagattcggcttcaggaaaacgtttagcgaaaagaaacnnnnnnnnnaatgtgggttttctgtttccttttggcctactcccaagaagatattggtaagctattgaatttagatatgcacctctgataagcaaggattgtttcccgtaggattaggacgtgctgtggatgtgtgttttgataccagtgtgctgatgcagagcgtttatttacttgttaggattttgtgttttcatttgctatttttctttaagtgcagagttcatttttgcccctgaaaagtttttgctgagtttgctgaagaaattgtatttcaaccacatccatgaaaataaaacacctcctgttgtggatggtgagcccctgatgccgcttatttgccgtgagtttggacggcacccctgctggcggatagcaagactctgtggagtttgttcagtggtacggtgtccaagcaaacagcagaatgcaactttctaaacagccccaagcaaacagcagaattcaactttttaaacaataaacaccatcaaccttattgactttattgtcccttaaattatattgactgttgtgattccatcaagtttgtacactcttttctctccctgttttgcagcaacaaattgcgaagtgcttttgtttgtttgttttcgtttggttaaagcttattgccatgctggtgcggctatggagactgtctggaaggcttggaatggtttattgcttatggtaaaatttgcctgatttcttacaggcagcgtttggaaaccttttattatatagttgtttacatacttataagtctatcatttaaagacatgtactgaaacaaatgtatttgtttcataagcatcttcctgtaatctattataaaattgaaattaaatatagagaatgttttaacaattttttaactcaaaatttgtcaatcatttttaatagttctttttttat

SEQ ID NO: 194307 - DNA, 1882 bp, Homo Sapiens; identical to SEQ ID NO: 187507

SEQ ID NO: 194308 - DNA, 1355 bp, Homo Sapiens; identical to SEQ ID NO: 187515

SEQ ID NO: 194309 - DNA, 809 bp, Homo Sapiens
actttgtacaaaaaagttggctccggcttgtcctcatctctacccatcccctgatgcccaggtcaccgggagggctgctgggagcctctcctgtccccgccgggcagtgtcactgagtccttgaaatcctcccctgccccgcgggtctctggattgggacgcacagtgcagttgaggtctgcgtcgggcttggcttttcacaaaggctgatgtcttaactgtcacccatatggtccctgggccaccgggcagcctggggcggtgtgtgtgccatgtcacagcatggcctctcggccttgggaaggaaggcagtgcctgctctgctgtgagccgccaggaaccctcctcctgtcaatgggggtgtagtatttttgccaaaatatcatgttcaatttcagtagtttgatcagttgaaggctagaagtgtgaagtgcagatgagtgtgtgttcttccccaaggtccccccacagctccaggacaccgctgtcctggcatttgtggccactcactttgtaggaaactcatctccttcctgaggagccgggaggctggaccagtcccgtcgtgcagtcaggtgggcggtgtgtctttccataaggtcacgtggaaatgtctcgggacttgggtcccggagtgcccgtgaagcgtgtttttgctcctgaggtgcattttctcatcatcctttgctttaccacaatgagcaatgaagtcgggttttatatgcaacttattgtatctgaaatcctgtagcacacctcataggtatgattttttaaataatgaattcagaaataaacattttttgatc

SEQ ID NO: 194310 - DNA, 1217 bp, Homo Sapiens; identical to SEQ ID NO: 181422
  misc_feature (982)..(995): n is a, c, g, or t

SEQ ID NO: 194311 - DNA, 833 bp, Homo Sapiens; identical to SEQ ID NO: 187518

SEQ ID NO: 194312 - DNA, 722 bp, Homo Sapiens
aactttgtacaaaaaagttggaccttctactcctgattaatagtcttgattaaatatcacaatgcaaaatacacattaagtaaaagaattccagctggtaaacatgacctggacatttgtaagaatatatttaatatatgtacacccattatgttttcaggtaacaggaggaaaaatgcagcacaattttttttctcttgaaaggcactgtcatttaaacataaacctggagtactcgaaatagaattcaggtttacaagatgaaagcgtgtggagaagtgtcagatggcagtggaagcatgtgtgtttctaaaaagtaaaaatctcaagaaaacagaaatggcatgctttacccatcttacttagtgaaagagagctgcagttgaaattgtttaaaaagtagcaggtacaatgaatattgtcacagatgtgttaatttttgaagcaatgtgggtgctgactactagtagtatcaaaaatatgttcaggattgttttgatacctgtatttataataaaaaatgttggggggagttgatgaattcctgttaaaagctgttcttgtgtgttacatgtaacagacatggtaaatatttgtttacagtctttgtttaacaaaccatgcatttaagtttaaatgaagtcaacaaaaaggaaataagtgtatggatatgtgattttgagattaaagttagtcttaaaaatgtaaataaaatgtgaaac

SEQ ID NO: 194313 - DNA, 1404 bp, Homo Sapiens
tgtacaaagaatatgatcaagaaagggaagagaaaatcaaacaggagcaggaagatcttgaactgaagcacaatttcacattaaaacagctgatgagggagtttaatacacagctggcacaaaaggaacaagagctggaaatgaccataaaagaaactatcaataaggcccaggaggtggaggctgaacttttagaaagccatcaagaagagacaaatcagttacttaaaaaaattgctgagaaagatgatgatctaaaacgaacagccaaaagatatgaagaaatccttgatgctcgtgaagaagaaatgactgcaaaagtaagggacctgcagactcaacttgaggagctgcagaagaaataccagcaaaagctagagcaggaggagaaccctggcaatgataatacacagctagcacagaagacgactttaatcagtgattcgaaattgaaagagcaagagttcagagaacagattcacaatttagaagaccgtttgaagaaatatgaaaagaatgtatatgcaacaactgtggggacaccttacaaaggtggcaatttgtaccatacggatgtctcactctttggagaacctaccgaatttgagtatttgcgaaaagtgctttttgagtatatgatgggtcgtgagactaagaccatggcaaaagttataaccaccgtactgaagttccctgatgatcagactcagaaaattttggaaagagaagatgctcggctgatgtcatggctccgatcttcatcttgaagaagagtgacattgggtgactgctgcttggaaaactgtccacacttgctactctttgagaatgaagttttcattcagggcccctcatgtagccaaaagaccaagaaaaatctggcccacagataagttgcagactgcctttaaaatagattttatcagtggagaaatggtgatagttttttcttcagttttctcttgggaagagttttatgttgtttaaaagatattttgataacttaacctgctttatgggcttacataatattcctttcatccattctttttaaagaacggcttacctttcctatttatttttagggtgattttttaaaaagacttgtgcaatacattttgaggtgaaacttagtggattttttctgataaattagagcatttaattgactattttattcaggttgatctgttgaatatttgctaaagaccagttctttaagctaagacatgtaaaaaatcccaaatggcagtacctcattgtttacttagcttttgtacttatatttttcagaggaaaaaacactactgtaaattgtgaatagccaatacataactgtattgtatgcaaatctgtgattgttggcagtgtcatctctgagaaacagataaataaagtttattt

SEQ ID NO: 194314 - DNA, 1034 bp, Homo Sapiens
actttgtacaaaaaagttggggagattgttagattgcagaaagaccttcgaatgttgagaaaggagcatcagcaagaattggaaatactaaagaaagaatatgatcaagaaagggaagagaaaatcaaacaggagcaggaagatcttgaactgaagcacaattccacattaaaacagctgatgagggagtttaatacacagctggcacaaaaggaacaagagctggaaatgaccataaaagaaactatcaataaggcccaggaggtggaggctgaacttttagaaagccatcaagaagagacaaatcagttacttaaaaaaattgctgagaaagatgatgatctaaaacgaacagccaaaagatatgaagaaatccttgatgctcgtgaagaagaaatgactgcaaaagtaagggacctgcagactcaacttgaggagctgcagaagaaataccagcaaaagctagagcaggaggagaaccctggcaatgataatgtaacaattatggagctacagacacagctagcacagaagacgactttaatcagtgattcgaaattgaaagagcaagagttcagagaacagattcacaatttagaagaccgtttgaagaaatatgaaaagaatgtatatgcaacaactgtggggacaccttacaaaggtggcaatttgtaccatacggatgtctcactctttggagaacctaccgaatttgagtatttgcgaaaagtgctttttgagtatatgatgggtcgtgagactaagaccatggcaaaagttataaccaccgtactgaagttccctgatgatcagactcagaaaattttggaaagagaagatgctcggctgatgtttacttcacctcgcagtggtatcttctgagtaaacatcagtctgtgcttagttaacatgtgtcatggctccgatcttcatcttgaaaagagtgacattgggtgactgctgcttggaaaactgtccacacttgctactctttgagaatgaagttttcattcagggcccctcatgtagccaaa

SEQ ID NO: 194315 - DNA, 1267 bp, Homo Sapiens; identical to SEQ ID NO: 187524

SEQ ID NO: 194316 - DNA, 1792 bp, Homo Sapiens; identical to SEQ ID NO: 187531
  misc_feature (138)..(209): n is a, c, g, or t

SEQ ID NO: 194317 - DNA, 1368 bp, Homo Sapiens
ttggccaagaggaagatggcggcgtccgcagctgccgctgagctccaggcttctgggggtccgcggcacccagtgtgtctgttggtgttgggaatggcgggatccgggaaaaccacttttgtacagaggctcacaggacacctgcatgcccaaggcactccaccgtatgtgatcaacctggatccagcagtacatgaagttccctttcctgccaatattgatattcgtgatactgtaaagtataaagaagtaatgaaacaatatggacttggacccaatggcggcatagtgacctcactcaatctctttgctaccagatttgatcaggtgatgaaatttattgagaaggcccagaacatgtccaaatatgtgttgattgacacacctggacagattgaggtattcacctggtcagcttctgggacaattatcactgaagcccttgcatcctcatttccaacagttgtcatctatgtaatggacacatcgagaagtaccaacccagtgaccttcatgtccaacatgctctatgcctgcagcatcttatacaaaaccaagctgcctttcattgtggtcatgaataaaactgacatcattgaccacagctttgcagtggaatggatgcaggattttgaggctttccaagatgccttgaatcaagagactacatacgtcagtaacctgactcgttcaatgagcctggtgttagatgagttttacagctcactcagggtggtgggtgtctctgctgttctgggtactggattagatgaactctttgtgcaagttaccagtgctgccgaagaatatgaaagggagtatcgtcctgaatatgaacgtctgaaaaaatcactggccaacgcagagagccaacagcagagagaacaactggaacgccttcgaaaagatatgggttctgtagccttggatgcagggactgccaaagacagcttatctcctgtgctgcacccttctgatttgatcctgactcgaggaaccttggatgaagaggatgaggaagcagacagcgatactgatgacattgaccacagagttacagaggaaagccatgaagagccagcattccagaattttatgcaagaatcgatggcacaatactggaagagaaacaataaataggagactttagcacacttcacttgtttctagaagtccagaattttggacctccacgtgaaagaactgttcttacctctgaactgggggctcccataagggataattttcctcagagtagcaaagtttctcttattagagaaatcttgtgactcagatgaagtcaggatagaagaccctttggacctggcaagttaatgctgattattcctttggcctttccttgtattt

SEQ ID NO: 194318 - DNA, 732 bp, Homo Sapiens
ctttgtacaaaaaagttggctagaagtcgcttagctcttcggtggttgtcacacgtccggaggcctagccgtcgcgtacctaggatgccgcgtggaagccgaagccgcacctcccgcatggcccctccggccagccgggcccctcagatgagagctgcacccaggccagcaccagtcgctcagccaccagcagcggcacccccatctgcagttggctcttctgctgctgcgccccggcagccaggtctgatggcccagatggcaaccactgcagctggcgtggctgtgggctctgctgtggggcacacattgggtcacgccattactgggggcttcagtggaggaagtaatgctgagcctgcgaggcctgacatcacttaccaggagcctcagggaacccagccagcacagcagcagcagccttgcctctatgagatcaaacagtttctggagtgtgcccagaaccagggtgacatcaagctctgtgagggtttcaatgaggtgctgaaacagtgccgacttgcaaacggattggcctaatgaagaagttcaacctggagagatggaaaatcagctctcataactaagttaatttagtataaaaatagaattgatagtgagggtataaagtgtaaccatcagttaaacctctcctgtcattcctggcttccttgcttcaaaattgaaatggaagtggggggtgtcccctactctgtagaatctggggactgg

SEQ ID NO: 194319 - DNA, 645 bp, Homo Sapiens
tttgtacaaaaaagttggagcagcggcccccccatctgcagttggctcttctgctgctgcgccccggcagccaggtctgatggcccagatggcaaccactgcagctggcgtggctgtgggctctgctgtggggcacacattgggtcacgccattactgggggcttcagtggaggaagtaatgctgagcctgcgaggcctgacatcacttaccaggagcctcagggaacccagccagcacagcagcagcagccttgcctctatgagatcaaacagtttctggagtgtgcccagaaccagggtgacatcaagctctgtgagggtttcaatgaggtgctgaaacagtgccgacttgcaaacggattggcctaatgaagaagttcaacctggagagatggaaaatcagctctcataactaagttaatttagtataaaaatagaattgatagtgagggtataaagtgtaaccatcagttaaacctctcctgtcattcctagcttccttgcttcagaattgaaatggaagtgggggtgtccctactctgtagaatctgggactgggcaaatgtttgtgtggcctccttaaactagctgttatgttatgattttattctttgtgagttaattaaaataaagtcattttcttc

SEQ ID NO: 194320 - DNA, 1341 bp, Homo Sapiens
  misc_feature (1105)..(1135): n is a, c, g, or t
taatgccaactttgtacaaaaaagttgggtagaaatggtgagattgttttctttttctaccttaaagggagatggtaagaaacaatgaatgtcttttttcaaactttattgacaagtgattttcaagtctgtgttcaaaaatatattcatgtacctgtgatccagcaagaagggagttccagtcaagagtcactacaactgattagttgtttagagaatgagaaatggaacagtgaggaatggaggccatatttccatgacttcccttgtaaacagaagcaacagaagggacaagaggctggcctctacatcactctcaccttccaaatcttgtggaagtgcatctacttgccagaaccaaattaacttacttccaagttctggctgcttgcaggtggaactccagctgcaagggagttagggaaatgaaggtctttttttaaaagcttctcagccttcctagggaacagaaattgggtgagccaatctgcaatttctactacaggcattgagaccagttagattattgaaatattatagagagttatgaacacttaaattatgatagtggtatgacattggatagaacatgggatactttagaagtagaattgacagggcatattagttgatgaaatggagtcatttgagtctcttaatagccatgtatcataattaccaagtgaagctggtggaacatatggtctccattttacagttaaggaatataatggacagattaatattgttctctgtcatgcccacaatccctttctaaggaagactgccctactatagcagtttttatatttgtcaatttatgaatataatgaatgagagttctggtacctcctgtctttacaaatattggtgttgtcagtatttttcctttttaaccattccaatcggtgtgtagtgatgtttcattttggttttaatttgtatatccctgatagctataattgggtcatagaaattctttatacattctagatgcaagtctcttgtcggatatacgtattgagatattacacctagtctgtggcttgactgttttctttatgtcttttgatgaatagaagttttaaattttgacaaggtcaannnnnnnnnnnnnnnnnnnnnnnnnnnnnnnctctccaatttaaccccaagatttcagatattctgctctattatataaactttatatttttatatttgtgatctaccttgaattgatatgtatgttgtgaattatggatcagggttctttttttcccccatacaagtatccagtcattgtaacactgtttattgaaagaattatcctttcctcattaaattaccttgccaattagt

SEQ ID NO: 194321 - DNA, 330 bp, Homo Sapiens
  misc_feature (103)..(133): n is a, c, g, or t
ttgggtcggatatacgtattgagatattacacctagtctgtggcttgactgttttctttatgtcttttgatgaatagaagttttaaattttgacaaggtcaannnnnnnnnnnnnnnnnnnnnnnnnnnnnnnctctccaatttaaccccaagatttcagatattctgctctattatataaactttatatttttatatttgtgatctaccttgaattgatatgtatgttgtgaattatggatcagggttctttttttcccccatacaagtatccagtcattgtaacactgtttattgaaagaattatcctttcctcattaaattaccttg

SEQ ID NO: 194322 - DNA, 872 bp, Homo Sapiens; identical to SEQ ID NO: 187538

SEQ ID NO: 194323 - DNA, 947 bp, Homo Sapiens; identical to SEQ ID NO: 181429

SEQ ID NO: 194324 - DNA, 1671 bp, Homo Sapiens; identical to SEQ ID NO: 181430

SEQ ID NO: 194325 - DNA, 691 bp, Homo Sapiens
gagaagcaagaatatgactttaatttaacatcaacaatgacactgtgtaacagcacagggaagaggtagtggagggagatggtcaggcttcctgttccttaaccagcagagccccagcaacctagaagcgcctcacctagcctcttaatggagtgggaaggagcagggaattggaaatcagaggctcaaaaagtaaagaaggctgatggcaagcctggggagaggcctggaaacgagggaagggctgagggctatgaggagtcccctagcgcaggtcttcggcagtgaacatgcccctggccctgcgcaggatggagtccttggcggcgtcatatgggtgctccttggaggggatctccaggacagcggggatggactgctggtgggcgtccagggcatgccgcaccatctctgcgatgtactggttgatgaggatgatgccaatgtcatcccggtttagaaattgccggaaagtgtcttcgatctcattgatggttgtatccttctccaccaccaggaaattgggatggcggttcttgttaagctcccctatgccgcccagcaggaaaccagtcaccgtgtcctcgtctccgatcactgcgatgagcttacccctccccgccatccctgcagccgggcagagctcaccctagagcggcgcagaagccacccaacttttttgtacaaagtt

SEQ ID NO: 194326 - DNA, 1468 bp, Homo Sapiens
ttggcaccaccggaagcaaggaaggtgctgtgtaatcattaaggagcggaggcttttggagctgctaaaatgccggattacctcggtgccgatcagcggaagaccaaagaggatgagaaggacgacaagcccatccgagctctggatgagggggatattgccttgttgaaaacttatggtcagagcacttactctaggcagatcaagcaagttgaagatgacattcagcaacttctcaagaaaattaatgagctcactggtattaaagaatctgacactggcctggccccaccagcactctgggatttggctgcagataagcagacactccagagtgaacagcctttacaggttgccaggtgtacaaagataatcaatgctgattcggaggacccaaaatacattatcaacgtaaagcagtttgccaagtttgtggtggaccttagtgatcaggtggcacctactgacattgaagaagggatgagagtgggcgtggatagaaataaatatcaaattcacattccattgcctcctaagattgacccaacagttaccatgatgcaggtggaagagaaacctgatgtcacatacagtgatgttggtggctgtaaggaacagattgagaaactgcgagaagtagttgaaaccccattacttcatccagagaggtttgtgaaccttggcattgagcctcccaagggcgtgctgctctttggtccacccggtacaggcaagacactctgtgcgcgggcagttgctaatcggactgatgcgtgcttcattcgagttattggatctgagcttgtacagaaatacgtcggtgagggggctcgaatggttcgtgaactctttgaaatggccagaacaaaaaaagcctgccttatcttctttgatgaaattgatgctattggaggggctcgttttgatgatggtgctggaggtgacaatgaagtgcagagaacaatgttggaactgatcaatcagcttgatggttttgatcctcgaggcaatattaaagtgctgatggccactaacagacctgatactttggatccagcactgatgaggccagggagattggatagaaaaattgaatttagcttgcccgatctagagggtcggacccacatatttaagattcacgctcgttcaatgagtgttgaaagagatatcagatttgaactgttagcacgactgtgtccaaatagcactggtgctgagattagaagcgtctgcacagaggctggtatgtttgccatcagagcacggcgaaaaattgctaccgagaaagatttcttggaagctgtaaataagtcattaagtcttatgccaaattcagtgctactcctcgttacatgacatacaactgaaccctgaagctttcaagtgaaaactttaaattggaatcctaaccttatatagacttgttaataaccaattcataaacaaataaatggcttcaaaattg

SEQ ID NO: 194327 - DNA, 855 bp, Homo Sapiens
ttggagagtgttgggtctgtagccagcaaattacttcatcatctagattatccattcagttgatcctaattagcaaggataacaagaatcgtccgcactaaagtcccctgcagcgtgaccatgtcgagaccccggaagaggctggctgggacttctggttcagacaagggactatcaggaaaacgcaccaaaactgagaactcaggtgaggcattagctaaagtggaggactccaaccctcagaagacttcagccactaaaaactgtttgaagaatctaagcagccactggctgatgaagtcagagccagagagccgcctagagaaaggtgtagatgtgaagttcagcattgaggatctcaaagcacagcccaaacagacaacatgctgggatggtgttcgtaactaccaggctcggaacttccttagagccatgaagctgggagaagaagccttcttctaccatagcaactgcaaagagccaggcatcgcaggactcatgaagatcgtgaaagaggcttacccagaccacacacagtttgagaaaaacaatccccattatgacccatctagcaaagaggacaaccctaagtggtccatggtggatgtacagtttgttcggatgatgaaacgtttcattcccctggctgagctcaaatcctatcatcaagctcacaaagctactggtggccccttaaaaaatatggttctcttcactcgccagagattatcaatccagcccctgacccaggaagagtttgattttgttttgagcctggaggaaaaagaaccaagttaactgagatactgctgctggaatgggcgagacattgctgcaaagaaatccagctttttt

SEQ ID NO: 194328 - DNA, 2117 bp, Homo Sapiens; identical to SEQ ID NO: 187545
  misc_feature (1620)..(1636): n is a, c, g, or t

SEQ ID NO: 194329 - DNA, 955 bp, Homo Sapiens
  misc_feature (110)..(168): n is a, c, g, or t
  misc_feature (816)..(824): n is a, c, g, or t
acaaattgatgagcaatgctttacataaaagccaactttgtacaaaaaagttggcttccttttccccttctctctttgcctggcttcctttcccttttcttctattcacnnnnnnnnnnnnnnnnnnnnnnnnnnnnnnnnnnnnnnnnnnnnnnnnnnnnnnnnnnnatgtgatgatgaaatctctgcatggctgcaatgatcccactgttagctggcagggtcaggcttagctccttgactgcagaagaccaagaacctgttccccaagcccagagatgtccacctgggctggactgccctcaagcttatactagagaagagcaactgacctgcccaacttgtgtgaagtcaggagggtttctggcattttccacacctgtccactccttggagctggtttctctcattgctttttctaaatctggttctttttctctttacctggggcctggcttttctgagattgtcttagggttgagctatttgggtatcctgggtttgagtgttaggggatggacataaaggaaaaagagtgatgagaagagaatggagagaatttgaataaaaggtgggaaaggagagcactgttctttgattgtttatccagtccaacctgatccattagggatcgaggtgctacactggcctccagggataagcctggggctactgttgctgggaacttaggcttaacataaagccgaagaaggtacctagaaatttgaaacttccctaaaaagctcctaatgcccacctgctagatagcttctctgtggcctcctatttagctaagcagcagtgtttttggatacnnnnnnnnnctgtttgtgaataaggccagcactcaagatgggcagccaagggtgcactgactattagctggcccataggatatctgtaaggctggtgggacagttttggacctggaatcatgtgtaactaacaaggttgg

SEQ ID NO: 194330 - DNA, 1557 bp, Homo Sapiens; identical to SEQ ID NO: 181435
  misc_feature (333)..(343): n is a, c, g, or t
  misc_feature (619)..(627): n is a, c, g, or t
  misc_feature (976)..(1019): n is a, c, g, or t

SEQ ID NO: 194331 - DNA, 381 bp, Homo Sapiens
actttgtacaaaaaagttggcggtgaagccccatgcaaacagaattgctttagatttccaaagagggaatgatgttgccttccactttaacccacgcttcaatgagaacaacaggagagtcattgtttgcaatacaaagctggataataactggggaagggaagaaagacagtcggttttcccatttgaaagtgggaaaccattcaaaatacaagtactggttgaacctgaccacttcaaggttgcagtgaatgatgctcacttgttgcagtacaatcatcgggttaaaaaactcaatgaaatcagcaaactgggaatttctggtgacatatacctcaccagtgcttcatataccatgatataatctgaaaggggcagatt

SEQ ID NO: 194332 - DNA, 1770 bp, Homo Sapiens; identical to SEQ ID NO: 187561

SEQ ID NO: 194333 - DNA, 1509 bp, Homo Sapiens; identical to SEQ ID NO: 181438
  misc_feature (248)..(292): n is a, c, g, or t
  misc_feature (320)..(349): n is a, c, g, or t

SEQ ID NO: 194334 - DNA, 932 bp, Homo Sapiens; identical to SEQ ID NO: 187563

SEQ ID NO: 194335 - DNA, 1208 bp, Homo Sapiens
ataaaagccaactttgtacaaaaaagttggctgctcccagccgcgcgcgagtcagactcgggtgggggtcccggcggcggtagcggcggcggcggtgcgagcatgtcgtggctcttcggcattaacaagggccccaagggtgaaggcgcggggccgccgccgcctttgccgcccgcgcagcccggggccgagggcggcggggaccgcgggttgggagaccggccggcgcccaaggacaaatggagcaacttcgaccccaccggcctggagcgcgccgccaaggcggcgcgcgagctggagcactcgcgttatgccaaggacgccctgaatctggcacagatgcaggagcagacgctgcagttggagcaacagtccaagctcaaagagtatgaggccgccgtggagcagctcaagagcgagcagatccgggcgcaggctgaggagaggaggaagaccctgagcgaggagacccggcagcaccaggccagggcccagtatcaagacaagctggcccggcagcgctacgaggaccaactgaagcagcagcaacttctcaatgaggagaatttacggaagcaggaggagtccgtgcagaagcaggaagccatgcggcgagccaccgtggagcgggagatggagctgcggcacaagaatgagatgctgcgagtggaggccgaggcccgggcgcgcgccaaggccgagcgggagaatgcagacatcatccgcgagcagatccgcctgaaggcggccgagcaccgtcagaccgtcttggagtccatcaggacggctggcaccttgtttggggaaggattccgtgcctttgtgacagactgggacaaagtgacagccacggtggctgggctgacgctgctggctgttggggtctactcagccaagaatgccacgcttgtcgccggccgcttcatcgaggctcggctggggaagccgtccctagtgagggagacgtcccgcatcacggtgcttgaggcgctgcggcaccccatccaggtcagccggcggctcctcagtcgaccccaggacgcgctggagggtgttgtgctcagtcccagcctggaagcacgggtgcgcgacatcgccatagcaacaaggaacaccaagaagaaccgcagcctgtacagggaacatcctgatgtacgggccaccaggcaccgggaagacgctgtttgccaagaaactcgccctgcact

SEQ ID NO: 194336 - DNA, 980 bp, Homo Sapiens; identical to SEQ ID NO: 187568

SEQ ID NO: 194337 - DNA, 1366 bp, Homo Sapiens
  misc_feature (1200)..(1212): n is a, c, g, or t
gccaactttgtacaaaaaagttggcatttcaaaatgtgaaagaggagtgggtaccggaacttaaggaatacgcaccaaatgtaccctttttattaataggaactcagattgatctccgagatgaccccaaaactttagcaagactgaatgatatgaaagaaaaacctatatgtgtggaacaaggacagaaactagcaaaagagataggagcatgctgctatgtggaatgttcagctttaacccagaagggattgaagactgtttttgatgaggctatcatagccattttaactccaaagaaacacactgtaaaaaaaagaataggatcaagatgtataaactgttgtttaattacgtgagaaacatcttcagtggccaaggaactgtccatttctctcagaaagcaaatgaaatgctacagctatacccagaccttttataggtaatgaagcagttcaaaacttgaaagaaaacaaaacctgtcctcagaattctataaagtgtattaagaatgttccttaaaggtttaagaagcagtaagcagcatctgaagccacaatctattataaatactttatttcaactagaaggtacaatctctcaggggtttcatagtttaaaaagctacaatcacatcatgttgtaactacgtaaaaaacagagctgtaaatggaactgcttggctttgaccatacacatttctgcccagcccttacagaatctgcacaaagaaatatctccctttgctccagttaattgttcttgtatgtaagttgctttctattccagtatatccagagtggtgaaataacaaggccagccacgtagccaaaggtcgctccaagcgtacaggagatgggccatacctgaggagagaatgtatgagatcaaaaaagaacaaatgttttattattacttgagcacaagtgtaacctaaatatttctatattaaagcttaatgtgctttcttaaagaatgccaaaagtgtaataaggtcataactgcatttatcatgaacactaaaaatgtacacattttagttaatgtgcattaaactgtaacaaggcttctggcaattgtagatttagtttgacgctccccaaagtgcatgagacacatgctaaaattacaaattaaaattttgggtcagactttgccataatgatagactcaatttagctctctgaactagttggtaannnnnnnnnnnnnaattcccactttggctgtgtacatcaaatgaaatgagaagtgtgtatgctgaccaaaccacaagaaactttctttaagttgtgttaaagaggaaagacctagaatccaagcgtgttacatgaaaattgtaacagagcagctgcttccacctttc

SEQ ID NO: 194338 - DNA, 1240 bp, Homo Sapiens
  misc_feature (347)..(358): n is a, c, g, or t
ccagcagagcctttcacttagggacccaactgcttgtagatgaaataaatcaacattaattacttctagctgatgtaatatggctggagaaaaggggtctctggaagcccggtattttgtttaacttacattctaggtgtgtatataagttgtcgctctataacttctgctgtggttccaacatctatatctgaaaggtggaagcagctgctctgttacaattttcatgtaacacgcttggattctaggtctttcctctttaacacaacttaaagaaagtttcttgtggtttggtcagcatacacacttctcatttcatttgatgtacacagccaaagtgggaattnnnnnnnnnnnnttaccaactagttcagagagctaaattgagtctatcattatggcaaagtctgacccaaaattttaatttgtaattttagcatgtgtctcatgcactttggggagcgtcaaactaaatctacaattgccagaagccttgttacagtttaatgcacattaactaaaatgtgtacatttttagtgttcatgataaatgcagttatgaccttattacacttttggcattctttaagaaagcacattaagctttaatatagaaatatttaggttacacttgtgctcaagtaataataaaacatttgttcttttttgatctcatacattctctcctcaggtatggcccatctcctgtacgcttggagcgacctttggctacgtggctggccttgttatttcaccactctggatatactggaatagaaagcaacttacatacaagaacaattaactggagcaaagggagatatttctttgtgcagattctgtaagggctgtgcagaaatgtgtatggtcaaagccaagcagttccatctacagctctgttttttatgtagttacaacatgatgtgattgtagctttttaaactatgaaacccctgagagattgtaccttctagttgaaataaagtatttataatagattgtggcttcagatgctgcttactgcttcttaaatctttaaggaacattcttaataaactttacagaattctgaggacaggttttgttttctttcaagttttgaactgcttcattacctataaaaggtctgggtatagctgcagcatttcatttgctttctgagagaaatggacagtttccttggccactgaagatgtttctcacgtaattaaacaacagtttatacatcttgatcctattc

SEQ ID NO: 194339 - DNA, 1676 bp, Homo Sapiens; identical to SEQ ID NO: 181441
  misc_feature (480)..(491): n is a, c, g, or t
  misc_feature (837)..(855): n is a, c, g, or t

SEQ ID NO: 194340 - DNA, 958 bp, Homo Sapiens
ctttgtacaaaaaagttggatggtgcaggcctggtatatggacgacgccccgggcgacccgcggcaaccccaccgccccgaccccggccgcccagtgggcctggagcagctgcggcggctcggggtgctctactggaagctggatgctgacaaatatgagaatgatccagaattagaaaagatccgaagagagaggaactactcctggatggacatcataaccatatgcaaagataaactaccaaattatgaagaaaagattaagatgttctacgaggagcatttgcacttggacgatgagatccgctacatcctggatggcagtgggtacttcgatgtgagggacaaggaggaccagtggatccggatcttcatggagaagggagacatggtgacgctccccgcggggatctatcaccgcttcacggtggacgagaagaactacacgaaggccatgcggctgtttgtgggagaaccggtgtggacagcgtacaaccggcccgctgaccattttgaagcccgcgggcagtacgtgaaatttctggcacagaccgcctagcagtgctgcctgggaactaacacgtgcctcgtaaaggtccccaatgtaatgactgagcagaaaatcaatcactttctctttgcttttagaggatagccttgaggctagattatctttcctttgtaagattatttgatcagaatattttgtaatgaaaggatctagaaagcaacttggaagtgtaaagagtcaccttcattttctgtaactcaatcaagactggtgggtccatggccctgtgttagttcatgcattcagttgagtcccaaatgaaagtttcatctcccgaaatgcagttccttagatgcccatctggacgtgatgccgcgcctgccgtgtaagaagtgcaatcctagatacacagctagccagatagaaagacactttttttctccaaaa

SEQ ID NO: 194341 - DNA, 960 bp, Homo Sapiens; identical to SEQ ID NO: 181442

SEQ ID NO: 194342 - DNA, 688 bp, Homo Sapiens; identical to SEQ ID NO: 181443

SEQ ID NO: 194343 - DNA, 1057 bp, Homo Sapiens
ttggggcaagggccgcagccagcaccgggcggagagggctaccatggggaaaatcgcgctgcaactcaaagccacgctggagaacatcaccaacctccggcccgtgggcgaggacttccggtggtacctgaagatgaaatgtggcaactgtggtgagatttcggacaagtggcagtacatccggctgatggacagtgtggcactgaaggggggccgtggcagtgcttccatggtccagaagtgcaagctgtgtgcaagagaaaattccatcgagattttaagcagcaccatcaagccttacaatgctgaagacaatgagaacttcaagacaatagtggagtttgagtgccggggccttgaaccagttgatttccagccgcaggctgggtttgctgctgaaggtgtggagtcagggacagccttcagtgacattaatctgcaggagaaggactggactgactatgatgaaaaggcccaggagtctgtgggaatctatgaggtcacccaccagtttgtgaagtgctgatccctcttccttcccagttgcccttaagaactgagaaaggacaaagtactctaagcagcagagcccacagaggctcgttcctttgacccttgtctcctggtggctatacgaaaccttcacaatctgcatgctggactttattacagcttcccaagccccatcaataaagcccctgttcacgctgcactggtgcatgaaggtgaagtaaggaggcagctactccctccacaaataagaattcgtgcagcagcagttcactccttaggaaaatgaagagtatttttaaggagatggtatctccccagtcaagggcaagtttacagagatgaaaccgcgatcccaccatcactcaatgagccagaagccaatggtgacgtactgttacctgaacttactgaacttgctgttggaaagatctttgtgaggattaggaattaggttaaaagaaattaagaaccatcttcagcaaaaattaaactttatttctgcttaaacaataaatacacctgagttagttttccaaacctttcc

SEQ ID NO: 194344 - DNA, 967 bp, Homo Sapiens; identical to SEQ ID NO: 187573
  misc_feature (42)..(65): n is a, c, g, or t

SEQ ID NO: 194345 - DNA, 866 bp, Homo Sapiens; identical to SEQ ID NO: 187576
  misc_feature (297)..(310): n is a, c, g, or t
  misc_feature (323)..(358): n is a, c, g, or t

SEQ ID NO: 194346 - DNA, 1264 bp, Homo Sapiens; identical to SEQ ID NO: 187577

SEQ ID NO: 194347 - DNA, 1250 bp, Homo Sapiens; identical to SEQ ID NO: 187579
  misc_feature (1135)..(1143): n is a, c, g, or t

SEQ ID NO: 194348 - DNA, 1244 bp, Homo Sapiens; identical to SEQ ID NO: 181450

SEQ ID NO: 194349 - DNA, 1917 bp, Homo Sapiens; identical to SEQ ID NO: 187582
  misc_feature (1403)..(1449): n is a, c, g, or t

SEQ ID NO: 194350 - DNA, 848 bp, Homo Sapiens
ctttgtacaaaaaagttggcctccgcctcctccttcgcctcttcctgcctcctcccggcttccgccgccgccactccagcctaatcccaaccccagggcgaagcgttttcttatttatttccgttttctcgccactacagcctcctgacaaggtgatccgggcgggccccgcaggaattttatcccctcaccggcctcacactagtatcgcatgtccactatccagaacctccaatctttcgacccctttgctgatgcaactaagggtgacgacttactcccggcagggactgaggattacattcatataagaatccagcaacggaacggcagaaagacactgactactgttcagggcattgcagatgattatgacaaaaagaaacttgtgaaagctttcaaaaagaaatttgcctgtaatggtactgtgattgaacatcctgaatacggagaggttattcagcttcaaggtgaccaaagaaaaaacatctgccagtttctcttggaggttggcattgtaaaggaggaacagcttaaggttcatggattctaaaatgaacctaaatacgtggagaatttcttgaatagttttgttctctaaacccggtttggctgccttgtgaaatgattccctgcagtaaacggacttttcatttatttaatcattcaaacttccattcacatctgcatgattacagaaaacatggggtatgtagactagtaacacataagaaaattgcagtaagatggtaacaaaacctcatattgtctttacatgtttccaatggaaaatgttttgagtgtttattgttcagtttattacgtttcacttgattaaattttttttg

SEQ ID NO: 194351 - DNA, 1720 bp, Homo Sapiens; identical to SEQ ID NO: 187586
  misc_feature (1193)..(1483): n is a, c, g, or t

SEQ ID NO: 194352 - DNA, 2049 bp, Homo Sapiens; identical to SEQ ID NO: 181460
  misc_feature (491)..(508): n is a, c, g, or t
  misc_feature (580)..(712): n is a, c, g, or t
  misc_feature (1095)..(1104): n is a, c, g, or t
  misc_feature (1722)..(1780): n is a, c, g, or t

SEQ ID NO: 194353 - DNA, 1130 bp, Homo Sapiens
ttggagcaagttgacaggcagctgccttcactggcatgcaaatatccagtttcttccagggaggcaacacagatattatcagttccaaaagtagatgatgaaatcctagggtttatttctgaagccactccactaggaggtattcaagcagcctccactgagtcttgcaatcagcagttggacttagcactctgtagagcatatgaagctgcagcatcagcattgcagattgcaactcacactgcctttgtagctaaggctatgcaggcggacattagtcaagctgcacagattcttagctcagatcctagtcgtacccaccaagcgcttgggattctgagcaaaacatatgatgcagcctcatatatttgtgaagctgcatttgatgaagtgaagatggctgcccataccatgggaaatgccactgtaggtcgtcgatacctctggctgaaggattgcaaaattaatttagcttctaagaataagctggcttccactccctttaaaggtggaacattatttggaggagaagtatgcaaagtaattaaaaagcgtggaaataaacactagtaaaattaaggacaaaaagacatctatcttatctttcaggtactttatgccaacattttcttttctgttaaggttgttttagtttccagatagggctaattacaaaatgttaagcttctacccatcaaattacagtataaaagtaattgcctgtgtagaactacttgtcttttctaaagatttgcgtagataggaagcctggtacaaacaatttaacgctttctagatcacatattagtctctaagttgttttctgtttcctgctttacttatgtttttacaattctccaaaactaagaaaattctaattaggatataaggagtatttactgttcaatagaataatatgcatcctcctttatacctaggacagaattaaacatttgttacacattcagaacagtgatgttgttctttttgatacttttatctcagtatcttttcacgttccataacttgtccatatttttgctcatattttcttacttttctttgttatttattcatgtctgcaacatcaatcatagtagtctagatcaatgcaactcaaagcaccagtc

SEQ ID NO: 194354 - DNA, 1243 bp, Homo Sapiens; identical to SEQ ID NO: 181461

SEQ ID NO: 194355 - DNA, 1487 bp, Homo Sapiens; identical to SEQ ID NO: 187600
  misc_feature (1322)..(1330): n is a, c, g, or t

SEQ ID NO: 194356 - DNA, 717 bp, Homo Sapiens; identical to SEQ ID NO: 187602

SEQ ID NO: 194357 - DNA, 556 bp, Homo Sapiens
ctttgtacaaaaaagttggtgccctgggaactctctggcaccttgggctgtggaaggctctggaaagtccttcaaagctggagtctgtcctcctaagaaatctgcccagtgccttagatacaagaaacctgagtgccagagtgactggcagtgtccagggaagaagagatgttgtcctgacacttgtggcatcaaatgcctggatcctgttgacaccccaaacccaacaaggaggaagcctgggaagtgcccagtgacttatggccaatgtttgatgcttaacccccccaatttctgtgagatggatggccagtgcaagcgtgacttgaagtgttgcatgggcatgtgtgggaaatcctgcgtttcccctgtgaaagcttgattcctgccatatggaggaggctctggagtcctgctctgtgtggtccaggtcctttccaccctgagacttggctccaccactgatatcctcctttggggaaaggcttggcacacagcaggctttcaagaagtgccagttgatcaatgaataaataaacgagcctatttctctttg

SEQ ID NO: 194358 - DNA, 1275 bp, Homo Sapiens
tatcacaatcaatcaatagatttatcaacctggggctggggctgaccgaggaggtggagggtggcagaggctgggggacaaccacaggccagggagaaagaggagacagaggaagcaccgagggtgactacgttgtcttccctagatcaattttcttctggatggctcgtgctgagtggtagatgagcgaatcgatgagtccagccactgtgaacatgcccccaatgatggcgcacacacctgtcaggaagtgggtgaaggacctgtgcttctccgtcagcttcaccatcatgggcgagagctcatagaggacgaagactccgggaaggccttggtcgcccaacagcccattggcaaccttctcatgtctggtcacagagaactgatttgtcctcagtacctctccgtccaccttcatgtacacagtgggcaccaccttcacaaagtactggaacatcatggaggcttggggcgcagtgacattggtgtggtccagggggttcacaatgcctggatagtcctccccaaatgacaggtgctggatgtagtgggtcatgttgatgttgtcaaggccaaagctctgcaagtcatggacgtgcacatgggactgctggaagctcttcccaggggcaaagtggaagtttccggccaccttattgacttccaagaagccatacacctggcagccttcattcttctgctcctgcatcttctggctgaagccctctcgccggcactgctcaatagtatctgggttcttgaaggcccagcctctacggcgatatgcctcccgcacatcttcacaggtgttacagcacttgatatcttctgcctcagcaccatagcagctctcacagcgatcagggtccagggagtcagggtcaaacaccgtcacctcgactttcccaagctcatgccgctcagcctctgagctcacggggatgccatctttatctagtcgttgcttgaacaggttgtgttccacatccagctgctgttctccggccacatccatggcatcaatactcagataggcacaaggcatgtgcggaaaaagtacatcgatgttgatcttcagtttatctccccgcgacttgtccacgtagagctcaggatgcacctccgtggtgaggtaatactgcagctcggacaggaacagtagcagcatgagaaggccactgacaatggtcacggtggcgcccccgcaggtcttgacccggaagtcctccaaagtcttggggtaggcatcgaactgcttcagcttctttgtacaaa

SEQ ID NO: 194359 - DNA, 1413 bp, Homo Sapiens
ttggccaagctatggatcatcatggagtacctgggcggcggctcagcactggacttgcttaaaccaggtcccctggaggagacatacattgccacgatcctgcgggagattctgaagggcctggattatctgcactccgaacgcaagatccaccgagacatcaaagctgccaacgtgctactctcggagcagggtgacgtgaagctggcggactttggggtagcagggcagctcacagacacgcagattaagaggaacacattcgtgggcacccccttctggatggcacctgaggtcatcaagcagtcggcctacgacttcaaggctgacatctggtccctggggatcacagccatcgagctggccaagggggagcctccaaactctgacctccaccccatgcgcgtcctgttcctgattcccaagaacagcccacccacactggagggccagcacagcaagcccttcaaggagttcgtggaggcctgcctcaacaaagacccccgattccggcccacggccaaggagctcctgaagcacaagttcatcacacgctacaccaagaagacctccttcctcacggagctcatcgaccgctataagcgctggaagtcagaggggcatggcgaggagtccagctctgaggactctgacattgatggcgaggcggaggacggggagcagggccccatctggacgttcccccctaccatccggccgagtccacacagcaagcttcacaaggggacggccctgcacagttcacagaagcctgcggagcccgtcaagaggcagccgaggtcccagtgcctgtccacgctggtccggcccgtcttcggagagctcaaagagaagcacaagcagagcggcgggagcgtgggtgcgctggaggagctggagaacgccttcagcctggccgaggagtcctgccccggcatctcagacaagctgatggtgcacctggtggagcgagtgcagaggttttcacacaacagaaaccacctgacatccacccgctgaagcgcactgctgttcagataggggacggaaggtcgtttgtttttgttctgagctccataagaactgtgctgacttggaaggtgccctgtgctatgtcgtgcctgcagggacacgtcggatcccgtgggcctcacatgccaggtcaccaggtcaccgtctccttccacccctgcagtgtgctgttgtgcacgtcagggacgctgttctctatgcccactgccctcctctctctcctggcccagcagtattgctcacgggggctccagccgccggcgtggctctcatgagctacgcctgggtcttctgcagactcatgcagctctatggccgctcagaccaaggcgcagagcaactatcagggcagctctgcctcctcctctcatgaggtgggga

SEQ ID NO: 194360 - DNA, 1096 bp, Homo Sapiens
gtttcttttttggctctagagggctttccccgggcctgctgtgctgcttttgtgccaaggttagccagtcccccctgttgtgttccatgtgctttcacctctgcctcatctttcctcccgtccctgccccgccacctccccaaagaattgaaacgtcagctcaggatatggggccaatctctgtgagtccagcatgtacctgtctctccctagtgtcccttcagcctgggctgaccagtgcccgcctctgggcttgaccagttcccaatctcgtcctctgtccccaacttcttaagcacaattgggcttcttccatctccaggttttctgccattcttaaccaaggctgcctcttccaacagggcgggaatcagacctactcccctaggtcacaactctgggaaggatacagagcccccacccttcactgagttctctggatttgttctcagtgccttagcaacgaaaacctgtgcttgtgtgtgtgtggcggcggggagggaggatcctgtttcccacctccttctcctcccctgtactccccagtgccttccttgttctggtggagctggggtttctctcctccccagtcccacaacactgccaaaaatctgtgtatgtgccattgggtggggcagccccaagcctcctggggaggcagggcaaaaacaggtgccctcatcgtggtctgtgccatgtcccgtctctatggtggttgaggagaaaggcggggaagcttcctcagccttgcagatatgtgtggcatttactagccagagctctgaaaggcagtgctgtctgtttcttgtactgggaccaaagtaaaaatccaagcacattccccttgcagttaggggaggccctactgccttctcaaagcagagaggcagcttatcaaactcagcccaaaactctgtttacatgggtggggagatggagcagggaagtacagagtgggatggtcacgacctgggccattgcaaccaaaatggggacttcctgggtagggaggtcactccctctactcactgagctaggattatggaggggtatttgccccatccatttgcaattgggaggtggagggacaggctca

SEQ ID NO: 194361 - DNA, 1098 bp, Homo Sapiens
tggtacaaaaaagttgggccctcggtccagaccttcctgattcctgaggccatgacctttgaggaagctgctgccttgctcgtcaattacattacagcctacatggtcctctttgacttcggcaacctacagcctggccacagcgtcttggtacacatggctgcagggggtgtgggtatggctgccgtgcagctgtgccgtacagtggagaatgtgacagtgttcggaacggcctcggccagcaagcacgaggcactgaaggagaatggggtcacacatcccatcgactatcacacgactgactacgtggatgagatcaagaagatttcccctaaaggagtggacattgtcatggaccctctgggtgggtcagatactgccaagggctacaacctcctgaaacccatgggcaaagtcgtcacctatggaatggccaacctgctgacgggccccaaacggaacctgatggccctggcccggacatggtggaatcagttcagcgtgacagctctgcagctgctgcaggccaaccgggctgtgtgtggcttccacctgggctacctggatggtgaggtggagctggtcagtggtgtggtggcccgcctcctggctctgtacaaccagggccacatcaagccccacattgactcagtctggcccttcgagaaggtggctgatgccatgaaacagatgcaggagaagaagaatgtgggcaaggtcctcctggttccagggccagagaaggagaactagggcaagtggctgtgagaccctagagaccagcgaagggagaagttgggaagctacgttctgttggccaccagacttgcatttcagcctctgtcataatgctctgccctccctcccccgaagttctctgtggtgatgaccgctctcccctgcccctccccgcttcctgacctctgaagaggttgggaagtgaccatttggatgtctgggccctgccaaggcgacagggagggtcagagggaggccggctgcttcctgcccccaccctttccccgggcctgctgtgctgcttttgtgccaaggttagccagtcccccctgttgtgttccatgtgcttttcacctctgc

SEQ ID NO: 194362 - DNA, 1341 bp, Homo Sapiens
ttggggacggtccagctttagctctctgctcgccgccgccgctgtcgccgccacctcctctgatctacgaaagtcatgttacccaacaccgggaggctggcaggatgtacagtttttatcacaggtgcaagccgtggcattggcaaagctattgcattgaaagcagcaaaggatggagcaaatattgttattgctgcaaagaccgcccagccacatccaaaacttctaggcacaatctatactgctgctgaagaaattgaagcagttggaggaaaggccttgccatgtattgttgatgtgagagatgaacagcagatcagtgctgcagtggagaaagccatcaagaaatttggaggaattgatattctggtaaataatgccagtgccattagtttgaccaatacattggacacacctaccaagagattggatctgatgatgaacgtgaacaccagaggcacctaccttgcatctaaagcatgtattccttatttgaaaaagagcaaagttgctcatatcctcaatatcagtccaccactgaacctaaatccagtttggttcaaacagcactgtgcttataccattgctaagtatggtatgtctatgtatgtgcttggaatggcagaagaatttaaaggtgaaattgcagtcaatgcattatggcctaaaacagccatacacactgctgctatggatatgctgggaggacctggtatcgaaagccagtgtagaaaagttgatatcattgcagatgcagcatattccattttccaaaagccaaaaagttttactggcaactttgtcattgatgaaaatatcttaaaagaagaaggaatagaaaattttgacgtttatgcaattaaaccaggtcatcctttgcaaccagatttcttcttagatgaatacccagaagcagttagcaagaaagtggaatcaactggtgctgttccagaattcaaagaagagaaactgcagctgcaaccaaaaccacgttctggagctgtggaagaaacatttagaattgttaaggactctctcagtgatgatgttgttaaagccactcaagcaatctatctgtttgaactctccggtgaagatggtggcacgtggtttcttgatctgaaaagcaagggtgggaatgtcggatatggagagccttctgatcagcagatgtggtgatgagtatgactactgatgactttgtaaaaatgttttcacggaaactaaaaccaacaatggcatttcatgtcacggaaattgaagattaaaggtaacatggccctagcaatcaaattggagaagctaatgaatcagatgaatgccagactgtgaagaaaatat

SEQ ID NO: 194363 - DNA, 954 bp, Homo Sapiens; identical to SEQ ID NO: 181468
  misc_feature (78)..(88): n is a, c, g, or t
  misc_feature (122)..(132): n is a, c, g, or t
  misc_feature (224)..(233): n is a, c, g, or t

SEQ ID NO: 194364 - DNA, 1085 bp, Homo Sapiens; identical to SEQ ID NO: 187612
  misc_feature (525)..(533): n is a, c, g, or t
  misc_feature (687)..(704): n is a, c, g, or t

SEQ ID NO: 194365 - DNA, 698 bp, Homo Sapiens
  misc_feature (155)..(163): n is a, c, g, or t
  misc_feature (317)..(333): n is a, c, g, or t
tttgtacaaaaaagttggcttcagaaatcctataaaatgtaaatactgatttgactggtctttaagatgtgtttaactgtgaggctatttaacgaatagtgtggatgtgatttgtcatccagtattaagttcttagtcattgatttttgtgtttnnnnnnnnntaggaaagagggaaactgcagctttcattacagattccttgattggtaagctctccaaatgatgagttctagtaaactctgatttttgcctctggatagtagatctcgagcgtttatctcgggctttaatttgctaaagctgtgcacatatgtnnnnnnnnnnnnnnnnngattattttaggggagatgtaggtgtagaattattgcttatgtcatttcttaagcagttatgctcttaatgcttaaaagaaggctagcattgtttgcacaaaaagttggtgattcccaccccaaatagtaataaaattacttctgttgagtaaactttttatgtcatcgtaaaagctgaaaaaatccctttgtttctatttataaaaaaagtgcttttctatatgtacccttgataacagattttgaagaaatcctgtaaaatgataaagcatttgaatggtacagtacatgtataaaaagattcagttttaaaagaacatttgtttttacatttaaatgtttattttgaaatcaagtgattttg

SEQ ID NO: 194366 - DNA, 955 bp, Homo Sapiens
tttaatatgtgctgtaagtagtcatttaaatcaaccatgttggtgttaactgtcactttgttttcccattcaaattcggcccacatctgacggaattctgcatcagtgcaagttgcaggctggatatagtccatgatgtcgatgtgaatatcactgagaaccacacaattttctgtcacttgctgctccagagacatcataaactatattaccaaaaattattccattttctgttgatgctactttgacgttagctttaatatttgcgaagtcatgaggagcaagagtcaaaggagacggcttttccacaagtttcagatcccctagtgtagctagttctaatgtgcaattctgcaaagtatcactggtttggttcacaacaagtacatccaggacaatatcatattggttgacatgaacgtaagcttctgcatatacaggatctgagaaacctgtcaattgggtgaccttgttaagtttagatgctaggggatctgctgcctctttcctctgtgtgttacccattgctgccagtaaactcagctgaaactgatcttccttgcagttcatttcattcttagcagttagttgcatgaaggaaatggggtcatcaggctgtactgtcacattcctcttttcagattctttcttttgggataatttctcttcttctagtttagcagataacatgtgagaaagggactgtctgcattccttattgaaaatgtcattcattaaaggtgaacattcagacaagaccttgaggcacagggaaattcgatccacatcatcatcagtaattggcttcttaggaagagaggattttcccaaatgcaggatagtagccatgagcaacatagcctcagcaacaaaagaattttgctttttcttctcctgaaccaaagctacatagcgcaatgcaatcttggtcagagccaacttttttgtacaaagt

SEQ ID NO: 194367 - DNA, 1755 bp, Homo Sapiens; identical to SEQ ID NO: 187614

SEQ ID NO: 194368 - DNA, 896 bp, Homo Sapiens
aactttgtacaaaaaagttgggaatgacattttccataaggaatgcagacagtccctttctcacatgttatctgctaaactagaagaagagaaattatcccaaaagaaagaatctgaaaagaggaatgtgacagtacagcctgatgaccccatttccttcatgcaactaactgctaagaatgaaatgaactgcaaggaagatcagtttcagctgagtttactggcagcaatgggtaacacacagaggaaagaggcagcagatcccctagcatctaaacttaacaaggtcacccaattgacaggtttctcagatcctgtatatgcagaagcttacgttcatgtcaaccaatatgatattgtcctggatgtacttgttgtgaaccaaaccagtgatactttgcagaattgcacattagaactagctacactaggggatctgaaacttgtggaaaagccgtctcctttgactcttgctcctcatgacttcgcaaatattaaagctaacgtcaaagtagcatcaacagaaaatggaataatttttggtaatatagtttatgatgtctctggagcagcaagtgacagaaattgtgtggttctcagtgatattcacatcgacatcatggactatatccagcctgcaacttgcactgatgcagaattccgtcagatgtgggccgaatttgaatgggaaaacaaagtgacagttaacaccaacatggttgatttaaatgactacttacagcacatattaaagtcaaccaatatgaaatgcctgactccagaaaaggccctttctggttactgtggctttatggcagcccaacctttatgctcgttccatatttggtgaagatgcacttgcaaatgtcagcattgagaagccaattcaccaggga

SEQ ID NO: 194369 - DNA, 1703 bp, Homo Sapiens; identical to SEQ ID NO: 187615

SEQ ID NO: 194370 - DNA, 568 bp, Homo Sapiens
taaaagccaactttgtacaaaaaagttggctcgtgttgttcggggcacggatgcggatgagggcgagtggccctggcaggtaagcctgcatgctctgggccagggccacatctgcggtgcttccctcatctctcccaactggctggtctctgccgcacactgctacatcgatgacagaggattcaggtactcagaccccacgcagtggacggccttcctgggcttgcacgaccagagccagcgcagcgcccctggggtgcaggagcgcaggctcaagcgcatcatctcccaccccttcttcaatgacttcaccttcgactatgacatcgcgctgctggatctggagaaaccggcagagtacagctccatggtgcggcccatctgcctgccggacgcctcccatgtcttccctgccggcaaggccatctgggtcacgggctggggacacacccagtatggaggcactggcgcgctgatcctgcaaaagggtgagatccgcgtcatcaaccagaccacctgcgagaacctcctgccgcagcagatcacgccgcgcatgatgtgcgtgggc

SEQ ID NO: 194371 - DNA, 795 bp, Homo Sapiens; identical to SEQ ID NO: 181476

SEQ ID NO: 194372 - DNA, 1347 bp, Homo Sapiens; identical to SEQ ID NO: 187622

SEQ ID NO: 194373 - DNA, 1061 bp, Homo Sapiens
ttggctatgattttatctgcctcagtcattcgtgtcagagatggactgccactttctgcttctactgattatgaacaaagcacaggaatgcaggagtgcagaaagtattttaaaatgctttcgaggaaacttgctcaacttcctgatagatgtacactgaaaactggacattataacattaattttattagctctctgggagtgagctacatgatgttgtgcactgaaaattacccaaatgttctcgccttctctttcctggatgagcttcagaaggagttcattactacttataacatgatgaagacaaatactgctgtcagaccatactgtttcattgaatttgataacttcattcagaggaccaagcagcgatataataatcccaggtctctttcaacaaagataaatctttctgacatgcagacggaaatcaagctgaggcctccttatcaaatttccatgtgcgaactggggtcagccaatggagtcacatcagcattttctgttgactgtaaaggtgctggtaagatttcttctgctcaccagcgactggaaccagcaactctgtcagggattgtaggatttatccttagtcttttatgtggagctctgaatttaattcgaggctttcatgctatagaaagtctcctgcagagtgatggtgatgattttaattacatcattgcatttttccttggaacagcagcctgcctttaccagtgttatttacttgtctactacaccggctggcggaatgtcaaatcttttttgacttttggcttaatctgtctatgcaacatgtatctctatgaactgcgcaacctctggcagcttttctttcatgtgactgtgggagcatttgttacactacagatctggctaaagcaagcccagggcaaggctcccgattatgatgtctgacaccatccttcaaatctattgccttggcttcaggggataaagagggaaacatatcataactgcactgtgatgaagaagctgtttcccacagagggagaagctctgctttctttctctccaactttccttttttaaaa

SEQ ID NO: 194374 - DNA, 1198 bp, Homo Sapiens; identical to SEQ ID NO: 187627

SEQ ID NO: 194375 - DNA, 2915 bp, Homo Sapiens; identical to SEQ ID NO: 187630

SEQ ID NO: 194376 - DNA, 967 bp, Homo Sapiens; identical to SEQ ID NO: 187632
  misc_feature (55)..(63): n is a, c, g, or t

SEQ ID NO: 194377 - DNA, 903 bp, Homo Sapiens; identical to SEQ ID NO: 187633
  misc_feature (638)..(646): n is a, c, g, or t

SEQ ID NO: 194378 - DNA, 1304 bp, Homo Sapiens; identical to SEQ ID NO: 187634

SEQ ID NO: 194379 - DNA, 1274 bp, Homo Sapiens
  misc_feature (105)..(114): n is a, c, g, or t
  misc_feature (900)..(923): n is a, c, g, or t
ttggcagggaagttacaaattgattggtagtgatgtttttaaaataaaaacaatggaaagtaaatataatgtaggaaaactagaattcattccccacacgtgtcnnnnnnnnnnctttgttaagggaaaggatcatgttgactaaaactaaactaattctagtatagcttgagaaaaatatgaagaaacacattcaagctttaaaatctgtcagtattctttatgcttgaagaacaaagtcactttgatttgaagtgagaactatcattaggtggttttctgatttcctgatgaagagttggacatactgtcttaatctatagtgaaaagaatttgagctgtcttcataaacactgggactagcaatgataatagggagataagaaactttaattatcttgatcctttaagtggattttatttggtgcatttctgctctgggtatataataaaagtgggggtttttggtgaaatgagtgaagaaatgaaaggtttctaaagtgctatccaaatacatcagtaacatttttctaaggagtttaattgttaaattggaagtcattcataagaaatatttatgcttgaatatgaaaatctatgaaagcataaatgctgctgtttgatttggtggatattaagattatacacatccaacatattaaagttatgaaagaaacttgacttctgaaaatccttaagagactgctttcttgattcagctagagaaatattatagtcaaaactattgagtgaattttgtttacaaataggtaaattatacatttgtatatttaaagtgctgtgacatagtatctttaagagtttggctcagttttcacagattcattttgtcttaagaatttcttaaatatgttcatgtataatacttgatcaaaatannnnnnnnnnnnnnnnnnnnnnnnaatgggttagaaaatgtttacaatcttggtcttatatgatcaccaatggaatagtaacttccaggtttatatcaatatgagctgactttaactgagttgtttgggatagggaagaagcagtccctctacagtatacaactactgcttgccagctggatcaaaataatcatgttttatgaaaatatctcccttaagcagtgttaaattggtttgcagtgtgtaagtggcacattgaaactggaagttttcttgaaagctgcttcatctattaagaagcaattttcaaattgtagcgaattatattatcccctcttttaaagaaacagtcgttatatgctgatgtttcttaaa

SEQ ID NO: 194380 - DNA, 1023 bp, Homo Sapiens
  misc_feature (266)..(290): n is a, c, g, or t
  misc_feature (939)..(951): n is a, c, g, or t
caatgctttccttataatagccaactttgtacaaaaaagttggcttgttattaccacatgcttttttagtatatttcacaaatttacttttaaatattattttagatacggtgtaacatgtgcaattcagaataattttataacaggtcatgaaaaacataactttagttaggattcacaatatttgttctccacataatgagagaatgaatgagcctttggagatactgatataaggcaattattttttgcaatgttgaatgtgnnnnnnnnnnnnnnnnnnnnnnnnncccccaatagggcactacctgccatatcatcttgtattactttttgatgtaaagcgactaatatttacactatgccatattttttttaattatagttgtaaattatgaaagatccttgaattttctacagatctacaactactaatgtaacagacaagggcaatcttggtatttaaatctgagcatggcagttctaccataaaaagtactctatttttctaatttctaggatttttaaaataacatttctgtaagtctgacatactaatagtcactcaagcagtaccatttattttagtttgcatatattttcactgtttttaatttaatgtattgagtctaatagactgttttgcaataattagaataaagatttatttcttctaatcaaagatgcataacagctattatctaggggaccaccaaatgtgatttcaaaattttgttaactattacaaatgtaatccttatatagaaattttaattttgtaaagtagtgtataatattgtaatattaaattcttgttcttaaattcaaatatgtattgatcttcaatgtgctgtgttaaatcttgcttctctgaaaagttggagacaagatttgtcttcctttttacagtttgtaattttcactgttttattcctgttnnnnnnnnnnnnngtcatttgtaacccatgcagaccattgtttgatctatgctaacttatcaacttggctattcaataaagttaa

SEQ ID NO: 194381 - DNA, 1892 bp, Homo Sapiens; identical to SEQ ID NO: 187637

SEQ ID NO: 194382 - DNA, 1156 bp, Homo Sapiens; identical to SEQ ID NO: 187642
  misc_feature (460)..(484): n is a, c, g, or t
  misc_feature (898)..(906): n is a, c, g, or t
  misc_feature (1124)..(1133): n is a, c, g, or t

SEQ ID NO: 194383 - DNA, 1616 bp, Homo Sapiens; identical to SEQ ID NO: 187643
  misc_feature (1172)..(1197): n is a, c, g, or t

SEQ ID NO: 194384 - DNA, 1033 bp, Homo Sapiens; identical to SEQ ID NO: 181480

SEQ ID NO: 194385 - DNA, 1748 bp, Homo Sapiens; identical to SEQ ID NO: 187647

SEQ ID NO: 194386 - DNA, 1382 bp, Homo Sapiens
gggtacaaaacccttgcacaaatcttttggtaactgaaggggcataaagtaatgttctggggcctaagcaggtagttaactctaaattaagtagttttaaatataagcatagtccaatacaatgacataaatttaaaaaattaaaaaagaaacttggaattacatttccattttagtaacaggaatatcctgattcacattctgaaactggggcttttaaaagaaaagggtgaattagacagatgaataaataaatatttcagacattatgatatgagctgctcccatatcatttcatgaaaagctgaggaactgaccattattttcaattgaaaggaatacccattctatcagttttctgccctgatcaggtattaatgagacactagctaatacagtaccctgtctaggtcagctgctgagacaggaactaaaaaacagaaggaattccctgcatgcattatgtgaattgttagcaaaagagtgaggtgtgccccagtccatctgaggcacagcaagttgcataacatcattaccactttgcagggtctgccgtcctccagctaacactccactaggcaacatccctgtgggagtcaggcccttgagtgtcagcacactttcactctcctccctgagaacagagaagactcttgccatcttgccaattgctcgaattttgtttcttatgatttctttccgggctgcagctgaaccatcaaactggtcttcaccttcagtcattagttcatcatcagagcaaatactcagaacatttaccaacatttctgtcactttttctccaacaaacggtaaagaccacgtgaagacatccataaaattaggcaaccagtaaggatgtggagaacagttaaactgtcgaatattcatcacattattttcatactttaatacagcagcttttttattgtagacatcaaagtaattaggtgccgaaaaaattgttattaaggaagggaacccggtagttcgactttttctgtacattctatagcctgcatcttgagcttcagagctataaaaatgaataacaaaatactgtttcgcaaaaattcacacagcactggatagtcagaaaataagaacatcctcgaactgtactggagctaaaatgttcctgtgatttttcatttccaaaatcctcagaaggatcggaccataacaagtcacactttggtccaaatgcagggggctctcaacatctatgtcatctcaggatatcagcctgcgtgggtaagcagggtgaaagtccaccttgaacacaaagagcaggatgggttaacagtgcagcaagaggcaatctctcaaaagtttcctttcaagcttcattgacccaacttttttgtacaaagttggctttt

SEQ ID NO: 194387 - DNA, 1117 bp, Homo Sapiens; identical to SEQ ID NO: 187648

SEQ ID NO: 194388 - DNA, 1705 bp, Homo Sapiens; identical to SEQ ID NO: 187651

SEQ ID NO: 194389 - DNA, 1035 bp, Homo Sapiens; identical to SEQ ID NO: 187652
  misc_feature (76)..(101): n is a, c, g, or t
  misc_feature (301)..(513): n is a, c, g, or t

SEQ ID NO: 194390 - DNA, 1964 bp, Homo Sapiens; identical to SEQ ID NO: 187663

SEQ ID NO: 194391 - DNA, 1303 bp, Homo Sapiens
  misc_feature (318)..(337): n is a, c, g, or t
  misc_feature (1220)..(1231): n is a, c, g, or t
ttggcgatgcaaaacgcgcgaggcgcacggcagagggccgaagccgcggtactctccgggccaggcccgcccctcggccgcgccgcgcagcacgggattccccggccgctgtccagcgctggccgcctgagccaaggctgccgcggagccagtacagtcggggccgctggctggaagggcgagcttcctaaggcggggggaagcccggcgccggggccgggtaggaaaggcgggggaggggctccggccgtctggaaggaatccacgcggcttgaggctgtgggggaagtagggtggcgagcggtccttctgcgcgcnnnnnnnnnnnnnnnnnnnntggtccattagggtcccctggcgagggggcggctttctagtgtgtgagggcgacgccctagaagctccccttcaaagttggccccacgcgctgaatgtggaaagttgactgggacccagtagtttcccatcccaaacctgctttccgagaagggcttcaaacccaaaatgtgaatcccgcctcccctctcagccagaactgtggactcgtcccggggaggggcggtgggtggggcggggctggcgggaaatttcggttttggcgcgctccctgcggcgacgctcatcgtgcgctctcctcttcccccggtggtctcctcgctcgccttctggctctgccatgccctgctctgaagagacacccgccatttcacccagtaagcgggcccggcctgcggaggtgggcggcatgcagctccgctttgcccggctctccgagcacgccacggcccccacccggggctccgcgcgcgccgcgggctacgacctgtacagtgcctatgattacacaataccacctatggagaaagctgttgtgaaaacggacattcagatagcgctcccttctgggtgttatggaagagtggctccacggtcaggcttggctgcaaaacactttattgatgtaggagctggtgtcatagatgaagattatagaggaaatgttggtgttgtactgtttaattttggcaaagaaaagtttgaagtcaaaaaaggtgatcgaattgcacagctcatttgcgaacggattttttatccagaaatagaagaagttcaagccttggatgacaccgaaaggggttcaggaggttttggttccactggaaagaattaagatttatgccaagaacagaaaacaagaagtcatacctttttcttaaagnnnnnnnnnnnngtttttgcttcaagtgttttggtgttttgcacttctgtaaacttactagctttaccttctaaaagtactgca

SEQ ID NO: 194392 - DNA, 1474 bp, Homo Sapiens; identical to SEQ ID NO: 187668
  misc_feature (163)..(193): n is a, c, g, or t

SEQ ID NO: 194393 - DNA, 1834 bp, Homo Sapiens; identical to SEQ ID NO: 181491
  misc_feature (293)..(335): n is a, c, g, or t
  misc_feature (381)..(557): n is a, c, g, or t
  misc_feature (817)..(825): n is a, c, g, or t
  misc_feature (1325)..(1347): n is a, c, g, or t
  misc_feature (1617)..(1631): n is a, c, g, or t
  misc_feature (1637)..(1687): n is a, c, g, or t

SEQ ID NO: 194394 - DNA, 821 bp, Homo Sapiens
ttggcgtcatcctcgggagcccacccggacgaagggggagagtagacagcagaaccagcggcggcggctaagcagagactgtagtagcggcgacagcgacgacggcagcgatggctggggcggggccagccccgggactcccgggtgcaggaggacccgtggtcccgggtcctggcgctggcatcccgggcaaaagcggcgaggaacgcttgaaggaaatggaggcggagatggccctgtttgagcaggaagttctgggggctccagtacctggaatcccaactgctgtgcctgcggtgcccactgtccccacggtccccacagtagaagcgatgcaggtcccagcggctcctgtgatccgcccaattatcgcgaccaacacataccagcaggtccagcagactctggaggcccgagcagctgctgcagccacagtagttcctcccatggtgggtggccctccttttgtaggccctgttggctttggccctggtgatcggagtcacctggacagcccagaggctcgagaagccatgttcctgcggcgggcagcagccggcccccgccctatggccctacggccccctcaccaggccctcgtgggcccccctctgcctgggccccctggaccacccatgatgctgccaccaatggctcgggctccagggcccccgctgggctccatggctgcactgaggccccctctggaagagccagcagcaccccgagagctgggcctaggcctggggttgggcctgaaagagaaggaagatgcagtggtggcggcggcggctgggctggaggaggctagcgcggctgtg

SEQ ID NO: 194395 - DNA, 1717 bp, Homo Sapiens; identical to SEQ ID NO: 187675

SEQ ID NO: 194396 - DNA, 1264 bp, Homo Sapiens
ttggcggatcgcgggctcgggctgcggggctccggctgcgggcgctgggccgcgaggcgcggagcttgggagcggagcccaggccgtgccgcgcggcgccatgaagggcaaggaggagaaggagggcggcgcacggctgggcgctggcggcggaagccccgagaagagcccgagcgcgcaggagctcaaggagcagggcaatcgtctgttcgtgggccgaaagtacccggaggcggcggcctgctacggccgcgcgatcacccggaacccgctggtggccgtgtattacaccaaccgggccttgtgctacctgaagatgcagcagcacgagcaggccctggccgactgccggcgcgccctggagctggacgggcagtctgtgaaggcgcacttcttcctggggcagtgccagctggagatggagggctatgatgaggccatcgccaatctgcagcgagcttacagcctggccaaggagcagcggctgaacttcggggacgacatccccagcgctcttcgaatcgcgaagaagaagcgctggaacagcattgaggagcggcgcatccaccaggagagcgagctgcactcctacctctccaggctcattgccgcggagcgtgagagggagctggaagagtgccagcgaaaccacgagggtgatgaggacgacagccacgtccgggcccagcaggcctgcattgaggccaagcacgacaagtacatggcggacatggacgagcttttttctcaggtggatgagaagaggaagaagcgagacatccccgactacctgtgtggcaagatcagctttgagctgatgcgggagccgtgcatcacgcccagtggcatcacctacgaccgcaaggacatcgaggagcacctgcagcgtgtgggtcattttgaccccgtgacccggagccccctgacccaggaacagctcatccccaacttggctatgaaggaggttattgacgcattcatctctgagaatggctgggtggaggactactgaggttccctgccctacctggcgtcctggtccaggggagccctgggcagaagcccccggcccctatacatagtttatgttcctggccaccccgaccgcttcccccaagttctgctgttggactctggactgtttcccctctcagcatcgcttttgctgggccgtgatcgtccccctttgtgggctggaaaagcaatgagggtgggctgggctgaggccattgccgccactatctgtgtaataaaatccgtgagc

SEQ ID NO: 194397 - DNA, 1382 bp, Homo Sapiens; identical to SEQ ID NO: 187678

SEQ ID NO: 194398 - DNA, 956 bp, Homo Sapiens
ctttgtacaaaaaagttggcaaagattaaccctagctgaacaaggtccttggtatagtagtgggagttctccttcaggatcatgatgttcgtcagagtgaatttcagcaacttccctaccatcgaatttttatcatgcttctcttggaactcaatgcacctgagcatgtgttggaaaccattaatttccagacacttacagctttctgcaatacattccacatcttgaggcctaccaaagctcctggctttgtatatgcctggcttgaactgatttcccatcggatatttattgcaagaatgctggcacatacgccacagcagaaggggtggcctatgtatgcacagctactgattgatttattcaaatatttagcgcctttccttagaaatgtggaactcaccaaacctatgcaaatcctctacaagggcactttaagagtgctgctggttcttttgcatgatttcccagagttcctttgtgattaccattatgggttctgtgatgtgatcccacctaattgtatccagttaagaaatttgatcctgagtgcctttccaagaaacatgaggctccccgacccattcactcctaatctaaaggtggacatgttgagtgaaattaacattgctccccggattctcaccaatttcactggagtaatgccacctcagttcaaaaaggatttggattcctatcttaaaactcgatcaccagtcactttcctgtctgatctgcgcagcaacctacaggtatccaatgaacctgggaatcgctacaacctccagctcatcaatgcactggtgctctatgtcgggactcaggccattgcgcacatccacaacaagggcagcacaccttcaatgagcaccatcactcactcagcacacatggatatcttccagaatttggctgtggacttgggacactgaggggtcgctatctctttttgaatg

SEQ ID NO: 194399 - DNA, 963 bp, Homo Sapiens
gatgagcaatgctttttcctttttagccaactttgtacaaaaaagttgggagggagaaggcagagtatcttctgagggaatgggtgaatctctaccattcagcagcagctggccgcgacagtaccaaagctttctctgcatttgttggacagatgcaccagcaaggaatactgaagaccgatgatctcataacaaggttctttcgtctgtgtactgaaatgtgtgttgaaatcagttaccgtgctcaggctgagcagcagcacaatcctgctgccaatcccaccatgatccgagccaagtgctatcacaacctggatgcctttgttcgactcattgcactgctcgtgaaacactcaggggaggccaccaacactgtcacaaagattaatctgctgaacaaggtccttggtatagtagtgggagttctccttcaggatcatgatgttcgtcagagtgaatttcagcaacttccctaccatcgaatttttatcatgcttctcttggaactcaatgcacctgagcatgtgttggaaaccattaatttccagacacttacagctttctgcaatacattccacatcttgaggcctaccaaagctcctggctttgtatatgcctggcttgaactgatttcccatcggatatttattgcaagaatgctggcacatacgccacagcagaaggggtggcctatgtatgcacagctactgattgatttattcaaatatttagcgcctttccttagaaatgtggaactcaccaaacctatgcaaatcctctacaagggcactttaagagtgctgctggttcttttgcatgatttcccagagttcctttgtgattaccattatgggttctgtgatgtgatcccacctaattgtatccagttaagaaatttgatcctgagtgcctttccaagaaacatgagctccccgacccattcactcctaatctaaaagtgga

SEQ ID NO: 194400 - DNA, 490 bp, Homo Sapiens
  misc_feature (78)..(90): n is a, c, g, or t
ttggcaggtttaccccactacaagtcttgagttaagaaggaaagaggaaaaaagaaaaaacaccaatacccagatttnnnnnnnnnnnnncgatcatagtcttaggagttcatttaaaccataggaacttttgacttatctcatgttagctgtaccagtcagtgattaagtagaactacaagttgtataggctttattgtttattgctggtttatgaccttaataaagtgtaattatgtattaccagcagggtgtttttaactgtgactattgtataaaaacaaatcttgatatccagaagcacatgaagtttgcaactttccaccctgcccatttttgtaaaactgcggtcatcttggaccttttaaaacacaaattttaaactcaaccaagctgtgataagtggaatggttactgtttatactgtggtatgtttttgattacagcagataatgctttcttttccagtcgtctttgagaataaaggaaa

SEQ ID NO: 194401 - DNA, 284 bp, Homo Sapiens
caactttgtacaaaaaagttggggtttattcagaccttaataaagtgtaattatgtattaccagcagggtgtttttaactgtgactattgtataaaaacaaatcttgatatccagaagcacatgaagtttgcaactttccaccctgcccatttttgtaaaactgcaatcatcttggaccttttaaaacacaaattttaaactcaaccaacctgtgataaatggaatggttactgtttatactgtggtatgtttttgattacagcatataatgctttcttttcca

SEQ ID NO: 194402 - DNA, 778 bp, Homo Sapiens; identical to SEQ ID NO: 187686

SEQ ID NO: 194403 - DNA, 763 bp, Homo Sapiens; identical to SEQ ID NO: 187687

SEQ ID NO: 194404 - DNA, 1041 bp, Homo Sapiens
actttgtacaaaaaagttggcccaaagacacctactatgactttgatgctgaagctgcagaccacaagcaggaggaggacatgaagcggaagcagcagcggaccacatacatcaagagagtgatcgcacacccatccttccataatatcaatttcaagcaagcagaaaagatgatggagaccatggaccagggtgatgtgattatccgaccaagcagcaagggcgagaaccacctgacagtgacctggaaagtcagtgatggcatctaccagcatgtggatgtgcgggaggagggcaaggaaaatgccttcagcctgggagccactctgtggatcaacagtgaggaattcgaagatttggatgagattgttgctcgctatgtccagcccatggcatcctttgcccgggaccttctgaatcacaagtattatcaggactgcagcggtggggaccgcaagaaattagaggagctgctcatcaaaactaagaaggagaagcccaccttcatcccttatttcatctgtgcctgcaaggaactgcccggcaagttcctactgggataccagccccggggtaaacccaggatagaatatgtaacggtgactccagagggattccggtaccggggccagatcttcccaaccgtgaatggactgtttagatggtttaaggatcactaccaggatcctgtaccaggcatcacccctagcagcagcagcaggacccggacacctgcctctatcaatgctaccccagccaacatcaaccttgcagatctgacacgggctgtgaatgccctgcctcagaacatgacttcacagatgttcagtgccattgctgcggtgacaggccaaggacagaaccctaatgccaccccagcccagtgggcctccagccagtacggctatggcggcagtggaggcggcagcagtgcttaccacgtattcccaacgccagcccagcagccagtggccacaccactaatgacccctagctactcctacacgaccccaagccagcccatcaccacccctcagtacc

SEQ ID NO: 194405 - DNA, 1770 bp, Homo Sapiens; identical to SEQ ID NO: 181499

SEQ ID NO: 194406 - DNA, 914 bp, Homo Sapiens; identical to SEQ ID NO: 181500

SEQ ID NO: 194407 - DNA, 1358 bp, Homo Sapiens; identical to SEQ ID NO: 187693
  misc_feature (293)..(301): n is a, c, g, or t
  misc_feature (917)..(941): n is a, c, g, or t
  misc_feature (943)..(992): n is a, c, g, or t

SEQ ID NO: 194408 - DNA, 1140 bp, Homo Sapiens
aactttgtacaaaaaagttgggtatgagagaccagaaatgctaaccttgtagcatgtgaagaatgtctgtaccttgatacgatagttacataatcagtatatttggtttctagatcactgtgcttattttgtttcaatctctgactaaaaatacttaaatttggtttgttaattcttattttagaaattataattttagtttatattaatttcggttatagcttactgaagaaatctttccagttagaaggaggttctaatattcacatgttctaatactttgtttattgtaaaacagctaaatttggagatacgtaaagccttgttttctctgtgtggttcagctactttccatttggtattacacagtcaaatttacatttatctattaaaattgccattttattaaacattttcatgcacagtagattcaagttgtgtctgaaaatatctcttgtgcttttttgattttgctgactttaaaaggattaatctgggcagacattatgtaaaagaaaggttgcgtttaatatattttttgaactttgtaggacaaaacatagctggttaaccttgaagtgactgttgtaccatggttgtgcacatgcttcagaatcctatggaagagaatattcctacttgcagtacatcaaaggaatggatggtggaccctactattcatgttttgagacataaatgttcactttaaagcaattgcataatagataaaaacctgaactttcattggatttttgttaattttcctcattttgaattatgtgcactaccatagctacatcagtttgatacagtattgaaaaattatcagttatattttgctgtttatgatctatttgtagattaggattaaaatggatttaatccatttttaaggctgtgtgaatttttctaaacaagaaccatttgcaatatggatttcttagagattaaaccaattataacttattagcagtcgcgagcacatgttcatatagtcaatgtaaaaatacactaatgagtatttggtaaatcccagtaggcttttaccattagcataattttgtgttgtacaattaagttacaattacatctctaattttggataatattcattggttaacaataaagtgacaaaagctc

SEQ ID NO: 194409 - DNA, 897 bp, Homo Sapiens; identical to SEQ ID NO: 181501

SEQ ID NO: 194410 - DNA, 808 bp, Homo Sapiens; identical to SEQ ID NO: 181502

SEQ ID NO: 194411 - DNA, 911 bp, Homo Sapiens
ttggtgaattcaaaatggcctcatctcctgctgtccttcgagcgtcccggctgtaccaatggagcctgaagagttcggcgcagttcctggggtctccacagctgaggcaggttggtcagatcattagggttcctgctcggatggcggcgacgctgatcctggagcctgcgggccgctgctgctgggacgaaccggtgcgaatcgccgtgcgcggcctagccccggagcagccggtcacgctgcgcgcgtccctgcgcgacgagaagggcgcgcttttccaggcccacgcgcgctaccgcgccgacactcttggcgagctggacctggagcgcgcgcccgcgctgggcggcagcttcgcggggcttgagcccatggggctgctctgggccttggagcccgagaaacctttggtgcggctggtgaagcgcgacgtgcgaacgcccttggccgtggagctggaggtgctggatggccacgaccccgaccccgggcggctgctgtgccagacgcggcacgagcgctacttcctcccgcccggggtgcggcgcgagccggtgcgcgtgggccgggtgcgaggcacgctcttcctgccgccagaacctgggccctttcctgggattgtggacatgttcggaactggaggtggcctgctggagtatcgggctagtctgctggctgggaagggttttgctgtgatggctctggcttattataactatgaagacctccccaagaccatggagacgctccatctggagtactttgaagaagccatgaactacttgctcagtcatcccgaggtaaaaggtcaggagttgggctgcttggaatttccaaagggggtgagctctgcccttccatggcttctttcctgaagggcatcacggctgctgtcgtcatcaacggctctg

SEQ ID NO: 194412 - DNA, 1080 bp, Homo Sapiens; identical to SEQ ID NO: 187700
  misc_feature (174)..(182): n is a, c, g, or t
  misc_feature (530)..(539): n is a, c, g, or t

SEQ ID NO: 194413 - DNA, 389 bp, Homo Sapiens; identical to SEQ ID NO: 187701
  misc_feature (206)..(215): n is a, c, g, or t

SEQ ID NO: 194414 - DNA, 1363 bp, Homo Sapiens; identical to SEQ ID NO: 181505
  misc_feature (228)..(282): n is a, c, g, or t

SEQ ID NO: 194415 - DNA, 1537 bp, Homo Sapiens; identical to SEQ ID NO: 181506
  misc_feature (1287)..(1341): n is a, c, g, or t

SEQ ID NO: 194416 - DNA, 1478 bp, Homo Sapiens; identical to SEQ ID NO: 187705
  misc_feature (378)..(432): n is a, c, g, or t
  misc_feature (950)..(1014): n is a, c, g, or t
  misc_feature (1293)..(1339): n is a, c, g, or t

SEQ ID NO: 194417 - DNA, 879 bp, Homo Sapiens; identical to SEQ ID NO: 187707

SEQ ID NO: 194418 - DNA, 619 bp, Homo Sapiens
actttgtacaaaaaagttggcgatgataaaggcagatcccgacgggcccgaggctcaggcggaggcgtgttccggggagcgcacctaccaggagctgctggtcaaccagaaccccatcgcgcagcccctggcttctcgccgcctcacgcggaagctctacaaatgcatcaagaaagcggtgaagcagaagcagattcggcgcggggtgaaagaggttcagaaatttgtcaacaaaggagaaaaagggatcatggttttggcaggagacacactgcccattgaggtatactgccatctcccagtcatgtgtgaggaccgaaatttgccctatgtctatatcccctctaagacggacctgggtgcagccgcaggctccaagcgccccacctgtgtgataatggtcaagccccatgaggagtaccaggaggcttacgatgagtgcctggaggaggtgcagtccctgcccctacccctatgaggggctccggtagcacctgggcacctgccgctggaagctattgggctggcagcaggacgactggctgtcctcctgcccacccacactgacggcatcttcccagttccccaaggcacgccttcttcccaggcagctctaaca

SEQ ID NO: 194419 - DNA, 1043 bp, Homo Sapiens
ttggtgattttaaaaccacttcccctattatgacttttaaaatcatgtaactcctattaacctaaaaagtatttctaacataacagattgagcagtggttttgttacacttaggcaagaatttattttcccattaaaatttgaaaaatacacttttctttgcttctacccttgcagtttcccttagttcccctaatttccaagtgatctgaactaaaattaatattacatttactaagaaactatttttgttaattatactgagcaaagtttgctccaaatgaaaagtcattacgaactatgtatagtacccaagaaaaggtcaaattgagtcagaagactgtaagtaccacttttggcgctccagagataaaccttgtacacactgcagtagaacagtgagtagaaaatatgagctataaatagatattatttttagttttgatagctctgtgttgaaatacttttttaatgcagataaaaattatcaggaaattaaccttatggcacagaccaaatacttagtgcatggctgagtttctacaattcaaggagccaagaaaataggttcaagatggaatatagtacatgcatataaggcagatgcacacatgctggttactttaagattgtgtgtgttgattagtcacaatgatagactataacatgagacaatacaaagttacatttttggaccatattaaaactgcaagaagacaggggtcttactgaagatcttttagaaaacttaaatcctgtcacaggatatttagacatgtgtagaatgtagctcaatttttaaaaagtaactgacctagagggtgaaagttgaaactgacacattttcaaattaagattatgcttattttgtacagaaaacaatgtttaaacacaagcagatctgttgtatgtaataagtaacacagagttttaaaacaaattaattatttagctttattgaagtttgtttttttccttccgaacctggagtatcatattataaacagcagtttcacacagaatagcagtgcccttttctttttg

SEQ ID NO: 194420 - DNA, 1470 bp, Homo Sapiens
ttggcacagacgaggactcttcctgcagctcggacgatgaggcagcccccgcccccacggctggcccttccgcgcaggcggcgctccccaccaaggccaccaagcaggccggcaaggcgcggccctcggcccactccccaggcaagaagacgcccgcgccccagccccaggcgcctcctccgcagcccacacagcctctgcagcccaaggctcaggccggggccaagagccgacccaagaagagagagggcgtccacctccccaccaccaaggagctggccaagcggcagcgcctgccgtccgtggagaaccggcccaagatcgccgccttcctgccagcccggcagctctggaagtggttcggcaagcccacccagcggcgtggcatgaagggcaaggcccgcaagctcttctacaaggccatcgtgcgcggcaaggagatgatccgtatcggggactgtgccgtgttcctctctgccggccgccccaacctgccctacatcggccgcatccagagcatgtgggagtcgtggggcaacaacatggtggtccgcgtcaagtggttctaccaccccgaggagaccagcccgggcaagcagttccaccagggccagcactgggaccagaagtccagccgcagcctcccggcggccctgcgggtctccagccagaggaaggacttcatggagcgcgcgctataccagtcctcgcatgtggacgaaaatgacgtgcagacggtgtcgcacaagtgcctggtggtgggcctggagcagtatgagcagatgctgaagaccaagaagtaccaggacagcgagggcctgtactacctcgcgggcacctacgagcccaccacgggcatgatcttctccacggacggcgtgcccgtgctctgctgagcccgccgggccctgcgggccacctgtgccccgagggcggccagggacccatctccatcactgccatggcgcggagaccacgtgcgttgtgtgcatgcgagcgctcctgcaggcgtgtgcatggggccaggtgtgcacgtggatgcccgggtgagtgtgtgtgcatgcacgtgtgtgcacgcatgtgcacatgcctccagccccaccttccaacccctcagtgcccccaggacaggggcccctcttagctatcagggtatggccggaccggcccttcctgcccagcacgttgcaagcacttggccaggccggccctccaggctgctgctgcgtgggggcccgggtgcccccaggtccatgcagactggggattcggtggggaggggcgcttctaaggaaccaaactgacgctcactctgggcttcccaagcacccttagcacggagcccaccccaaggcctcccaccgtgcatgggacagggcagcccgatgccagctggcctacctgactgtgccaggggccctgcccccaccctctcagatggcctagacttggggaacagagccgggtggg

SEQ ID NO: 194421 - DNA, 1506 bp, Homo Sapiens; identical to SEQ ID NO: 181512

SEQ ID NO: 194422 - DNA, 1073 bp, Homo Sapiens
agattacaacacacatacaataagtgaattttatcaaaatacagcacatttcttctactatatccataaaaatcaattcctatgtaaatagtactgaaaatcaactaaaatgagttaaaatttacaaagagttgttaaagggtttcaatcaaaattattaaaactatacagtacaataaccaattgataacatcttgaaagaagtgcaatatttgagttcacatatttttaaaagtgctgcctacttactctgactagcaagaatggaaagtgagtccaactcacttttgcaaaaataatgttggttggtgttttaagctagtcttataaaagtcttaattaaaatcaaggttgataaacaaagcataacagattaaaaattcccaaattgcatttcttagtaaataaaaatgaagtgcaataaccaaatattgctctaatgaaaggttccagactagcctcaactaaacagttattggtcttctatggcacttttttctggtccaaataaccatgcattaatccttaccattacatgttactcaaattttatttgattacatagaacaaaaacaaataaaattaatggtctggataaacaaaattaataaacctctatcatcaaatatttgttacagtaactaggaacaaagaaaggcagttggtggtaaaacactattacactgatacacatagaaaccctttaaagactctggaagtgttgagttcacatttaatgttacctgtagaaacagccctttatttgaacacctttacacactggcaggcctcaaggacccatccctttgctctataactctccacagcaattctctatcactgtgccagtttcacaaagcttgctttggtttcctagctccaagtgtactgtttccttttactttaccaaggcaatgcaaggccaaacaaaaatcaaagaggctttcctaaaccttcgtaacattttgtgttacaggcaacacaatcttaaaactggccatttttgtttcatttgctgcttaaaataaaaattataaattagatttaaatccaacttttttgtacaaagttgg

SEQ ID NO: 194423 - DNA, 975 bp, Homo Sapiens; identical to SEQ ID NO: 181516
  misc_feature (258)..(489): n is a, c, g, or t

SEQ ID NO: 194424 - DNA, 1525 bp, Homo Sapiens; identical to SEQ ID NO: 181517

SEQ ID NO: 194425 - DNA, 732 bp, Homo Sapiens
tttgtacaaaaaagttggcccgatggggcttttcctgtagcctgcacatcgttggaaacgcctcatagagtaactctgtggttttactttactcacaggactattgttagatctgtgggaaggaattacaagacagttgctaaaagtttgaaaaagacggttgctaaacgttatgaaaaaccagataatctacttttttaccttaggtattggcatactccacacatctgtaccattcttgagtgatcgcttaggaatgaatgtgatttgaactcattcatgttgagagggtgtcaaattgagaaccaggtagatccccaccacctacagtaaaaaggaccctaaagtaaattggttgaagaaattagatcccaaagattcttggtgaattttgaagtcttcatcagtatatccatattaaaacgagatgacagaagccaaagtaattatgggctgacaggacaactggatcagtttcattaaaaagggcaaacttgaagataaatcttttgactccagctctttagaggatctaaagtgaccttgatggacagtggaagaaatcacaacatggaattcctcgaataacaatttattgactttaaataattttgtctaatgctacatatacacaattaaaaaacctttacactatttctagaaagtcagcatgtatttttggctccaagtttctctagtgttttctgtggaaggaataaaaatttgagtttc

SEQ ID NO: 194426 - DNA, 1003 bp, Homo Sapiens; identical to SEQ ID NO: 187728
  misc_feature (886)..(918): n is a, c, g, or t

SEQ ID NO: 194427 - DNA, 1665 bp, Homo Sapiens; identical to SEQ ID NO: 187730
  misc_feature (1251)..(1273): n is a, c, g, or t

SEQ ID NO: 194428 - DNA, 1238 bp, Homo Sapiens
  misc_feature (238)..(247): n is a, c, g, or t
ttggtgagcctctgggtggacaagtatcggccctgctccttgggacggctggactatcacaaggagcaggcggcccagctgcggaacctggtgcagtgtggtgactttcctcatctgttagtgtacggaccatcaggtgctggaaaaaagacaagaattatgtgtattctacgtgaactttatggtgttggagtggaaaaattgagaattgaacatcagaccatcacaactccatctnnnnnnnnnnttgaaattagcaccattgcaagtaactaccaccttgaagttaatcctagtgatgctggaaatagtgaccgagtagtcattcaggagatgttgaaaacagtggcacaatcacaacaacttgaaacaaactctcaaagggattttaaagtggtattattgacagaagttgacaaactcaccaaagatgctcagcatgccttgcgaagaaccatggaaaaatatatgtctacctgcagattgatcttgtgctgcaattctacatctaaagtgatcccacctattcgtagtaggtgcttggcggttcgtgtgcctgctcccagcattgaagatatttgccacgtgttatctactgtgtgtaagaaggaaggtctgaatcttccttcacaactggctcatagacttgcagagaagtcttgtagaaatctcagaaaagccctgcttatgtgtgaagcctgcagagtgcaacaatatccttttactgcagatcaagaaatccctgagacagattgggaggtgtatctgagggagactgcaaatgctattgtcagtcagcaaactccacaaaggctccttgaagttcgtggaaggctgtatgagcttctaactcattgtattcctcctgagataataatgaagggccttctctcagaactgttacataattgtgatggacaactgaaaggggaggtggcacaaatggcagcttactatgagcatcgtctacagctgggtagcaaagccatttatcacttggaagcgtttgtggccaaattcatggcactttataagaagttcatggaggatggattggaaacatgatgttctgacttctgtcagttattcttgcaaagatttctcagtatcagtatttacatacagcttatattaaaagagctgtgggtaaattaactgaacttaatcatgtcgtatttgcgtttttttggtaataacttctctgtgaactattaatcatcctctgagtcaaataattg

SEQ ID NO: 194429 - DNA, 1883 bp, Homo Sapiens; identical to SEQ ID NO: 187735

SEQ ID NO: 194430 - DNA, 889 bp, Homo Sapiens; identical to SEQ ID NO: 181521

SEQ ID NO: 194431 - DNA, 947 bp, Homo Sapiens
gaagtgggggatcacacagagaaatgtgagtccaggagtgggaaggggtcttttcaaagtgcaggagaagtagctgagcacttgctccaggcgcctggactggatgggccaagcaaggcagggcaggaaagatgcctggggcctgggacttgagttggggtgcctaacatttccggcagctgctgccgcaagaccccacacccagggagctgataccacaggagcccacgccgcaggaaccccctccgcaggtggtgttcaattggccgcagggcgcacacaggccggtgctcaccgccacgttcccgttgcacggagcgctgcagacactgccagtcactggccgggagcctgacacgcagaggtccccgcacacgaccccgccccgggagctgctgacacagacattcacagccccaatgccttcacatagcctctgctcctcgccctccagcaggcgcctgtaggtggcgatctcgatgtccaggcccagcttggagttcatcacctcctggtactccctgatcaggcaggccatgtcctgcttggccttctgcagggcgccctccagctcggccagcttgcagcgggcatcactgagggccgcctcaccctgctgctcagactgggccaccgcggcctccagcttggagttctggcacttggcattctccacctcggccgtcagcctttggatcatgcggttcagctcgttgatctcctccttggtgcggcgcagggtctccccgtgcctgatcaccgtggccttcatctcctcacacttgctgcggtaccaggactcggcctcggcccggctgcgggtgacaatgtcgtcatactgtgccttaatctcggcaatgatgcagtccatgttcaggtcccggctgttgtccagcttgacaaccacggaggtgtctgagccatgcgacccaacttttttgtacaaa

SEQ ID NO: 194432 - DNA, 1572 bp, Homo Sapiens; identical to SEQ ID NO: 187739
  misc_feature (218)..(233): n is a, c, g, or t
  misc_feature (556)..(601): n is a, c, g, or t
  misc_feature (916)..(964): n is a, c, g, or t

SEQ ID NO: 194433 - DNA, 853 bp, Homo Sapiens; identical to SEQ ID NO: 181523
  misc_feature (67)..(112): n is a, c, g, or t
  misc_feature (435)..(450): n is a, c, g, or t

SEQ ID NO: 194434 - DNA, 1323 bp, Homo Sapiens; identical to SEQ ID NO: 181524
  misc_feature (599)..(612): n is a, c, g, or t

SEQ ID NO: 194435 - DNA, 982 bp, Homo Sapiens; identical to SEQ ID NO: 181528
  misc_feature (239)..(326): n is a, c, g, or t
  misc_feature (663)..(673): n is a, c, g, or t

SEQ ID NO: 194436 - DNA, 772 bp, Homo Sapiens; identical to SEQ ID NO: 181529
  misc_feature (411)..(498): n is a, c, g, or t

SEQ ID NO: 194437 - DNA, 1022 bp, Homo Sapiens
ttggctataagccccagcgggcgacgaccgaacgcccccgggaacaccgggccccgagctcggtcccgcgcccgaggatcctccacggggctagatggctgcgtcgggggcgggagcggaggtgagcgggcgctagggccgcgagcccccgccggcccttcctccagcgccctgcggaccccgcagaaggcgctcgcctccctagcccgcaaaaacatatcgatttttctcgctgtggcaacggggacgtcctgatagatcctctgctccaataggcaactccggccttccctgccctgacctggaacctctgggagggctgcagagtaagtgccgcctctgcgctccgacggaggcacgaggcctgtggagtaggtccctctgttccgacaggtgcgacacttggcgctccatgcttgcgggtgccgggaggcctggcctcccccagggccgccacctctgctggttgctctgtgctttcaccttaaagctctgccaagcagaggctcccgtgcaggaagagaagctgtcagcaagcacctcaaatttgccatgctggctggtggaagagtttgtggtagcagaagagtgctctccatgctctaatttccgggctaaaactacccctgagtgtggtcccacaggatatgtagagaaaatcacatgcagctcatctaagagaaatgagttcaaaagctgccgctcagctttgatggaacaacgcttattttggaagttcgaaggggctgtcgtgtgtgtggccctgatcttcgcttgtcttgtcatcattcgtcagcgacaattggacagaaaggctctggaaaaggtccggaagcaaatcgagtccatatagctacattccacccttgtatcctgggtcttagagaccctatctcaaacagtgaaagtgaaatggactgatttgcactcttggttctttggagccttgtggtggaatccccttttccccatcttcttctttcagatcattaatgagcagaataaaaagagtaaaatggtta

SEQ ID NO: 194438 - DNA, 1060 bp, Homo Sapiens; identical to SEQ ID NO: 187744
  misc_feature (232)..(279): n is a, c, g, or t
  misc_feature (707)..(729): n is a, c, g, or t

SEQ ID NO: 194439 - DNA, 1212 bp, Homo Sapiens; identical to SEQ ID NO: 187748

SEQ ID NO: 194440 - DNA, 483 bp, Homo Sapiens
ctttgtacaaaaaagttggaatttctaaaccgttgttcaatgtttctaggaagctgagctgaacacattacgatggatgatggaaacataaggtacatttcttttttgatatttctgagttaatctgaaacgccttagcggcaggacgttggaaagctaaagttggcccgttttgctggcttttgtagtttgagttaacaaccaactgaattagctgataagatctcaaaacagtgaggtaagtacacagctcggagttttataatgctttttttctcttgcagactatcaagaaatccaagtggtaatgggcgaagtttattcagcatccggcaatggacttatcgtagttggggaaacgggtgttccgaataatatcctggaagttatcaggacacctattttaaatataggcctgaattttgtaaagtaatatttaaggtggtccgtgataattaaataaaatgcttaattcatgtggct

SEQ ID NO: 194441 - DNA, 825 bp, Homo Sapiens; identical to SEQ ID NO: 181533

SEQ ID NO: 194442 - DNA, 1060 bp, Homo Sapiens; identical to SEQ ID NO: 187750

SEQ ID NO: 194443 - DNA, 860 bp, Homo Sapiens; identical to SEQ ID NO: 181538
  misc_feature (76)..(117): n is a, c, g, or t
  misc_feature (594)..(622): n is a, c, g, or t
  misc_feature (635)..(643): n is a, c, g, or t

SEQ ID NO: 194444 - DNA, 1887 bp, Homo Sapiens; identical to SEQ ID NO: 187760

SEQ ID NO: 194445 - DNA, 404 bp, Homo Sapiens; identical to SEQ ID NO: 181541

SEQ ID NO: 194446 - DNA, 1782 bp, Homo Sapiens; identical to SEQ ID NO: 187764

SEQ ID NO: 194447 - DNA, 589 bp, Homo Sapiens
ctttgtacaaaaaagttgggtttttgtttggcgggaggggggttttgtttggattctttttgtcgtcattgctggtgactcatgcctttttttaacgggaaaaacaagttcattatattcatattttttatttgtattttcaagactttaaacatttatgtttaaaagtaagaagaaaaataatattcagaactgattcctgaaataatgcaagcttataatgtatcccgataactttgtgatgtttcgggaagatttttttctatagtgaactctgtgggcgtctcccagtattaccctggatgataggaattgactccggcgtgcacactcgtacacacccacacacatctatctatacataatggctgaagccaaacttgtcttgcagatgtagaaattgttgctttgtttctctgataaaactggttttagacaaaaaatagggatgatcactcttagaccatgctaatgttactagagaagaagccttcttttctttcttctatgtgaaacttgaaatgaggaaaagcaattctagtgtaaatcatgcaagcgctctaattcttataaatacgaaactcgagaa

SEQ ID NO: 194448 - DNA, 1158 bp, Homo Sapiens; identical to SEQ ID NO: 187777
  misc_feature (689)..(777): n is a, c, g, or t

SEQ ID NO: 194449 - DNA, 1040 bp, Homo Sapiens; identical to SEQ ID NO: 187778
  misc_feature (567)..(627): n is a, c, g, or t
  misc_feature (638)..(655): n is a, c, g, or t

SEQ ID NO: 194450 - DNA, 343 bp, Homo Sapiens; identical to SEQ ID NO: 181545

SEQ ID NO: 194451 - DNA, 979 bp, Homo Sapiens; identical to SEQ ID NO: 181546

SEQ ID NO: 194452 - DNA, 809 bp, Homo Sapiens
ttggcttcgggagccgtgggcgtggggcgcccacaatttgcgcgctctctttctgctgctccccagctctcggatacagccgacaccatgggtttcggagacctgaaaagccctgccggcctccaggtgctcaacgattacctggcggacaagagctacatcgaggggtatgtgccatcacaagcagatgtggcagtatttgaagccgtgtccagcccaccgcctgccgacttgtgtcatgccctacgttggtataatcacatcaagtcttacgaaaaggaaaaggccagcctgccaggagtgaagaaagctttgggcaaatatggtcctgccgatgtggaagacactacaggaagtggagctacagatagtaaagatgatgatgacattgacctctttggatctgatgatgaggaggaaagtgaagaagcaaagaggctaagggaagaacgtcttgcacaatatgaatcaaagaaagccaaaaaacctgcacttgttgccaagtcttccatcttactagatgtgaaaccttgggatgatgagacagatatggcgaaattagaggagtgcgtcagaagcattcaagcagacggcttagtctggggctcatctaaactagttccagtgggatacggaattaagaaacttcaaatacagtgtgtagttgaagatgataaagttggaacagatatgctggaggagcagatcactgcttttgaggactatgtgcagtccatggatgtggctgctttcaacaagatctaaaatccatcctggatcatggcatttaaataaaagattgaaagatt

SEQ ID NO: 194453 - DNA, 928 bp, Homo Sapiens
  misc_feature (334)..(380): n is a, c, g, or t
tttgtacaaaaaagttgggtttctatgtgcctacatacatttctgtgacaagtatttgtcgtaaattaattttaattgtgtatcaagtgaaaaagaaacactgaggttttaagctgctgtatatagcttgtgagaaacctcttttctttaaaatttacataatcacaagaaaggaaagaattacagttggactgattgtgacagtgccttgtcgtcctctttgaaacaccccgtgttgtccagtataccttataacacttagccacttctccccaccctccagaaggggtccacgttgaattctgaatcatcttgaaaataagattccaaccannnnnnnnnnnnnnnnnnnnnnnnnnnnnnnnnnnnnnnnnnnnnnntctgttttataatcacagatttttagacaaatttcttgtatcaggaagaaatacaaattttgtcatgtttctcaagcagtttttctgagtagtttctgaggaggaacaaattacaagtgtacccaataactgaaaatgttttaactcactctcatttgtaagcagtccacatagtagacaatgggttttccaagctgggcaaggtacatttaatcagtaaatcagtttcacatcatgtattgtgatgtttcaatgtgagacacaaaaacaatggcttgaaacttgtgtatcatatgtgattttgaaatgaacaccttgaatagcactaatttttatttgtggtatttttctataacaaaacaagtagctctaggaaaagaggttttattttgtaaacgatcatttgtgaccctcagacactctctggctaatattttaataagctcacagcagataattctgagatcatgggtgagggtggtgcatgttgagatttaaattggcataaagctgcatactttttgtctagctgtttgaattcatttttt

SEQ ID NO: 194454 - DNA, 888 bp, Homo Sapiens
gaacagtatgtgtgtcaattccgtttgctattatttttctgagaaaatataagaatcctgacattttgaaacatgaagaataaatgttgaagtgttaatagtaaaacatcctcactttgatggttgtagcctttgaagaagatggtggagagaattcgcaagttccagattctcaatgatgagatcatcaccatcctggataagtacctgaagtcaggcgacggggagggcacgccagtggagcatgtgcgctgcttccagccgcccatccaccagtccctcgccagcagctgagggcacgcgctgcactccgtaactcaacatggcatgcctttctctccgtaaactatttagtgagatttttagggactatttttcagtatctctgtacctgttaaagggggtgcttttcgatctaaaaacttaattttataaaattgacttatttttctagactaaaattgtatatgcttttggtaattaggaactcttgagaatattggctgctgattgttgccatcacgttcctacaaaattgtttttctatgggatgttctggcagctgtgtcataaaatgctgctgggttcattcattcattccataagaaacttaataccagcaaatgcattaaatcccttgccagttaccattaactgtaactatttagcttttgtttagggatctttctgatggtcttttatgagcaatcttagttctaagtcattgttcccatcccttttttgtgtgtttcagaaaatagtgaacttgattcccctgcttccactaaatccagttgtgacaaaatctaacgtgacatcagatcgaaaggttatagaaataaaactaatgagatctatttgtgttcatttatttactctaaccctgtg

SEQ ID NO: 194455 - DNA, 1155 bp, Homo Sapiens
tgcctgcctctgaggggtgtgtaggtggagcccactgatggaacggcagctaaagaagacgattcgcttgagccgcttgttgtagaagaagtagttgaaggaccagaggctaccatcctccccgaagggatctgagtcccaagtctgggttatagctggggagtatagggtgacaggtggtgtgaggcgccaagtgccccacaaacctggaggcctggaggccatctgcagggatgccggcccacctgtagatgtcacattcagccaggcagatctcctcgtccaccgcgttccacagctgtggtttcagatccttgaagtcctcccgcacagctgagaacagactgcagttgactgcattcaccacccagctaaggctgggctcccggctgaactcatggctgcgggctgtgctgaagtcatagtcaggcctgaaggactcattgagcgtggcaatcaggtagaagagggtcttgcggctgcacttgtcactgagggggccctcctcctcaccgccttggcttttgctgagtctgctggggctcagtcctgaagtctggggtggagaaagtgcctccagcacgtggggctggccctcctggcagaactgcttgaacatgtgtttgtcgtctcctgccatcttacatgagtagctctcaatcctgccaatgatgtgggcatctccggtctccacagtcagctgtgagttgatggcttcaaagctcgagttctccaatagcttcatgtctttggggaaggagctccgtgctccagaggggctagtattgcctgcctggctgggttagatcaggccgcgccgggccgggtctggctgggctggtcgctccgcgtcggtgccggtgcgcaggcgggggcgggctccgcgcagcgcgggctcttcaagatcggagggcggcgccgcggcctccgctcgggccgcactgtatccgggggaagaagctccgcggcgacgtcccgttactcccggccctgccggcccatccgggctgccaccgcgacatagcctcgcccccttccacagagcccgctctcgcgaccgacctgccgccgaccgccacagagcgctccggcgagtcagcgagccgagcgagcgagcgagcgacctccgcctcccccggccggacaacaacccaa

SEQ ID NO: 194456 - DNA, 1249 bp, Homo Sapiens; identical to SEQ ID NO: 181552
  misc_feature (265)..(275): n is a, c, g, or t
  misc_feature (771)..(838): n is a, c, g, or t

SEQ ID NO: 194457 - DNA, 2018 bp, Homo Sapiens; identical to SEQ ID NO: 181553
  misc_feature (984)..(994): n is a, c, g, or t
  misc_feature (1490)..(1557): n is a, c, g, or t

SEQ ID NO: 194458 - DNA, 1367 bp, Homo Sapiens; identical to SEQ ID NO: 187789

SEQ ID NO: 194459 - DNA, 519 bp, Homo Sapiens; identical to SEQ ID NO: 181556

SEQ ID NO: 194460 - DNA, 1231 bp, Homo Sapiens; identical to SEQ ID NO: 181560

SEQ ID NO: 194461 - DNA, 505 bp, Homo Sapiens
tttgtacaaaaaagttggctttctcttaggtttccttgagatatgttcctccagtgcaagcaagataatggtttacagaatttgctttacacaaaacttgtcaagaactcatctgttaaaagcaaggaataactagtttatattttccaataatgttcaaggttttctccttaatatgtttgaaattattgattttggcatttttctaagcaatttatgtaattttatttgaagaaaatgttttgtataatgtttttcccagcctaaacagggagagtcctaacagtgttgtgcttgtatgattctgagactttatttgcgtaagtgatactactatactttatttttgacccatgcctttttaagctgtttcatattgaaaggtggaatattgtaaaaattttgtcaaagatgtactgtagtgctatttgaagtacctgtaacaaaacagttggccctctgtatccatgtactctgcatctgtggattaaaccaattgcagatc

SEQ ID NO: 194462 - DNA, 1433 bp, Homo Sapiens
  misc_feature (424)..(433): n is a, c, g, or t
gaaatttcccattatgtctttttaaatttaaccagaggcaaactggactttaatcacaaaacttccaagaggtcaaaaccatgtgaaaagttgatgctttggcttttcatgagttagcataccagctgtaggtttccatgtcacattcctaccaagtctctgatctgttgtatgatttccctttgtcttcatattcctccaaaagctaggtaatgaggaacagcaagaaaaactgctcagggagtggctggactgctgtgtgacggaggggggagttctggttgccatgcagaagagttctcggcggcgaaatcaccccctggtcactcagatggtagaaaaatggcttgaccgctaccgacagatccggccgtgtacatccctgtctgatggagaggaagatgaggatgatgaagatgaatgnnnnnnnnnntcaaacagcagaagaccaaggcatcagatctgtaatgaccctaaagttagtgtggtgctccaagcagagtcgacatcatggaatgaaccaaatctggcaggatctgctcggggaagtgttttcctggaccacacacaccttatggagataatgcctctgctgcgtgaggagacagagaactttagttggactacagtttgtaaaaaaaactaattttattaagacagaactttttttccttccaaattgtaaatctgtctataaatgtaacgcatgtggttgtgtaagacattgtttaataggaaaagttgtaccagcatcttcatattattgagaaaattttttccagcatgggcacttagaaaaagcacatggcaaatggctctttgttcctttcagatattatttcagtagaacctggcattctcctttcaccttaaaagatccatctaagtctcagatctggaaacgttttgtaccgattatccacagcaaaacaaaaataagcttttattttattaacaatttcgttcctcttgtgcccaatcaaatcttttaggaacaaactgcaagaaaagctaagaatgttttagagtgaactaaatacagacattgcttacttgttttgaagagggttttggttttggttattgtgtcttttaagttttctgatatgccccctttcaatatttagatatttatttgttgggaagaataccttaaaatgagggttcttattccagattctgggcagtggtctgtgagtagtttttttcctggatgaaaagggagcaagcccacttgtcactaaatgaattgtgtgaaatgtgctcacttggactccatcaacaatgtgctgctcccagattgccatgccagagggtcttcggattcttccttctatcacctctgctctaagcaaatcttgttagaagggcatgcctttgcttaggcagattgggaataccaattcactacagaataaagattttaaaaatgc

SEQ ID NO: 194463 - DNA, 1643 bp, Homo Sapiens; identical to SEQ ID NO: 187797

SEQ ID NO: 194464 - DNA, 1280 bp, Homo Sapiens
gggtgcctcccatctcccctccccctggatcccgatccagtgactgccaaaaccagaaagaactggcgtaggggtgcttgatcatggggaacgctgttgtggttcgtccggcagatgggaaaagggaaaggtttcacttcttcacaatttgaatgacatcctcatcctccaacgtatggtctttacccactttctgaggattgtgtttcacagagagaccccagaccagagcatatttaaattctttgataagattttgtgaatcttcatgcagaaatcctccactgtggtcctggagtaaggaagcaccactggggatgtgtaatctggtaactggcctttgggtttggtgtaaattctcactagtttcagatagtcccagatcttttccaataggtcatcaaaattccagcggtgatgggcagagatgggtacacagtgaggcccttatagatgatatccaattcctcaatggagatttggtcaatcttatttaacacatagatacaggggatataaactctgtttccttccaccacatcaatgaggtcatcagctgtagcatcactacgtagagtcacatcggcattatgaatcttgtattcagccagaatgctcttcacagtttcagcatccagctcactctgggggcaagtggctgtgagattaatgcctcccttgtccttcttcttaaagccaatgttggggggtttgctgttcaagcgaatgccaaagccttccagctcattttcaattatcttcttatgtcccaaaggtttcaggacatccagaacaatcaagatcaagttacaggttcgggccactgcaatgacttgacgacctctacctttcccatccttggcaccttcaatgatacctgggagatccaggagctggatcttggcacctttgtatctgatgacaccaggcacagtggtcagagtagtgaattcataggctgccacctcagaatatacccctgccaggttactaagcagtgttgacttccccacagatggaaaaccaacaaatccaattcgagcatcacctgtcttggccacatcaaaaccttctcctggacctccaccaccaccaccctttggagtaatgagttctcgacgaagcttagcaagacgagccttaagcagccctaagtggtgtgctgtggccttgttcttttgagtccgagccatctctgcttctatctccgcgatcttagctaaggtgctgctcatcgtggcgagtaccctgtggcctccacactgtctcccttcacccaa

SEQ ID NO: 194465 - DNA, 1571 bp, Homo Sapiens; identical to SEQ ID NO: 187799

SEQ ID NO: 194466 - DNA, 1075 bp, Homo Sapiens
ttggacaatacattatatgcaccagaaatgctagccaaaatggcagagcctttcaccaaggctctggatatgcttgacgcggaaaaatctgctatattaggattacctcaacctctcttggctcaatgactctcctgtcttcaaaaccgtcttggaaagaatgcagcgtttcttctctaccctctatgaaaactgttttcatatcctagggaaggcaggcccttccatgcagcaagacttctatactgtggaggaccttgctacccagcttctcagctcagcctttgtcaacttgaacaatattcctgactaccgactcagacccatgcttcgggtctttgtaaagcctctggtgctcttctgtcccccagagcactatgaagccctggtatcccccatcctcggacctcttttcacctacctccatatgaggctttctcagaaatggcaagttatcaaccaaaggagcctgctgtgtggagaagatgaggctgcagatgaaaacccagagtctcaagagatgctggaggagcaactggtgaggatgttaacccgagaagtcatggacctaatcacggtttgctgtgtttcaaagaagggtgctgaccacagtagtgctcccccagcagatggagacgatgaagaaatgatggccacagaggtcaccccctcagctatggcagagcttacagacctgggcaaatgtctgatgaagcatgaggatgtttgtacagcgctattaattacagccttcaattccctggcctggaaagatactctgtcctgccagaggacaacctcacagctctgctggcctctcctcaaacaagtgctgtcagggacactgctcgcagatgcagttacgtggcttttcaccagtgtgctgaaaggcttacagatgcacgggcagcacgacgggtgcatggcttccctggtccatctggccttccagatatacgaggcactgcgccccaggtacctggagataagagctgtaatggagcaatccctgaatacagaaagactcactgggaccagtttgactgcagcttttaaacccctcctggcagaaagt

SEQ ID NO: 194467 - DNA, 1171 bp, Homo Sapiens; identical to SEQ ID NO: 187801
  misc_feature (479)..(536): n is a, c, g, or t
  misc_feature (737)..(745): n is a, c, g, or t

SEQ ID NO: 194468 - DNA, 1400 bp, Homo Sapiens; identical to SEQ ID NO: 187802
  misc_feature (169)..(179): n is a, c, g, or t
  misc_feature (936)..(944): n is a, c, g, or t
  misc_feature (1136)..(1190): n is a, c, g, or t

SEQ ID NO: 194469 - DNA, 943 bp, Homo Sapiens
actttgtacaaaaaagttggccaacagcaacctcagtgcgtgaactctgttatccagaaggcctcgccctgccgccgccgaagctggaattcgtcggctagtagttctcgccggcaactagaggaacctgttggcgtggcccagaaggcttagcgggattgcacgagccctcagattcatcgctaccccgaggctaagcgccatgcctcatattgacaacgatgtgaaactggacttcaaggatgtccttttgaggcccaaacgcagtacccttaagtctcgaagtgaggtggatctcacaagatccttttcatttcggaactcaaagcagacatactctggggttcccatcattgctgccaatatggatactgtgggcacctttgagatggccaaggttctctgtaagttctctctcttcactgctgtccataagcactatagcctcgttcagtggcaagagtttgctggccagaatcctgactgtcttgagcatctggctgccagctcaggcacaggctcttctgactttgagcagctggaacagatcctggaagctattccccaggtgaagtatatatgcctggatgtggcaaatggctactctgaacactttgttgaatttgtaaaagatgtacggaagcgcttcccccagcacaccatcatggcagggaatgtggtaacaggagagatggtaaaagagctcatcctttctggggctgacatcatcaaagtgggaattgggccaggctctgtgtgtactactcggaagaaaactggagtggggtatccacagctcagcgcagtgatggagtgtgcagatgctgctcatggcctcaaaggccacatcatttcagatggaggttgcagctgtcctggggatgtgggccaaggcttttggggcagagctgacttcgtgatgctgggtggcatgctggctggc

SEQ ID NO: 194470 - DNA, 971 bp, Homo Sapiens; identical to SEQ ID NO: 187809

SEQ ID NO: 194471 - DNA, 1676 bp, Homo Sapiens; identical to SEQ ID NO: 187812
  misc_feature (229)..(237): n is a, c, g, or t
  misc_feature (869)..(877): n is a, c, g, or t

SEQ ID NO: 194472 - DNA, 1251 bp, Homo Sapiens; identical to SEQ ID NO: 181573
  misc_feature (154)..(168): n is a, c, g, or t
  misc_feature (611)..(619): n is a, c, g, or t
  misc_feature (682)..(695): n is a, c, g, or t
  misc_feature (713)..(727): n is a, c, g, or t

SEQ ID NO: 194473 - DNA, 1251 bp, Homo Sapiens; identical to SEQ ID NO: 187815

SEQ ID NO: 194474 - DNA, 1472 bp, Homo Sapiens; identical to SEQ ID NO: 187820

SEQ ID NO: 194475 - DNA, 1545 bp, Homo Sapiens
ataaaagccaactttgtacaaaaaagttggatcatatgggcacaactctggtgtccttctatggagaaaacctcaagtaaagttttattctgcctttgaaaatgcttccaaaagtagaccctgtccccacacaggtcaagactacagagaaggctttgtagaaatgtgtcacctatgtacacctgctacttacacatttcctcttttggaaaaatgagatacttagaataacaagaaaattaagacatactggcctggtgccagcagatggcttttctatagacaaactaggttagtgtggaagatataggttaaaataaactatgctgttttatttatcttcccaacctgattggcagctagacttttttagggtctcatttaatggccctgtttttttcattattatatttaatgatagggcaggatttcgtatgcaagctcttgtttctcaggctgcctgcagaagaagtcgctataaattatctgttgtctacatggtacaaggcccattgactcatctgatgcttgttttgttaatttctttaatatttttatcacggggcagtgggagggcttgggcttttagccacagctgttttaagacttctgatctcctgccctgcaggaataggtgggaagtcattgaatttttacactatagtaatttgcattcccacataagtttgagtgttacgaaaacattcctttaaagggatctgtgctacacaaaatatgccaggacctcacagacaaagccattgctagaaaatgtcattccaatgatcagatctggaaacaggctgccataaccacttttccttcttgtagactcagctcacctgtatatttaaactgttcttggcatcttgaaacacctatttctactcaggtactcattgtcctgttactgattcacctttctgatccttttcaaccagttttcccccaaggggggaaattttacttaacctctagtatttgaacaactcaatatttgaattgttgccccatttgcttttacctgtactgtattcttggtcatctcaaatggcgtctaaacccagctactttgcattccagaagtttccattccctccaattccacctaatttttcatctgtcctagttactggctctttcttcatgtcttatttctcttgctttgggagcttaaaagattttacaagacctaattttgggttccttccttggagccatagttaccctgccaagaagagtagaaaatgggttcaactcctgtttcgctccaccaacacctctgtgagtctcatcatcagctgagcgatgatgccttacaggttgcatagcactggaactttcctagagtaacggctctgctgccagggtttctctgggctcattcttccactgacttaattatgatctatgcctaacagagccccagtacaactattttgcagaatggctgttaccctagaattactatagcacatattgagatatagttgtactccctagtagataggaactgaccccaacaataaactttgataataaaga

SEQ ID NO: 194476 - DNA, 1195 bp, Homo Sapiens; identical to SEQ ID NO: 187821

SEQ ID NO: 194477 - DNA, 1525 bp, Homo Sapiens; identical to SEQ ID NO: 187827

SEQ ID NO: 194478 - DNA, 1234 bp, Homo Sapiens; identical to SEQ ID NO: 181580

SEQ ID NO: 194479 - DNA, 913 bp, Homo Sapiens; identical to SEQ ID NO: 187830

SEQ ID NO: 194480 - DNA, 593 bp, Homo Sapiens; identical to SEQ ID NO: 187833

SEQ ID NO: 194481 - DNA, 1488 bp, Homo Sapiens; identical to SEQ ID NO: 187834
  misc_feature (1144)..(1152): n is a, c, g, or t

SEQ ID NO: 194482 - DNA, 466 bp, Homo Sapiens
  misc_feature (344)..(352): n is a, c, g, or t
ctaataaaaactttgtacaaaaaagttggcacgacgcaaacatggcagcgcagaaggaccagcagaaagatgccgaggcggaagggctgagcggcacgaccctgctgccgaagctgattccctccggtgcaggccgggagtggctggagcggcgccgcgcgaccatccggccctggagcaccttcgtggaccagcagcgcttctcacggccccgcaacctgggagagctgtgccagcgcctcgtacgcaacgtggagtactaccagagcaactatgtgttcgtgttcctgggcctcatcctgtactgtgtggtgacgtcccctatgttgctggtggctctggcnnnnnnnnnctgcgcctgttacattctctatctgcgcaccttgtagtccaaacttgtgctctttggccgagaggtgagcccagcgcatcattatgctctggctggaggcatctccttcccctt

SEQ ID NO: 194483 - DNA, 1106 bp, Homo Sapiens
  misc_feature (193)..(237): n is a, c, g, or t
gccaactttgtacaaaaaagttgggtcaagatggcgctggtggcttctgtgcgagtcccggcgcgcgttctgctccgcgcgggtgcgaaacccggggtgggcagggatcgggccggggccggggccaggaccgggaactaacgggctcccccacgctgccttcgcaggggcccggctcccgggcgcggccctnnnnnnnnnnnnnnnnnnnnnnnnnnnnnnnnnnnnnnnnnnnnncttcgggagccagcgggtgctggtggagccggacgcgggcgcaggggtcgctgtgatgaaattcaagaaccccccagtgaacagcctgagcctggagtttctgacggagctggtcatcagcctggagaagctggagaatgacaagagcttccgcggtgtcattctgacctcggaccgcccgggtgtcttctcggccggcctggacctgacggagatgtgtgggaggagccccgcccactacgctgggtactggaaggccgttcaggagctgtggctgcggttgtaccagtccaacctggtgctggtctccgccatcaacggagcctgccccgctggaggctgcctggtggccctgacctgtgactaccgcatcctggcggacaaccccaggtactgcataggactcaatgagacccagctgggcatcatcgcccctttctggttgaaagacaccctggagaacaccatcgggcaccgggcggcggagcgtgccctgcagctggggctgctcttcccgccggcggaggccctgcaggtgggcatagtggaccaggtggtcccggaggagcaggtgcagagcactgcgctgtcagcgatagcccagtggatggccattccagaccatgctcgacagctgaccaaggccatgatgcgaaaggccacggccagccgcctggtcacgcagcgcgatgcggacgtgcagaacttcgtcagcttcatctccaaagactccatccagaagtccctgcagatgtacttagagaggctcaaagaagaaaaaggctaacgattgggctgccacaggcttacggccacacgtgcccctgtgggtcccagggaggtcttaaacaaggtatttttcaacttat

SEQ ID NO: 194484 - DNA, 657 bp, Homo Sapiens; identical to SEQ ID NO: 181585

SEQ ID NO: 194485 - DNA, 1232 bp, Homo Sapiens; identical to SEQ ID NO: 181588
  misc_feature (238)..(292): n is a, c, g, or t
  misc_feature (370)..(391): n is a, c, g, or t
  misc_feature (555)..(563): n is a, c, g, or t
  misc_feature (848)..(870): n is a, c, g, or t

SEQ ID NO: 194486 - DNA, 799 bp, Homo Sapiens
tgagccaccgcacctggcctatgagtggtcttttaattaggaacaaatctaatggaaaggagagttgactgaagttggcccacaggattgtgagctgggcagtgccttcatgaaggcttgccaccttgggacgccccagtttactggggtgtcttgcggagtgcagaaggctttctggcagctgcctgggtttggccagaccctgcctcccctcccgccggccaacccctagtccccttcctgtctccacttgcattcaggggtggctgctgttctgagaacattagaactgggaagagagatggagtcacatggatttttggtgggcattattctgaactttcgtatccaagttagtcccccttattccactgtggcattgccgttctaagcagttacctgatgcctgctgctgaagagctgctcacaggaggcggcggcggccctggcactgccccttgcattaggtcttgtgtttgatgtgttcttgtgaatttactttgtcagaacaaaatatttacgcgttgggttcaggaatttcttttagctccccatctggctgtgaaattcaggaaacctcccgttgcctagtaatcaccccatgtaggtgtacattgtgacaaagtgcatctgaccactaaggggcccccttggtgaccccagcacattcccagcatgttaaaatggcctgcattttggagaagctggctggctttcagtgcctcccaggaaaacacatgggcctttccctcttcagatgcctgaaggggagtgcttttgaggcaggtgatgtgctggg

SEQ ID NO: 194487 - DNA, 1568 bp, Homo Sapiens; identical to SEQ ID NO: 181590
  misc_feature (297)..(346): n is a, c, g, or t
  misc_feature (360)..(442): n is a, c, g, or t
  misc_feature (988)..(1004): n is a, c, g, or t

SEQ ID NO: 194488 - DNA, 953 bp, Homo Sapiens
ttggcccgccgggtgcagcttggtcggttcgatcgccgccgggacctgacaccgcccggagttggcgtcccttctccctctccgagtgctgctcctgtcattgtggccatggacgataccctgttccagttgaagttcacggcgaagcagctggagaagctggccaagaaggcggagaaggactccaaggcggagcaggccaaagtgaagaaggcccttctgcagaaaaatgtagagtgtgcccgtgtgtatgccgagaacgccatccgcaagaagaacgaaggtgtgaactggcttcggatggcgtcccgcgtagacgcagtggcctccaaggtgcagacagctgtgactatgaagggggtgaccaagaatatggcccaggtgaccaaagccctggacaaggccctgagcaccatggacctgcagaaggtctcctcagtgatggacaggttcgagcagcaggtgcagaacctggacgtccatacatcggtatgtggcccctacccttggggctgtggcctggggacaaggagcgtgtgtgggcagctcatcgggaggggtggctcacaggctgacgtgctgtctctgcatacctgtggttgctccctgacgtcaccaagcatcctctgtgctgggtccctgccaggaccctgacaggtagggtgggcagggcggcgggggcctcctgcaggcacctggctccttgtggggaggctcggatggcagacaagcatgcagaggtgtggaaagatgtccacccgcggcagcaggcatggcacagtcagagggtggggctgggtgggggggcaggaaaggctcctggtggaaagtgagacagagagagtcactgagagaacagggcaagaatgtggctggctgtgtgatggaacgaaaagtgcagtcgtacccttgtgaagctgattggagccccttgggcctggccccactgttgt

SEQ ID NO: 194489 - DNA, 940 bp, Homo Sapiens
ttggggtgttcctccgacttccggacatctccctgggagtcgcgcagagtggagtcaaaggcaaccagtgctcgctgcggtctctggggatcgggaccgcggcggcggcccgcgagcgggatgttccggggcttgagcagttggttgggcttgcagcagccggtggcaggcggtgggcagcccaatggagatgctccacccgagcagccgtccgagacggtggctgagtctgcggaggaggagctgcagcaagcgggagaccaggagctcctccaccaggccaaagacttcggcaactatttatttaactttgcatctgctgccacaaaaaagataactgaatcagttgctgaaacagcacaaacaataaagaaatccgtagaagaaggaaaaatagatggcatcattgacaagacaattataggagattttcagaaggaacagaaaaaatttgttgaagagcaacatacaaagaagtcagaagcagctgtgcccccatgggttgacactaacgatgaagaaacaattcaacaacaaattttggccttatcagctgacaagaggaatttccttcgtgaccctccggctggcgtgcaatttaatttcgactttgatcagatgtaccccgtggccctggtcatgctccaggaggatgagctgctaagcaagatgagatttgccctcgttcctaaacttgtgaaggaagaagtgttctggaggaactacttttaccgcgtctccctgattaagcagtcagcccagctcacggccctggctgcccaacagcaggccgcagggaaggaggagaagagcaatggcagagagcaagatttgccgctggcagaggcagtacggcccaaaacgccacccgttgtaatcaaatctcagcttaaactcaagaggatgaggaagaaatttctactagcccaggtgtttctga

SEQ ID NO: 194490 - DNA, 664 bp, Homo Sapiens
tttgtacaaaaaagttgggatctttggccttttaggaaagactgttccaaaaacagtggataattttgtggccttagctacaggagagaaaggatttggctacaaaaacagcaaattccatcgtgtaatcaaggacttcatgatccagggcggagacttcaccaggggagatggcacaggaggaaagagcatctacggtgagcgcttccccgatgagaacttcaaactgaagcactacgggcctggctgggtgagcatggccaacgcaggcaaagacaccaacggctcccagttcttcatcacgacagtcaagacagcctggctagatggcaagcatgtggtgtttggcaaagttctagagggcatggaggtggtgcggaaggtggagagcaccaagacagacagccgggataaacccctgaaggatgtgatcatcgcagactgcggcaagatcgaggtggagaagccctttgccatcgccaaggagtagggcacagggacatctttctttgagtgaccgtctgtgcaggccctgtagtccgtcacagggctctgagctgcactggccccggtgctggcatctggtggagcggacccactcccctcacattccacaggcccatggactcacttttgtaacaaactcctaccaacactgaccaat

SEQ ID NO: 194491 - DNA, 832 bp, Homo Sapiens
ctttaaaaggcaactttgtacaaaaaagttggtgaaggtgctccttgccgccgccctcatcgcggggtccgtcttcttcctgctgctgccgggaccttctgcggccgatgagaagaagaaggggcccaaagtcaccgtcaaggtgtattttgacctacgaattggagatgaagatgtaggccgggtgatctttggtctcttcggaaagactgttccaaaaacagtggataattttgtggccttagctacaggagagaaaggatttggctacaaaaacagcaaattccatcgtgtaatcaaggacttcatgatccagggcggagacttcaccaggggagatggcacaggaggaaagagcatctacggtgagcgcttccccgatgagaacttcaaactgaagcactacgggcctggctgggtgagcatggccaacgcaggcaaagacaccaacggctcccagttcttcatcacgacagtcaagacagcctggctagatggcaagcatgtggtgtttggcaaagttctagagggcatggaggtggtgcggaaggtggagagcaccaagacagacagccgggataaacccctgaaggatgtgatcatcgcagactgcggcaagatcgaggtggagaagccctttgccatcgccaaggagtagggcacagggacatctttctttgagtgaccgtctgtgcaggccctgtagtccgccacagggctctgagctgcactggccccggtgctggcatctggtggagcggacccactcccctcacattccacaggcccatggactcacttttgtaacaaactcctaccaacactgaccaat

SEQ ID NO: 194492 - DNA, 921 bp, Homo Sapiens; identical to SEQ ID NO: 187858

SEQ ID NO: 194493 - DNA, 405 bp, Homo Sapiens
tttgtacaaaaaagttggcatcttcgcggcacctgggaccgccgttcagtcgccaatatgcagctctttgtccgcgcccaggagctacacaccttcaaggtgaccggccaggaaacggtcgcccagatcaaggctcatgtagcctcactggagggcattgccccggaagatcaagtcgtgctcctggcaggcgcgcccctggaggatgaggccactctgggccagtgcggggtggaggccctgactaccctggaagtagcaggccgcatgcttggaggtaaagtccatggttccctggcccgtgctggaaaagtgagaggtcagactcctaaggtggccaaacaggagaataagaacaagaagacaggtcgggctaagccgcggatgcagtaatccggcgctttg

SEQ ID NO: 194494 - DNA, 367 bp, Homo Sapiens
ccccctttgtacaaaaaagttggcttcttcctctttctcgactccatcttcgcggtagctgggaccgccgttcagtcgccaatatgcagctctttgtccgcgcccaggagctacacaccttcgaggtgaccggccaggaaacggtcgcccagatcaaggctcatgtagcctcactggagggcattgccccggaagatcaagtcgtgctcctggcaggcgcgcccctggaggatgaggccactctgggccagtgcggggtggaggccctgactaccctggaagtagcaggccgcatgcttggaggtaaagtccatggttccctggcccgtgctggaaaattttatatgttagactcctaaggtggcca

SEQ ID NO: 194495 - DNA, 583 bp, Homo Sapiens; identical to SEQ ID NO: 181599

SEQ ID NO: 194496 - DNA, 1486 bp, Homo Sapiens; identical to SEQ ID NO: 187869
  misc_feature (56)..(65): n is a, c, g, or t
  misc_feature (348)..(356): n is a, c, g, or t
  misc_feature (890)..(903): n is a, c, g, or t

SEQ ID NO: 194497 - DNA, 971 bp, Homo Sapiens; identical to SEQ ID NO: 187870
  misc_feature (120)..(133): n is a, c, g, or t

SEQ ID NO: 194498 - DNA, 901 bp, Homo Sapiens
  misc_feature (159)..(203): n is a, c, g, or t
  misc_feature (765)..(777): n is a, c, g, or t
ttgggaagggtattgagaccttttctagtatgaatattttttaagtttgggggaagagaaacttgcagtgaaaaggagttttttcattcctgaaagttgcagatccacaaaactaacaggataattgggcaaataaattacatataaacacacacaatnnnnnnnnnnnnnnnnnnnnnnnnnnnnnnnnnnnnnnnnnnnnncataaactacagtaggtaactttaaggatttcttcctatccttgtacaatgacatgaatgtctttctttgaaaactgcaatgtatgtatgtttcaaggttatttaacagtgtactatggttttatatcttgacttgccttgtacatctttcaattctggaatatctgtgtctaagcacaatatcttcacactgtgctgtattgctgctgaactaaatgcacttttccccacatatggggcactggcttcaaacaattcagttcagtatcattacttttaatctcatctttcctttcttggtagttgttaatacagttatggaaaagaggcacattgcatagaagccattggggagttcagtggaagttctgtaagatgtgcatgtactatttgatgcgttttctttgcttcactgcttttaatacttagcagtattgttggtctaagtcaatttgattattgaggagtctcaaagcaaggtgcgttctagatgtcatcctaaaaaacacttcatatataattaatcactattttgtataattacatattgctgcttgtgtgnnnnnnnnnnnnnccatttagttgggcgttgtgttttacacaaaaccatttttgaattaaggctatgatattaagatagaaatttgggactgttgttctgcttttcctggcactcaaattcatgactagttttgagg

SEQ ID NO: 194499 - DNA, 966 bp, Homo Sapiens
attgatgagcaatgcttacctttaaaaggccaactttgtacaaaaaagttggctccacagaccggatgttattatcaagtcagatgcaccggacactttgttattggagaaacatgcagattatatcgcatcctatggctcaaagaaagatgattatgaatactgtatgtctgagtatttgagaatgagtggcatctattggggtctgacagtaatggatctcatgggacaacttcatcgcatgaatagagaagagattctggcatttattaagtcttgccaacatgaatgtggtggaataagtgctagtatcggacatgatcctcatcttttatacactcttagtgctgtccagattcttacgctgtatgacagtattaatgttattgacgtaaataaagttgtggaatatgttaaaggtctacagaaagaagatggttcttttgctggagatatttggggtaatgtcagatttagtccattctacccaaaataccaatattaaaatgtactggttttgctagtaaccagtttataagtttttcatcttttcaggtcccactaagcagctggtctaactggagttaatggtctgctggaacttccagcatgcactgtggtagttatatcagcatatacaggagcactggaacagagggggccagtctaaaagataagggatgaacacagtgcaggccagagagaccagctgcttcatgggatgtgaaaaatctacttttataaagtagggagaaattgacacaagattctctttttgtgcggtggcaactttggctttgttggggaagcttgatgctattaatgtggaaaaggcaatcgaatttgttttatccctgtatgaactttgacggtggatttggttgcagaccaggttctgaatcccatgctgggcagatctatttgttgcaccaggatttctgggctattacaagtcagttgcatcaa

SEQ ID NO: 194500 - DNA, 941 bp, Homo Sapiens
ctttgtacaaaaaagttggcatgggcactccacagaaggatgttattatcaagtcagatgcaccggacactttgttattggagaaacatgcagattatatcgcatcctatggctcaaagaaagatgattatgaatactgtatgtctgagtatttgagaatgagtggcatctattggggtctgacagtaatggatctcatgggacaacttcatcgcatgaatagagaagagattctggcatttattaagtcttgccaacatgaatgtggtggaataagtgctagtatcggacatgatcctcatcttttatacactcttagtgctgtccagattcttacgctgtatgacagtattaatgttattgacgtaaataaagttgtggaatatgttaaaggtctacagaaagaagatggttcttttgctggagatatttggggagaaattgacacaagattctctttttgtgcggtggcaactttggctttgttggggaagcttgatgctattaatgtggaaaaggcaatcgaatttgttttatcctgtatgaactttgacggtggatttggttgcagaccaggttctgaatcccatgctgggcagatctattgttgcacaggatttctggctattacaagtcagttgcatcaagtaaattctgatttacttggctggtggctttgtgaacgacaattaccctcaggcgggctcaatggaaggccggagaagttaccagatgtatgctactcatggtgggtcctggcttccctaaagataattggaagacttcattggattgatagagagaaactgcgtaatttcattttagcatgtcaagatgaagaaacgggggggattgcagacaggccaggagatatggtggatccttttcataccttatttgaaatgctggattgtcactttgggaaaaaacaattaacctgt

SEQ ID NO: 194501 - DNA, 1288 bp, Homo Sapiens; identical to SEQ ID NO: 187879

SEQ ID NO: 194502 - DNA, 591 bp, Homo Sapiens
ctttgtacaaaaaagttggagactgcgccccacatggagctgttcctcgcgggccgccgggtgctggtcaccggggcaggcaaaggtatagggcgcggcacggtccaggcgctgcacgcgacgggcgcgcgggtggtggctgtgagccggactcaggcggatcttgacagccttgtccgcgagtgcccggggatagaacccgtgtgcgtggacctgggtgactgggaggccaccgagcgggcgctgggcagcgtgggccccgtggacctgctggtgaacaacgccgctgtcgccctgctgcagcccttcctggaggtcaccaaggaggcctttgacagatcctttgaggtgaacctgcgtgcggtcatccaggtgtcgcagattgtggccaggggcttaatagcccggggagtcccaggggccatcgtgaatgtctccagccagtgctcccagcgggcagtaactaaccatagcgtctactgtgagtgccccagctgtgccctcagccccaccccagccccatcctcgccctcatcaccgacccccgctccagccagcttgggttcctcttcataagctccaccaagggtg

SEQ ID NO: 194503 - DNA, 1338 bp, Homo Sapiens; identical to SEQ ID NO: 187886

SEQ ID NO: 194504 - DNA, 1008 bp, Homo Sapiens
ccaactttgtacaaaaaagttggtgataaaactccttcaaactgattctatagacagttttgaaacacagagaacaccacgaaaaagtaaccttgatgaagaggtgaatgtaattcctccacacactccagttaggactgttatgaacactatccaacaattaatgatgattttaaattcagcaagtgatcaaccttcagaaaatctgatttcctattttaacaactgcacagtgaatccaaaagaaagtatactgaaaagagtgaaggatataggatacatctttaaagagaaatttgctaaagctgtgggacagggttgtgtcgaaattggatcacagcgatacaaacttggagttcgcttgtattaccgagtaatggaatccatgcttaaatcagaagaagaacgattatccattcaaaattttagcaaacttctgaatgacaacatttttcatatgtctttattggcgtgcgctcttgaggttgtaatggccacatatagcagaagtacatctcagaatcttgattctggaacagatttgtctttcccatggattctgaatgtgcttaatttaaaagcctttgatttttacaaagtgatcgaaagttttatcaaagcagaaggcaacttgacaagagaaatgataaaacatttagaacgatgtgaacatcgaatcatggaatcccttgcatggctctcagattcacctttatttgatcttattaaacaatcaaaggaccgagaaggaccaactgatcaccttgaatctgcttgtcctcttaatcttcctctccagaataatcacactgcagcagatatgtatctttctcctgtaagatctccaaagaaaaaaggttcaactacgcgtgtaaattctactgcaaatgcagagacacaagcaacctcagccttccagacccagaagccattgaaatctacctctctttcactgttttataaaaagtgtatcggctagcctatctccggctaaatacactttgtgaa

SEQ ID NO: 194505 - DNA, 1326 bp, Homo Sapiens; identical to SEQ ID NO: 187890

SEQ ID NO: 194506 - DNA, 835 bp, Homo Sapiens; identical to SEQ ID NO: 187891

SEQ ID NO: 194507 - DNA, 859 bp, Homo Sapiens; identical to SEQ ID NO: 187897
  misc_feature (106)..(144): n is a, c, g, or t
  misc_feature (387)..(450): n is a, c, g, or t

SEQ ID NO: 194508 - DNA, 775 bp, Homo Sapiens
  misc_feature (477)..(534): n is a, c, g, or t
ttggcaacagcccagaaagagaaagacggagaggcagagacccaggggagccgaggagcggagacacggacccagcagggtcacgcgggaggagactcgggacacccactcgctggctgccaccgggagcagaggggggctcggccgccccctcccacatcagtctccagacccttggggcttcagaggccgctcctaggctcctcggaggaggcgcgggtttcttcttttccggagagcaaactttcctcggagatgcctggcaggatgagccgcggcccccggagaggacgggacagcctctgatcgccgcctgcgtgccccgccactgcccatggccaggaggccccagggaacggacagcccgacctcttaggcgccgggaccctcaggctcagatcagtggccgaggccccagagtttgcaaactcagctctggagttcagcagcaacagcagcaggaaaaacctgcccctnnnnnnnnnnnnnnnnnnnnnnnnnnnnnnnnnnnnnnnnnnnnnnnnnnnnnnnnnnggttcccgccaggccctcctgccatgtcggacccagacgtccccaggggctcggatgtccccgccatgtggcccccttgttccaggggtgcctgagccccttcaaggagccccaacccacccccaaccttggcccagccctgagccccagggaccatgagcgggggcaagaagaagagtagttttcaaatcaccagcgtcacacggactatgagggccctgggagcccaggggcttcagat

SEQ ID NO: 194509 - DNA, 1181 bp, Homo Sapiens; identical to SEQ ID NO: 181616
  misc_feature (187)..(195): n is a, c, g, or t

SEQ ID NO: 194510 - DNA, 1384 bp, Homo Sapiens
  misc_feature (1011)..(1059): n is a, c, g, or t
ttggctcactgactataaaagaatagagaaggaagggcttcagtgaccggctgcctggctgacttacagcagtcagactctgacaggatcatggctatgatggaggtccaggggggacccagcctgggacagacctgcgtgctgatcgtgatcttcacagtgctcctgcagtctctctgtgtggctgtaacttacgtgtactttaccaacgagctgaagcagatgcaggacaagtactccaaaagtggcattgcttgtttcttaaaagaagatgacagttattgggaccccaatgacgaagagagtatgaacagcccctgctggcaagtcaagtggcaactccgtcagctcgttagaaagatgattttgagaacctctgaggaaaccatttctacagttcaagaaaagcaacaaaatatttctcccctagtgagagaaagaggtcctcagagagtagcagctcacataactgggaccagaggaagaagcaacacattgtcttctccaaactccaagaatgaaaaggctctgggccgcaaaataaactcctgggaatcatcaaggagtgggcattcattcctgagcaacttgcacttgaggaatggtgaactggtcatccatgaaaaagggttttactacatctattcccaaacatactttcgatttcaggaggaaataaaagaaaacacaaagaacgacaaacaaatggtccaatatatttacaaatacacaagttatcctgaccctatattgttgatgaaaagtgctagaaatagttgttggtctaaagatgcagaatatggactctattccatctatcaagggggaatatttgagcttaaggaaaatgacagaatttttgtttctgtaacaaatgagcacttgatagacatggaccatgaagccagttttttcggggcctttttagttggctaactgacctggaaagaaaaagcaataacctcaaagtgactattcagttttcaggatgatacactatgaagatgtttnnnnnnnnnnnnnnnnnnnnnnnnnnnnnnnnnnnnnnnnnnnnnnnnnctctatgcaatctgagtagagcagccacaaccaaaaaattctacaacacacactgttctgaaagtgactcacttatcccaagagaatgaaattgctgaaagatctttcaggactctacctcatatcagtttgctagcagaaatctagaagactgtcagcttccaaacattaatgcagtggttaacatcttctgtctttataatctactccttgtaaagactgtagaagaaagcgcaacaatccatctctcaagtagtgtatcacagtagtagcctccaggtttccttaagggacaacatccttaagtcaaaagagagaagaggca

SEQ ID NO: 194511 - DNA, 1016 bp, Homo Sapiens
actttgtacaaaaaagttgggaatagagaaggaagggcttcagtgaccggctgcctggctgacttacagcagtcagactctgacaggatcatggctatgatggaggtccaggggggacccagcctgggacagacctgcgtgctgatcgtgatcttcacagtgctcctgcagtctctctgtgtggctgtaacttacgtgtactttaccaacgagctgaagcagatgcaggacaagtactccaaaagtggcattgcttgtttcttaaaagaagatgacagttattgggaccccaatgacgaagagagtatgaacagcccctgctggcaagtcaagtggcaactccgtcagctcgttagaaagatgattttgagaacctctgaggaaaccatttctacagttcaagaaaagcaacaaaatatttctcccctagtgagagaaagaggtcctcagagagtagcagctcacataactgggaccagaggaagaagcaacacattgtcttctccaaactccaagaatgaaaaggctctgggccgcaaaataaactcctgggaatcatcaaggagtgggcattcattcctgagcaacttgcacttgaggaatggtgaactggtcatccatgaaaaagggttttactacatctattcccaaacatactttcgatttcaggaggaaataaaagaaaacacaaagaacgacaaacaaatggtccaatatatttacaaatacacaagttatcctgaccctatattgttgatgaaaagtgctagaaatagttgttggtctaaagatgcagaatatggactctattccatctatcaagggggaatatttgagcttaaggaaaatgacagaatttttgtttctgtaacaaatgagcacttgatagacatggaccatgaagccagtttttttggggcctttttagttggctaactgacctggaaagaaaaagcataacctcaaggtgactattcagttttcaagatgatacactatgaagatgtttcaaaaaa

SEQ ID NO: 194512 - DNA, 1416 bp, Homo Sapiens; identical to SEQ ID NO: 187907

SEQ ID NO: 194513 - DNA, 1408 bp, Homo Sapiens; identical to SEQ ID NO: 187908

SEQ ID NO: 194514 - DNA, 1309 bp, Homo Sapiens; identical to SEQ ID NO: 187909

SEQ ID NO: 194515 - DNA, 1555 bp, Homo Sapiens
  misc_feature (1398)..(1406): n is a, c, g, or t
ttggaaaagaaatctcaaaagattacattttgattcaccaccacatcttcttgatatctacccaagaacaccacatccccatgaggaaaaagttgagactgtagaaattaatccaaagcttgaggtaatcgatttgcagatctctactccccctgttatggatatcctttcttttgattctaccacagtggcttcagtaagttccaagccgagttctccctgcattgcgagaccaatctagacggctcgtgtagcagcagctcgccgccgttgccagtgctggggctcgggggcctgcggatcagctctgactcttcctcggacatcgagtctgaccttgaccgagaccccaatagtgcaacagactcggatggtagtccgctgtccaacagccagccttccttcccagtggagatcttgcccttcctctacttgggctgtgccaaagactccaccaacttggacgtgttggaggaattcggcatcaagtacatcttgaacgtcacccccaatttgccgaatctctttgagaacgcaggagagtttaaatacaagcaaatccccatctcggatcactggagccaaaacctgtcccagtttttccctgaggccatttctttcatagatgaagcccggggcaagaactgtggtgtcttggtacattgcttggctggcattagccgctcagtcactgtgactgtggcttaccttatgcagaagctcaatctgtcgatgaacgatgcctatgacattgtcaaaatgaaaaaatccaacatatcccctaacttcaacttcatgggtcagctgctggacttcgagaggacgctgggactcagcagcccatgtgacaacagggttccagcacagcagctgtattttaccaccccttccaaccagaatgtataccaggtggactctctgcaatctacgtgaaagaccccacacccctccttgctggaatgtgtctggcccttcagcagtttctcttggcagcatcagctgggctgctttctttgtgtgtggccccaggtgtcaaaatgacaccagctgtctgtactagacaaggttaccaagtgcggaattggttaatactaacagagagatttgctccattctctttggaataacaggacatgctgtatagatacaggcagtaggtttgctctgtacccatgtgtacagcctacccatgcagggactgggattcgaggacttccaggcgcatagggtagaaccaaatgatagggtaggagcatgtgttctttagggccttgtaaggctgtttccttttgcatctggaactgactatataattgtcttcaatgaagactaattcaattttgcatatagaggagccaaagagagatttcagctctgtatttgtggtatcagtttggnnnnnnnnntctgatactccatttgattattgtaaatatttgatcttgaatcacttgacagtgtttgtttgaattgtgtttgttttttcctttgatgggcttaaaagaaattatccaaaagggagaaagagcagtatgccacttcttaaaaacagaac

SEQ ID NO: 194516 - DNA, 904 bp, Homo Sapiens
  misc_feature (488)..(496): n is a, c, g, or t
  misc_feature (634)..(660): n is a, c, g, or t
ttggctctctgcaatctacgtgaaagaccccacacccctccttgctggaatgtgtctggcccttcagcagtttctcttggcagcatcagctgggctgctttctttgtgtgtggccccaggtgtcaaaatgacaccagctgtctgtactagacaaggttaccaagtgcggaattggttaatactaacagagagatttgctccattctctttggaataacaggacatgctgtatagatacaggcagtaggtttgctctgtacccatgtgtacagcctacccatgcagggactgggattcgaggacttccaggcgcatagggtagaaccaaatgatagggtaggagcatgtgttctttagggccttgtaaggctgtttccttttgcatctggaactgactatataattgtcttcaatgaagactaattcaattttgcatatagaggagccaaagagagatttcagctctgtatttgtggtatcagtttggnnnnnnnnntctgatactccatttgattattgtaaatatttgatcttgaatcacttgacagtgtttgtttgaattgtgtttgttttttcctttgatgggcttaaaagaaattatccaaagggagaaagagcagtatgccacttcttnnnnnnnnnnnnnnnnnnnnnnnnnnnttgtgctcttttctaatccaaagggtatatttgcagcatgcttgactttaccaattctgatgacatctttacggacactattatcactaagaccttgttatggcgaagtctttagtctttttcatgtattttcctcatgattttttctctttatgtagtttatgccttacctttgtaaatatttttgcttgtgttgtcgcaaaggggataatctgggaaagacaccaaatcatgggctcacttt

SEQ ID NO: 194517 - DNA, 1428 bp, Homo Sapiens; identical to SEQ ID NO: 181619
  misc_feature (223)..(242): n is a, c, g, or t
  misc_feature (1369)..(1381): n is a, c, g, or t

SEQ ID NO: 194518 - DNA, 1317 bp, Homo Sapiens; identical to SEQ ID NO: 181620
  misc_feature (425)..(444): n is a, c, g, or t
  misc_feature (814)..(861): n is a, c, g, or t
  misc_feature (1011)..(1044): n is a, c, g, or t

SEQ ID NO: 194519 - DNA, 1479 bp, Homo Sapiens; identical to SEQ ID NO: 181621
  misc_feature (362)..(381): n is a, c, g, or t
  misc_feature (948)..(981): n is a, c, g, or t

SEQ ID NO: 194520 - DNA, 934 bp, Homo Sapiens; identical to SEQ ID NO: 187912
  misc_feature (490)..(502): n is a, c, g, or t

SEQ ID NO: 194521 - DNA, 1527 bp, Homo Sapiens; identical to SEQ ID NO: 181623

SEQ ID NO: 194522 - DNA, 1250 bp, Homo Sapiens; identical to SEQ ID NO: 181624
  misc_feature (1051)..(1104): n is a, c, g, or t

SEQ ID NO: 194523 - DNA, 1271 bp, Homo Sapiens; identical to SEQ ID NO: 187916

SEQ ID NO: 194524 - DNA, 1512 bp, Homo Sapiens; identical to SEQ ID NO: 187920

SEQ ID NO: 194525 - DNA, 941 bp, Homo Sapiens; identical to SEQ ID NO: 181628

SEQ ID NO: 194526 - DNA, 1513 bp, Homo Sapiens; identical to SEQ ID NO: 187921

SEQ ID NO: 194527 - DNA, 604 bp, Homo Sapiens
gatgagcaatgctttttctataatgccaactttgtacaaaaaagttggcccgcccctccttctcgcggcgctcgagggaccatggccgatcctcgcgtgagacagatcaagatcaagaccggcgtggtgaagcggttggtcaaagaaaaagtgatgtatgaaaaagaggcaaaacaacaagaagaaaagattgaaaaaatgagagctgaagacggtgaaaattatgacattaaaaagcaggcagagatcctacaagaatccaggatgatgatcccagattgccagcgcaggttggaagccgcatatttggatcttcaacggatactagaaaatgaaaaagacttggaagaagctgaggaatataaagaagcacgtttagtactggattcagtgaagttagaagcctgaaacttttctcgtatggggtggtttttgcattaaatcctggggtccattttacaatccattatttttgaccactgctatgtgttcaagtagtatgagaatgtgattgtttttatctggttacatatatatttctttgtctaatttaatatgtcaaataaatgagttcatctaataaaaattgtttatattatacttt

SEQ ID NO: 194528 - DNA, 976 bp, Homo Sapiens
ctttgtacaaaaaagttggctccatttaagcccctcaccctgaggcagctggagcagcaggaagaaatactaagggtgccttttaggagaaataaagagggtgtcggttggtggaaatatgaattctgctatggcaaacatgtacatcaataccatgaggacaaggatagtgggaaaacctctgtggttgtcgggacatggaaccaagaagagcatattgaatgggctaagaagaatactgctagagcttatcatcttcaagacgatggtacccagacagtcaggatggtgtcacatttttatggaaatggagatatttgtgatataactgacaaaccaagacaggtgactgtaaaactaaagtgcaaagaatcagattcacctcatgctgttactgtatatatgctagagcctcactcctgtcaatatattcttggggttgaatctccagtgatctgtaaaatcttagatacagcagatgaaaatggacttctttctctccccaactaaaggatattaaagttaggggaaagaaaagatcattgaaagtcatgataatttctgtcccactgtgtctcattatagagttctcagccattggacctcttctaaaggatggtataaaatgactctcaaccactttgtgaatacacatgtgtatataagaggttattgataaacttctgaggcagacatttgtctcgctttttttcatttttgttgtgtcttataaactgactgtttttctttgcttggatactgtgattccaaaataaatctcatccagcaagttagagtccagcctaatcaaatgtcataattgttgtacctattgaaagtttttaaataatagatttattatgtaaattatagtatatgtaagtacctaatgaagtaaagatcatgaagaaagaaattgatagtgtaaatgaaagaccatgtaaaatatgtaattctagtacctgaaaatcccttt

SEQ ID NO: 194529 - DNA, 2165 bp, Homo Sapiens; identical to SEQ ID NO: 187924

SEQ ID NO: 194530 - DNA, 952 bp, Homo Sapiens
ccaactttgtacaaaaaagttggatcaagaagtttgggtgcagctgggagagctagactaagttggtcatgatgcagaagctactcaaatgcagtcggcttgtcctggctcttgccctcatcctggttctggaatcctcagttcaaggttatcctacgcagagagccaggtaccaatgggtgcgctgcaatccagacagtaattctgcaaactgccttgaagaaaaaggaccaatgttcgaactacttccaggtgaatccaacaagatcccccgtctgaggactgacctttttccaaagacgagaatccaggacttgaatcgtatcttcccactttctgaggactactctggatcaggcttcggctccggctccggctctggatcaggatctgggagtggcttcctaacggaaatggaacaggattaccaactagtagacgaaagtgatgctttccatgacaaccttaggtctcttgacaggaatctgccctcagacagccaggacttgggtcaacatggattagaagaggattttatgttataaaagaggattttcccaccttgacaccaggcaatgtagttagcatattttatgtaccatggttatatgattaatcttgggacaaagaattttatagaaatttttaaacatctgaaaaagaagcttaagttttatcatccttttttttctcatgaattcttaaaggattatgctttaatgctgttatctatcttattgttcttgaaaatacctgcattttttggtatcatgttcaaccaacatcattatgaaattaattagattcccatggccataaaatggctttaaagaatatatatatatttttaaagtagcttgagaagcaaattggcaggtaatatttcatacctaaattaagactctgacttggattgtgaattataatgatatgccccttttcttataaaacc

SEQ ID NO: 194531 - DNA, 1015 bp, Homo Sapiens; identical to SEQ ID NO: 187927

SEQ ID NO: 194532 - DNA, 518 bp, Homo Sapiens
aggccggtgaggtcctccgtcccaccacaccatcctcccccgaaaactagctgcccgactgctataccagacttggggtggaataaggattcacggtggcaatgggaccacctgggccatacagtgtggcaaaatcaacttgcccacaaaccccatcccaggtgctgggatgctaacacactgaagctgaaagaccacacttggttttgccacagatcaagctgcatctgactagacagcctgttctctaccctatttcctgcagaagtctttttctttgtaatgcaacaagtgctacacagctcagatccaacgggacacggggaaagaggctgtagtgcacctagccctgctgagggagacccttgccttgccaaagcactttgctcacaaaggcagtttcaaagagtatagcccgaactcattcctggtaaaacaaaaggaaaacatttttgataaatgtacccaaaagtctcaaaaggggtacgctggtcttctccaacttttttgtacaaagt

SEQ ID NO: 194533 - DNA, 1085 bp, Homo Sapiens; identical to SEQ ID NO: 187943

SEQ ID NO: 194534 - DNA, 1113 bp, Homo Sapiens; identical to SEQ ID NO: 187947
  misc_feature (470)..(498): n is a, c, g, or t
  misc_feature (800)..(826): n is a, c, g, or t

SEQ ID NO: 194535 - DNA, 952 bp, Homo Sapiens
  misc_feature (709)..(756): n is a, c, g, or t
ttgggtctggttttgggcgggaattgaaaccgccgctgaagccaacaagaatttgagaactgtaaataccaagccttgaaagggaccatggtgcggcctgtgagacataagaaaccagtcaattactcacagtttgaccactctgacagtgatgatgattttgtttctgcaactgtacctttaaacaagaaatccagaacagcaccaaaggagttaaaacaagataaaccaaaacctaacttgaacaatctccggaaagaagaaatcccagtacaagagaaaacccctaaaaaaaggatggctttagatgacaagctctaccagagagacttagaagttgcactagctttatcagtgaaggaacttccaacagtcaccactaatgtgcagaactctcaagataaaagcattgaaaaacatggcagtagtaaaatagaaacaatgaataagtctcctcatatctctaattgcagtgtagccagtgattatttagatttggataagattactgtggaagatgatgttggtggtgttcaagggaaaagaaaagcagcatctaaagctgcagcacagcagaggaagattcttctggaaggcagtgatggtgatagtgctaatgacactgaaccagactttgcacctggtgaagattctgaggatgattctgatttttgtgagagtgaggataatgacgaagacttctctatgnnnnnnnnnnnnnnnnnnnnnnnnnnnnnnnnnnnnnnnnnnnnnnnntccccagtagaaaagaaagagaagaaatctaaatccaaatgtaatgctttggataccactaggaaaccattagaaatacgcagtcccttcagctgaaagcaaggaaacctaaatgggtcccaccaggtatggcatatttatcatcaaggacaggagcttggaaaattatcactgcggcatctggaaggtagcagaa

SEQ ID NO: 194536 - DNA, 1111 bp, Homo Sapiens; identical to SEQ ID NO: 187953
  misc_feature (856)..(866): n is a, c, g, or t

SEQ ID NO: 194537 - DNA, 1241 bp, Homo Sapiens; identical to SEQ ID NO: 187957

SEQ ID NO: 194538 - DNA, 1514 bp, Homo Sapiens; identical to SEQ ID NO: 187959

SEQ ID NO: 194539 - DNA, 987 bp, Homo Sapiens; identical to SEQ ID NO: 181648

SEQ ID NO: 194540 - DNA, 939 bp, Homo Sapiens; identical to SEQ ID NO: 187966
  misc_feature (829)..(838): n is a, c, g, or t

SEQ ID NO: 194541 - DNA, 1004 bp, Homo Sapiens; identical to SEQ ID NO: 181650

SEQ ID NO: 194542 - DNA, 711 bp, Homo Sapiens; identical to SEQ ID NO: 187972

SEQ ID NO: 194543 - DNA, 977 bp, Homo Sapiens
agttggggaaattgcggtagtgaccctcgggcctcgccatgaagagccgctttagcaccattgacctccgcgccgtactcgcggagctgaatgctagcttgctaggaatgagagtaaacaatgtttatgatgtggataataagacataccttattcgtcttcaaaaaccggactttaaagctacacttttacttgaatctggcatacgaattcatacaacagaatttgagtggcctaagaatatgatgccgtctagttttgccatgaagtgccgaaaacatttgaagagtcggagattagtcagtgcaaaacagcttggtgtggatagaattgtagattttcaatttggaagtgatgaagctgcttaccatttaatcattgagctctatgatagggggaacattgttcttacagattatgagtacgtaattttaaatattctaaggtttcgaactgatgaggcagatgatgttaaatttgctgttcgtgaacgctatccacttgatcatgctagagctgctgaacctttgcttactttggaaaggttgactgaaatagtagccagcgcacctaagggtgaactactgaagagggtgcttaacccattacttccctatggaccagctctcattgaacactgtcttttagaaaatggattctcgggtaatgtcaaagtggatgaaaaacttgaaactaaagatattgaaaaagtacttgtttctctgcagaaagcagaagactatatgaaaacaacatccaacttcagtgggaagggatatatcattcagaaaagagaaataaaaccatgcttggaagcagataaaccagttgaagacatactgacgtatgaggaatttcatcctttcttgttttctcaacattcacaatgtccatatatagaatttgaatccatttgacaaggcggtggatgaattttattccagatagaaggccaggaaattgacttaaagcttaca

SEQ ID NO: 194544 - DNA, 1259 bp, Homo Sapiens; identical to SEQ ID NO: 181654

SEQ ID NO: 194545 - DNA, 1852 bp, Homo Sapiens; identical to SEQ ID NO: 181655

SEQ ID NO: 194546 - DNA, 375 bp, Homo Sapiens
ctttgtacaaaaaagttgggtgtgtgtccacaggaaggggctccgtggggatcccatgaagggatttgagctctttcagctccatgtcatttaacttttttgtttaaccaccttggctttctctccttttttgctgtcctccttacggaccagttaccagattcagaggctaacagttagttacttgttaatgctagtcacagccaggaggtcagaaggaattttctacttctggatccaaatgttacctcttaggggaagttatgccccctcaactattgtcttattataatgaatctttcctttttggtccttttaagtaaccactcaaaacttttcatttcactgaaaaaatatgaaaaaccatgacaatag

SEQ ID NO: 194547 - DNA, 1504 bp, Homo Sapiens; identical to SEQ ID NO: 181656
  misc_feature (590)..(598): n is a, c, g, or t

SEQ ID NO: 194548 - DNA, 1876 bp, Homo Sapiens; identical to SEQ ID NO: 187991

SEQ ID NO: 194549 - DNA, 945 bp, Homo Sapiens; identical to SEQ ID NO: 181659

SEQ ID NO: 194550 - DNA, 327 bp, Homo Sapiens
  misc_feature (129)..(186): n is a, c, g, or t
ttggaaagaaagccacgatttaggtaatgagtggatgagtaaatggtggaggatgggagtcaaaatcagaattatagaagaagtatttcctgtaactatagaaagaattatgtatatatacatgcagannnnnnnnnnnnnnnnnnnnnnnnnnnnnnnnnnnnnnnnnnnnnnnnnnnnnnnnnntccatagtggacttattcagaacatagatatgtattcagcttgtcttcaaatacggccaagcagaaaatgttttatattttataaatcatcttttgactctgtatttaaattctatgatactgaaaataaaggcattctgg

SEQ ID NO: 194551 - DNA, 1754 bp, Homo Sapiens; identical to SEQ ID NO: 188014
  misc_feature (116)..(152): n is a, c, g, or t
  misc_feature (220)..(267): n is a, c, g, or t

SEQ ID NO: 194552 - DNA, 1702 bp, Homo Sapiens; identical to SEQ ID NO: 181668

SEQ ID NO: 194553 - DNA, 1832 bp, Homo Sapiens; identical to SEQ ID NO: 181669
  misc_feature (293)..(325): n is a, c, g, or t
  misc_feature (354)..(362): n is a, c, g, or t

SEQ ID NO: 194554 - DNA, 923 bp, Homo Sapiens; identical to SEQ ID NO: 188027

SEQ ID NO: 194555 - DNA, 701 bp, Homo Sapiens
ttggcaggctttgagtgtagcacttggtagttcttcctctgctctgcttcccttcggaggaaaatttcaggctgaaggtttagcgggtgccgcctctaaagagagcaatcactacacttatggctgggattttgcgcttagtagttcaatggcccccaggcagactacagaccgtgacaaaaggtgtggagtctcttatttgtacagattggattcgtcacaaattcaccagatcaagaattccagaaaaagtgtttcaggcctcacctgaagatcatgaaaaatacggtggggatccacagaaccctcataaactgcatattgttaccagaataaaaagtacaagaagacgtccatattgggaaaaagatataataaagatgcttggattagaaaaagcacatacccctcaagttcacaagaatatcccttcagtgaatgcaaaattgaaagtagttaagcatttgataagaatcaagcccttgaagttgccacaaggacttccaacagaggagaacatgtctaacacgtgcctcaaaagcactggggagttagtagtgcagtggcatctgaaacctgtggagcagaaagcacatgagtcctaatgccccagcagcttccgattggaaaatgcaaattgtttttatttaaagatggtgagaaagtgttttcattaaaatatgttttcaaaaccattttca

SEQ ID NO: 194556 - DNA, 1281 bp, Homo Sapiens; identical to SEQ ID NO: 188029
  misc_feature (664)..(705): n is a, c, g, or t

SEQ ID NO: 194557 - DNA, 918 bp, Homo Sapiens; identical to SEQ ID NO: 188036

SEQ ID NO: 194558 - DNA, 1710 bp, Homo Sapiens; identical to SEQ ID NO: 188040

SEQ ID NO: 194559 - DNA, 1066 bp, Homo Sapiens; identical to SEQ ID NO: 188041

SEQ ID NO: 194560 - DNA, 1744 bp, Homo Sapiens; identical to SEQ ID NO: 188043

SEQ ID NO: 194561 - DNA, 1757 bp, Homo Sapiens; identical to SEQ ID NO: 181677

SEQ ID NO: 194562 - DNA, 1739 bp, Homo Sapiens; identical to SEQ ID NO: 188056
  misc_feature (1101)..(1111): n is a, c, g, or t

SEQ ID NO: 194563 - DNA, 1484 bp, Homo Sapiens; identical to SEQ ID NO: 188059

SEQ ID NO: 194564 - DNA, 723 bp, Homo Sapiens
ttgtacaaaaaagttggctctttctaggctgaaccttgagtccccctgctttttggcagacctaatggatcactgtcttgcagctagttcttcatgtggggcctcttaggccagtgccggaggaggcatgctcctctttctatgccacagaacaaacactactctagcagagcctttcttgcactttaaagtgagattaatttagctgtaatttggttaaaaacttcctaagagagaaaattaagtctactgatttggtataggtaaatggacattaaacttttttaaagtaaaggagatggtagataccgttagattatagtcttgaggttcatgtgaagccagtggtgttaacttactttgatttccttgttcaggtcagggcctggaacgcctgtgcggggaggtcactcaattcaaaattttctgtatgaaagcatttttcaccaaaatgagcctcatccctttatgcaacacataaccttactgagggagggaaatacggaagccacctttttatttctcttcactgtgtacaagttcacttgttgtcttgaacactgtctcaaatacctgctttttgttttggatagtaccttgtctgtataagaagctggcctttccatagagaggccctggagtctaaaattatgagaacaattaatttatttgtgtcttctattatgatctcgttttgacaataaaaatccctactactttctc

SEQ ID NO: 194565 - DNA, 1406 bp, Homo Sapiens; identical to SEQ ID NO: 188060

SEQ ID NO: 194566 - DNA, 887 bp, Homo Sapiens; identical to SEQ ID NO: 181690

SEQ ID NO: 194567 - DNA, 1848 bp, Homo Sapiens; identical to SEQ ID NO: 188061

SEQ ID NO: 194568 - DNA, 870 bp, Homo Sapiens; identical to SEQ ID NO: 181691

SEQ ID NO: 194569 - DNA, 1419 bp, Homo Sapiens; identical to SEQ ID NO: 181692
  misc_feature (1272)..(1295): n is a, c, g, or t

SEQ ID NO: 194570 - DNA, 1171 bp, Homo Sapiens; identical to SEQ ID NO: 181695
  misc_feature (69)..(96): n is a, c, g, or t
  misc_feature (795)..(811): n is a, c, g, or t
  misc_feature (861)..(879): n is a, c, g, or t

SEQ ID NO: 194571 - DNA, 961 bp, Homo Sapiens
  misc_feature (244)..(260): n is a, c, g, or t
  misc_feature (310)..(331): n is a, c, g, or t
ttgggttggtttctacttttaccagtcacccaaacatatttatgtttttagttttatgtactcatttccctttgttttcctcaaacagcatgatttttttgcacatgtagaaattttttaaaagaaagaaattagtacatcattttctctggattttcttcacttccctcttcctttctactaactccttccttaaaggccatatcactccatttgcattatttgtgcaaatgccagggttggnnnnnnnnnnnnnnnnngctatttacctaaaaaaagaaaatgcttcagtcaattgcttttttatttnnnnnnnnnnnnnnnnnnnnnngctgtaaccttatcatttctgagtagaccattgagcgatgaatgcacacctgtagtagcccaggaccagctgtggtggctaaagggaatatgttaattaagcaagaggttcttttctaaaagtggtatctgttatccacaatgtattttagttattcccacaagtcaggggtccagataaaatgagggttatcagctaactgatatgctatcattgaggttcatcaatgaatttgtacatttctagttccctttggtgaagggaaaaatgatgattttgcaagacctagattttggcttggtttcttgcctccttttttggcagccttcatcttctcatctcccaaaccccctgagcccgtagggttttcatagtggacaaagaacttgtggtcttttaaaactgggactgatacttttttgagagagtatcgtgtcgaaagtgtgatgttctaccactttaccaataactaattttaaatacacattgtcctctcgatttttggaccaaacagacgctcacagtggaggcttatcaagggttgcattggggaagaagcctctccctctctgtcagcaccacctggtaaaggtgactgtacagatgtgcattttccttttggtaaaaatg

SEQ ID NO: 194572 - DNA, 1210 bp, Homo Sapiens; identical to SEQ ID NO: 188062
  misc_feature (291)..(314): n is a, c, g, or t

SEQ ID NO: 194573 - DNA, 1015 bp, Homo Sapiens; identical to SEQ ID NO: 188065
  misc_feature (60)..(72): n is a, c, g, or t

SEQ ID NO: 194574 - DNA, 431 bp, Homo Sapiens
cctttaaaatgccccctttgtacaaaaaagttggggccatctcccctgctgcttggttagatcatatagctaatgaattaggcaggggagctattttttgaagatgatgaactaaatgttgaagacaagtttgagatctgtaaaatgtgattttttacttccacttataatacttgtgattggggaggtttgtggaaattcaattatgatgaaaaacctatcttttttgtaatgttggcatacttggggaatttagtggcaaatacattccccagcaggccttttgttggttgcactaactgcaaggttgctgggaagtagagtccatttggttgatgagctttgactgcggttttggaaccttacctctcctccttagcccaatatgctgtcttgggtcctattcaaataaagttatttctcctggtctc

SEQ ID NO: 194575 - DNA, 2166 bp, Homo Sapiens; identical to SEQ ID NO: 188072
  misc_feature (1161)..(1170): n is a, c, g, or t
  misc_feature (1510)..(1591): n is a, c, g, or t

SEQ ID NO: 194576 - DNA, 2279 bp, Homo Sapiens; identical to SEQ ID NO: 188073

SEQ ID NO: 194577 - DNA, 520 bp, Homo Sapiens; identical to SEQ ID NO: 188076

SEQ ID NO: 194578 - DNA, 872 bp, Homo Sapiens
ttggcgcccaggctgccagaccggaagcgctccgctgtacctggatcctgctcctctgggttgaaacccgggcgccgccaagatgccggcttaccactcttctctcatggatcctgataccaaactcatcggaaacatggcactgttgcctatcagaagtcaattcaaaggacctgcccccagagagacaaaagatacagatattgtggatgaagccatctattacttcaaggccaatgtcttcttcaaaaactatgaaattaagaatgaagctgataggaccttgatatatataactctctacatttctgaatgtctgaagaaactgcaaaagtgcaattccaaaagccaaggtgagaaagaaatgtatacgctgggaatcactaattttcccattcctggagagcctggttttccacttaacgcaatttatgccaaacctgcaaacaaacaggaagatgaagtgatgagagcctatttacaacagctaaggcaagagactggactgagactttgtgagaaagttttcgaccctcagaatgataaacccagcaagtggtggacttgctttgtgaagagacagttcatgaacaagagtctttcaggacctggacagtgaagggagcccgggcagccaccgtctccagagccctgggcagcattttccagcaagatgtacacaatcttttgcctttatttcgtaaagttttatacagaagagagaagagcatgtctttacttgaaaaactcttgatcaagaatttgggtgggagaaaagaaagtgggttatcaagggtgatttgaaattttctgcagcattaaagctggcgcttaataagaataagtaataataaagaaatttctaacattcc

SEQ ID NO: 194579 - DNA, 761 bp, Homo Sapiens
ctttgtacaaaaaagttggaactcatcggaaacatggcactgttgcctatcagaagtcaattcaaaggacctgcccccagagagacaaaagatacagatattgtggatgaagccatctattacttcaaggccaatgtcttcttcaaaaactatgaaattaagaatgaagctgataggaccttgatatatataactctctacatttctgaatgtctgaagaaactgcaaaagtgcaattccaaaagccaaggtgagaaagaaatgtatacgctgggaatcactaattttcccattcctggagagcctggttttccacttaacgcaatttatgccaaacctgcaaacaaacaggaagatgaagtgatgagagcctatttacaacagctaaggcaagagactggactgagactttgtgagaaagttttcgaccctcagaatgataaacccagcaagtggtggacttgctttgtgaagagacagttcatgaacaagagtctttcaggacctggacagtgaagggagcccgggcagccaccgtctccagagccctgggcagcattttccagcaagatgtacacaatcttttgcctttatttcgtaaagttttatacagaagagagaagagcatgtctttacttgaaaaactcttgatcaagaatttgggtgggagaaaagaaagtggggttatcaagggtgatttgaaattttctgcagcattaaagctggcgcttaataagaataagtaataataaagaaatttc

SEQ ID NO: 194580 - DNA, 1844 bp, Homo Sapiens; identical to SEQ ID NO: 188084
  misc_feature (1573)..(1617): n is a, c, g, or t

SEQ ID NO: 194581 - DNA, 927 bp, Homo Sapiens
ttggccccgggcgcagcacactcccagccggccgcagcctgacacgccgcgcggccccccagtctcccgcggctgctcccccaggcatggcacagggcctcgcctcactatggcagcagcacggcacagcacgctcgacttcatgctcggcgccaaagctgatggtgagaccattctaaaaggcctccagtccattttccaggagcaggggatggcggagtcggtgcacacctggcaggaccatggctatttagcaacctacacaaacaagaacggcagctttgccaatttgagaatttacccacatggattggtgttgctggaccttcagagttatgatggtgatgcgcaaggcaaagaagagatcgacagtattttgaacaaagtagaggaaagaatgaaagaattgagtcaggacagtactgggcgggtgaaacgattaccacccatagtgcgaggaggagccatcgacagatactggcccaccgccgacgggcgcctggttgaatatgacatagatgaagtggtatatgacgaagattcaccttatcaaaatataaaaattctacactcgaagcagtttggaaatattctcatccttagtggggatgttaatttggcagagagtgatttggcatatacccgggccatcatgggcagtggcaaagaagattacactggcaaagatgtactcattctgggaggtggagacggaggcatattgtgtgaaatagtcaaactaaaaccaaagatggtcactatggtagagattgaccaaatggtgattgatgggtgtaagaaatacatgcgaaaaacgtgtggcgatgtcttagacaatcttaaaggagactgctatcaggttctaatagaagactgtatcccggtactgaagaggtacgccaagaaggagagaatttgattatgtga

SEQ ID NO: 194582 - DNA, 1994 bp, Homo Sapiens; identical to SEQ ID NO: 188102
  misc_feature (1529)..(1538): n is a, c, g, or t

SEQ ID NO: 194583 - DNA, 1771 bp, Homo Sapiens; identical to SEQ ID NO: 188108
  misc_feature (227)..(235): n is a, c, g, or t
  misc_feature (1392)..(1415): n is a, c, g, or t

SEQ ID NO: 194584 - DNA, 2484 bp, Homo Sapiens; identical to SEQ ID NO: 188111
  misc_feature (120)..(130): n is a, c, g, or t
  misc_feature (669)..(724): n is a, c, g, or t

SEQ ID NO: 194585 - DNA, 748 bp, Homo Sapiens
gccaactttgtacaaaaaagttgggtaaaagtgtctgtaggtacgttttatattatataaggacagaccaaaaatcaacctatcaaagcttcaaaaactttgggaaagggtgggattaagtacaagcacatttggcttacagtaaatgaactgatttttattaactgcttttgcccatataaaatgctgatatttactggaaacctagccagcttcacgattatgactaaagtaccagattataatgccagaatataatgtgcaggcaatcgtggatgtctctgacaaagtgtgtctcaaaaataatatacttttacattaaagaaatttaatgtttctctggagttggggctcttggctttcagagtttggttaatcagtgttgattctagatgatcaacataatggaccactcctgaatgagacttaattttgtctttcaaatttactgtcttaaatcagtttattaaatctgaattttaaaacatgctgtttatgacacaatgacacatttgttgcaccaattaagtgttgaaaaatatctttgcatcatagaacagaaatatataaaaatatatgttgaatgttaacaggtattttcacaggtttgtttcttgatagttactcagacactagggaaaggtaaatacaagtgaacaaaataagcaactaaatgagacctaataattggccttcgattttaaatatttgttcttataaaccttgtcaataaaaataaatctaaatc

SEQ ID NO: 194586 - DNA, 700 bp, Homo Sapiens; identical to SEQ ID NO: 181712

SEQ ID NO: 194587 - DNA, 1029 bp, Homo Sapiens; identical to SEQ ID NO: 188117

SEQ ID NO: 194588 - DNA, 853 bp, Homo Sapiens; identical to SEQ ID NO: 181715

SEQ ID NO: 194589 - DNA, 1060 bp, Homo Sapiens
gagcaatgcttttttattatagccaactttgtacaaaaaagttggggcacctttctttgcaaatgaggctaacagaccagactgcagcaagttatcagattcctcaatcagatgcactaggagtgaggagcccagggatggagggggttcctgaagtattgcagttggctgtagtagctgagttcttttccatgttaccgaaactgtagccagttacagtttactcaggaaaacggtagatcaattcagccatggtagtgctggttggcagggattggtaacggagagaactgctcatcagccaaaactcaagccttgccttttaggaggccaccagcagagggacttggtcctccttgtctggtacttgtgtacatgccggtgacctgaggactccactcacactggcgagcaaaaagggagcagtgattctcttttctctccccaccccctgccctttgttaccaacaccagtttcccagggggtacatgagtttctgaatttttaaaaaatgtttttggtttggtttttctggggactgataagtgctttaagcaatgtccataccccgtcaagactcccagcttagtcattttcttgtatttttctgttcacagtatttgtgtgtgtgcttgttttggcagctcattttggctgtattatatattgagtgatgaattgatcctcttttttccctaagggatatgaattgtttttcttgtgttatattctgcttgtgaatcgctggagcaaacctggggctgacacgcgtaagctagggctgcaaagcgagaagagagccggtggagtgtacttgtccctgacaggctgacctacctgagtctctgagcttttcagtccaaatctttgcaaggctcaaaatgccacagaacctctcctcttctccccactccccatggcagggaccggaccatccctacatgcaacatgctgttcctccagcccctcccattgccatggcaaaacaggtacctttggggcatgggggcattacatgggatgcttgtgtaatcgaccacctagccttctctctcccct

SEQ ID NO: 194590 - DNA, 1164 bp, Homo Sapiens; identical to SEQ ID NO: 188126
  misc_feature (289)..(313): n is a, c, g, or t
  misc_feature (964)..(1025): n is a, c, g, or t

SEQ ID NO: 194591 - DNA, 777 bp, Homo Sapiens
  misc_feature (560)..(569): n is a, c, g, or t
tttgtacaaaaaagttggggcagttgctccatttgagttcccattttaaattgaccaattttggggtgtgacacttttgagcggttgaattgggagaatgaagataagtaatttacctgtccaggatcaaaagaagcctagaaaagaagcagtaatctacctctgccgataacctgtttaagatgactcagcagaacaccgcgtttcattctattggtcaattccatgtggctgactaggtcaattttttttctgaacaaaagcaggtttttatatgtaaacagtgagaaaagaaaggctaaacactatgtaaatgtgaatggaaacttttgatatactcgtttttataaactacaaaaactttttgttgtttatcaggaaatccatatttattttgtaattaactgtcaagcctgtggatgatttttttgaacttggtagttcataaaggtttacagtgaataaaaggatatcatcttgagtatagcaatatcaaaaggaattcagtagttactgctgtttaggaatataaggttaagatatcatatgggtcaggtcannnnnnnnnnctgtgctggttgccacatcttaacaagcaccaaaaaactaaagcagtttttaaaccgatatttacgtaaagaaaatcataaaatccaatgcttctgcatactgtgttatgttacagtccagttttgtgtgctttactacacagtttggttacaggacttctgtgcattgtaaacataaacagcatggaaaaggttaaatacctgtgtt

SEQ ID NO: 194592 - DNA, 946 bp, Homo Sapiens
tacaaaaaagttggggagactccccctgaagctaccggccagggttttctttactctggggtcccggctgccctgtggcctcgctcctcggaggtttttcagttatgggacaaaaatattatatcaaaacactgaagctttgcaatctaaattcttttcacctcttcaaaaagcgatgctaccacctaatagttttcaaggaaaagtggcattcattactgggggaggtactggccttggtaaaggaatgacaactcttctgtccagcctaggtgctcagtgcgtgatagccagccggaagatggatgttttgaaagctaccgcagaacaaatttcttctcaaactggaaataaggttcatgcaattcagtgtgatgtgagggatcctgatatggttcaaaacactgtgtcagaactgatcaaagttgcaggacatcctaatattgtgataaacaatgcagcagggaattttatttctcctactgaaagactttctcctaatgcttggaaaaccataactgacatagttctaaatggcacagccttcgtgacactagaaattggaaaacaactaattaaagcacagaaaggagcagcatttctttctattactactatctatgctgagactggttcaggttttgtagtaccaagtgcttctgccaaagcaggtgtggaagccatgagcaagtctcttgcagctgaatggggtaaatatggaatgcgattcaatgtgattcaaccagggcctataaaaaccaaaggtgcctttagccgtctggacccaactggaacatttgagaaagaaatgattggcagaattccctgtggtcgcctggggactgtagaagaactcgcaaatcttgctgctttcctttgtagtgattatgcttcttggattaatggagcagtcattaaatttgacgtggagaggaagtacttattt

SEQ ID NO: 194593 - DNA, 1015 bp, Homo Sapiens; identical to SEQ ID NO: 188129

SEQ ID NO: 194594 - DNA, 1421 bp, Homo Sapiens; identical to SEQ ID NO: 181728
  misc_feature (92)..(109): n is a, c, g, or t
  misc_feature (1009)..(1029): n is a, c, g, or t

SEQ ID NO: 194595 - DNA, 941 bp, Homo Sapiens
actttgtacaaaaaagttggacacctcatactcaaataagaaactgacttaaatggtacttgtaattagcacttggtgaaagctggaaggaagataaataacactaaactatgctatttgatttttcttcttgaaagagtaaggtttacctgttacattttcaagttaattcatgtaaaaaatgatagtgattttgatgtaatttatctcttgtttgaatctgtcattcaaaggccaataatttaagttgctatcagctgatattagtagctttgcaaccctgatagagtaaataaattttatgggtgggtgccaaatactgctgtgaatctatttgtatagtatccatgaatgaatttatggaaatagatatttgtgcagctcaatttatgcagagattaaatgacatcataatactggatgaaaacttgcatagaattctgattaaatagtgggtctgtttcacatgtgcagtttgaagtatttaaataaccactcctttcacagtttattttcttctcaagcgttttcaagatctagcatgtggattttaaaagatttgccctcattaacaagaataacatttaaaggagattgtttcaaaatatttttgcaaattgagataaggacagaaagattgagaaacattgtatattttgcaaaaacaagatgtttgtagctgtttcagagagagtacggtatatttatggtaattttatccactagcaaatcttgatttagtttgatagtgtgtggaattttattttgaaggataagaccatgggaaaattgtggtaaagactgtttgtacccttcatgaaataattctgaagttgccatcagttttactaatcttctgtgaaatgcatagatatgcgcatgttcaactttttattgtgggtctataattaatgtaaaattgaaaaattcatttgctgttt

SEQ ID NO: 194596 - DNA, 1307 bp, Homo Sapiens
gggctggtctgacaatatttattggcacatgaacaagcctcagcatcacagtgacttgctgttcctggagaattgtgaagtacgctttgcttatcttcaaatacttccttctcactactcaaagtgtctgtgttctcactttccgagtcattttcagtatcttgagacccctccgacatttcctcttcagactggactccaagacatttaaatcgccacattggtaagtttttaatataatcagttggtatcagagggtgaagccaaaggtcagggaaagctaagcgctccaagaataagtcagggtcttcgtcccaatcagattctacaggaaagttctgaaaagaagcaatcgggtggaagaggtagctggtgtaccagtcccacagacttgataaccattctaagttattggcattgacttcatcattgttgttgttgcgccttctcttcttctcaaagtaatcaattagtaaaccatgaccaaggtatgtactgagaaacagggctgggtgtgaagagtaaaacatccagtctgcccttacccatgaagccagtgtggttgtattggaatatctcaacaattttaagctatattcataaaagctatctaagtaaggtagctgtaaaaagcccaacacaggtagccaggaaataattaatagagaattatatgtccctaaagtgcttatgagaaccacaaatcgctttatggtagctccttgtgtaataaataagtccatccaagccataagattaactagaaccaagctcaaaacaaacagatcatttacctcgggttgtaatgagcgcaaaaatgaatccatggcctgaagggatataaattcgcctgtgtggtttccatacctgtaaattccttcaggagttctaagtatgtatgatggcatattatatatgccaatatctgtcatataactcttgttgtcccaattttctacattaacaaaaataaactcaactcttccagtaaactttatacttagtgcagagaagaaagctgggggctggtcaaggtttgcaaataggtatatttttaaccaatactgatcacttttattccattcttctttcaagtgttcagcattataaatggttttgatccgagaagctgcatgagcagttatccatttaaaaatgtgctctacttcaatcttgcgtccactgtattctttaagcatgactttcccttttgaagtacttgtttgtggaacagacataatgagtgtggatcggacccagcctcttctcctgcaatatctgggatcactggaacagttaaatgccaa

SEQ ID NO: 194597 - DNA, 675 bp, Homo Sapiens; identical to SEQ ID NO: 188147

SEQ ID NO: 194598 - DNA, 1054 bp, Homo Sapiens
ttggcggtccacagctcatcatgatggacttggagctgccgccgccgggactcccgtcccagcaggacatggatttgattgacatactttggaggcaagatatagatcttggagtaagtcgagaagtatttgacttcagtcagcgacggaaagagtatgagctggaaaaacagaaaaaacttgaaaaggaaagacaagaacaactccaaaaggagcaagagaaagcctttttcgctcagttacaactagatgaagagacaggtgaatttctcccaattcagccagcccagcacatccagtcagaaaccagtggatctgccaactactcccaggttgcccacattcccaaatcagatgctttgtactttgatgactgcatgcagcttttggcgcagacattcccgtttgtagatgacaatgaggtttcttcggctacgtttcagtcacttgttcctgatattcccggtcacatcgagagcccagtcttcattgctactaatcaggctcagtcacctgaaacttctgttgctcaggtagcccctgttgatttagacggtatgcaacaggacattgagcaagtttgggaggagctattatccattcctgagttacagtgtcttaatattgaaaatgacaagctggttgagactaccatggttccaagtccagaagccaaactgacagaagttgacaattatcatttttactcatctataccctcaatggaaaaagaagtaggtaactgtagtccacattttcttaatgcttttgaggattccttcagcagcatcctctccacagaagaccccaaccagttgacagtgaactcattaaattcagatgccacagtcaacacagattttggtgatgaattttattctgctttcatagctgagcccagtatcagcaacagcatgccctcacctgctactttaagccattcactctctgaacttctaaatgggcccattgatgtttctgatctatcactttgcaaagctttcaaccaaaaccaccctgaaagcacagcagaattcaatgattctgactccgg

SEQ ID NO: 194599 - DNA, 1407 bp, Homo Sapiens; identical to SEQ ID NO: 188149
  misc_feature (1024)..(1074): n is a, c, g, or t

SEQ ID NO: 194600 - DNA, 972 bp, Homo Sapiens; identical to SEQ ID NO: 188155

SEQ ID NO: 194601 - DNA, 989 bp, Homo Sapiens
tttccaccattgtgaacaatttaggcaaggcatgagtgacagaggggcatcgttgataaatacagagcaatactggggcagtgaagaggaagctacagagacattcgtgtttcttcaaatatcagaagcttccacatcacagcaggagagctgacgacgagctccacctcctgaaggcttagtccaaaaacttcctgttggcatttgcaccaaacaaggctccccggacttctggcatcatctgctgggctatgagatccagccggctttccagggtgttggaaacctttattttacgatctccattatagatctcaactccaccagctatgtcttcaggcaggtaggactcctggtcaatttggacatcaacatcgtttttggtggcaattttgtacataggaattgccttctgcactgcagcctttaccagagggaaatcttgtttcctgcaacgaacaatcattcggggctccagcaactggtacaaaccctggagaaccagtccatccagcagcacttggtacctggttgtatcttttaccaccttgctgagtctctgttttgcttcatttagtaggtctgtgataaggtcatctcttgctctgaggactttgagtctcgcttgattcatcaaattggacatctgaattttcttctgctgctcaatctgtttctctttcttctcataatattccataatctttagtctttgggtttgcacaagccgacctttctctatgttgaactcttcttctgcctttgcatctatttcttctgctttctcattggcttcttgttcaatgaaagccatcatatgctttatctgcttttgcacgtcagcatcgctgagagccatggcgagagcaatgctaggccggtgaacagtaggctcgagtttaggtttgaaaggtgaggtgagagaaatcggcaaagggaacccctgcgcagatctcggccaacttttttgtacaaagttggtttttatg

SEQ ID NO: 194602 - DNA, 1514 bp, Homo Sapiens
ctttgtacaaaaaagttggggcgatgggactaatgtgcggacgccgggagcttctgcgcttgctacagtccgggcgtcgggtccacagcgtcgcagggccctcgcaatggcttgggaaaccgctgaccacacggctcctattcccagtagccccgtgctgctgtcgcccacactacctcttccttgcggcttccggcccccgcagcctcagtacctctgctatctcttttgcagaagtccaggttcaggcccctcctgttgttgctgcaactccctcacccacagcagtacctgaggtggcttctggagagactgcagatgtagtccaaactgctgcagagcagagcttcgctgaactggggctggggtcatacaccccagtgggactgatccagaatttactggaatttatgcatgttgatctgggcctaccttggtggggggccattgctgcatgtacagtctttgcccgctgcctgatttttcctctcatcgtgacgggccagcgagaggcagccaggatccacaatcacttgccagagatccagaagttttccagtcgaatcagagaggccaagttagcaggagaccatattgagtattacaaggcttcctcggagatggcactttaccagaaaaaacatggtattaaactctataaacctctcattctccctgtgactcaggccccaatcttcatctccttcttcattgctttgagagagatggccaaccttcctgtgcccagcctgcagacaggtggcctctggtggttccaggatctcacggtatccgatcccatctacatattaccactggcagtcactgctacaatgtgggctgttcttgagctaggtgctgagacaggtgtgcaaagttctgaccttcagtggatgagaaatgtcatcagaatgatgcccctgataaccttgcccataaccatgcatttccccacggcagtgtttatgtactggctctcctccaatttgttttccctggtccaagtatcctgtctccggattccagcagtacgcactgtacttaaaatcccccagcgtgttgtacatgacctggacaaattacctccacgggaaggcttcctagagagcttcaaaaaaggctggaaaaatgctgaaatgacgcgtcagctgcgagagcgtgaacaacgcatgcggaatcagttggagctagcagccaggggtcctttacgacagacctttacccacaaccctctcctacaacctggaaaggataaccctcccaatatccctagcagcagcagcaaaccaaagtcaaagtatccctggcacgacacacttggctgacttatgttctgtgcgcattctggcaggattctgtctcttcagagactcatcctcaaaacaagacttgacactgtgtccttgccccagtcctaggaactgtggcacacagagatgttcattttaaaaacggatttcatgaaacactcttgtacttatgtttatagagagcactgggtagcaagtgatctt

SEQ ID NO: 194603 - DNA, 1950 bp, Homo Sapiens; identical to SEQ ID NO: 181732
  misc_feature (142)..(150): n is a, c, g, or t

SEQ ID NO: 194604 - DNA, 1165 bp, Homo Sapiens; identical to SEQ ID NO: 181733

SEQ ID NO: 194605 - DNA, 1981 bp, Homo Sapiens; identical to SEQ ID NO: 188160

SEQ ID NO: 194606 - DNA, 1285 bp, Homo Sapiens
  misc_feature (441)..(492): n is a, c, g, or t
ttggcctctcgagcgagtcccgccccatctccggtctgtcctgaaggcagagggaagaccctcacccaacccctgcccgctctcttctaagagctgctagtccttctccaccccaggcgctccctctggctgcccctcccactcgctctgatctctctccgtccgctacttgcggtcgagccttcttgggggagccccgccactgaataccccctttgccatactcccacctctcttaccccaaccctggacttccagttggccctagctataagccccgcccctctccgagggacagcccccgctccagtctccgcggtcccacttaccctagcccctccctcgggcagcccctggactgtgacccagccagcaccgcctctcctagtggcaactggctgggaatggctgaggggctacctactgcttgcggcctgccannnnnnnnnnnnnnnnnnnnnnnnnnnnnnnnnnnnnnnnnnnnnnnnnnnncctggacctggggagtgaaagcgaaagcccgggcgactagccgggagaccagagatctagcgactgaagcagcatggccaagccgtgtggggtgcgcctgagcggggaagcccgcaaacaggtggaggtcttcagacagaatcttttccaggaggctgaggaattcctctacagattcttgccacagaaaatcatatacctgaatcagctcttgcaagaggactccctcaatgtggctgacttgacttccctccgggccccactggacatccccatcccagaccctccacccaaggatgatgagatggaaacagataagcaggagaagaaagaagtccctaagtgtggatttctccctgggaatgagaaagtcctgtccctgcttgccctggttaagccagaagtctggactctcaaagagaaatgcattctggtgattacatggatccaacacctgatccccaagattgaagatggaaatgattttggggtagcaatccaggagaaggtgctggagagggtgaatgccgtcaagaccaaagtggaagctttccagacaaccatttccaagtacttctcagaacgtggggatgctgtggccaaggcctccaaggagactcatgtaatggattaccgggccttggtgcatgagcgagatgatgcagcctatgggggagctcatggccatggtgctggacctgagggccttctatgctgagctttatcatatcatcagcagcaacctggagaaaattgtcaacccaaaaggtgaagaaaagccatctatgtactg

SEQ ID NO: 194607 - DNA, 744 bp, Homo Sapiens
tttgtacaaaaaagttggccgcaaacaggtggaggtcttcagacagaatcttttccaggaggctgaggaattcctctacagattcttgccacagaaaatcatatacctgaatcagctcttgcaagaggactccctcaatgtggctgacttgacttccctccgggccccactggacatccccatcccagaccctccacccaaggatgatgagatggaaacagataagcaggagaagaaagaagtccctaagtgtggatttctccctgggaatgagaaagtcctgtccctgcttgccctggttaagccagaagtctggactctcaaagagaaatgcattctggtgattacatggatccaacacctgatccccaagattgaagatggaaatgattttggggtagcaatccaggagaaggtgctggagagggtgaatgccgtcaagaccaaagtggaagctttccagacaaccatttccaagtacttctcagaacgtggggatgctgtggccaaggcctccaaggagactcatgtaatggattaccgggccttggtgcatgagcgagatgaggcagcctatggggagctcagggccatggtgctggacctgagggccttctatgctgagctttatcatatcatcagcagcaacctggagaaaattgtcaacccaaagggtgaagaaaagccatctatgtactgaacccgggactagaaaggaaaataaatgatctatatgttgtgtgg

SEQ ID NO: 194608 - DNA, 866 bp, Homo Sapiens
  misc_feature (446)..(506): n is a, c, g, or t
ttggcctctcgagcgagtcccgccccatctccggtctgtcctgaaggcagagggaagaccctcacccaacccctgcccgctctcttctaagagctgctagtccttctccaccccaggcgctccctctggctgcccctcccactcgctctgatctctctccgtccgctacttgcggtcgagccttcttgggggagccccgccactgaataccccctttgccatactcccacctctcttaccccaaccctggacttccagttggccctagctataagccccgcccctctccgagggacagcccccgctccagtctccgcggtcccacttaccctagcccctccctcgggcagcccctggactgtgacccagccagcaccgcctctcctagtggcaactggctgggaatggctgaggggctacctactgcttgcggcctgccagcgggnnnnnnnnnnnnnnnnnnnnnnnnnnnnnnnnnnnnnnnnnnnnnnnnnnnnnnnnnnnnngtgaaagcgaaagcccgggcgactagccgggagaccagagatctagcgactgaagcagcatggccaagccgtgtggggtgcgcctgagcggggaagcccgcaaacaggtggaggtcttcaggcagaatcttttccaggaggctgaggaattcctctacagattcttgccacagaaaatcatatacctgaatcagctcttgcaagaggactccctcaatgtggctgacttgacttccctccgggccccactggacatccccatcccagaccctccacccaaggatgatgagatggaaacagataagcaggagaagaaagaagtccctaagtgtggatttctcctggaatgagaaagtcctg

SEQ ID NO: 194609 - DNA, 728 bp, Homo Sapiens
  misc_feature (147)..(190): n is a, c, g, or t
aaaagattctgtctgaagacctccacctgtttgcgggcttccccgctcaggcgcaccccacacggcttggccatgctgcttcagtcgctagatctctggtctcccggctagtcgcccgggctttcgctttcactccccaggtccagnnnnnnnnnnnnnnnnnnnnnnnnnnnnnnnnnnnnnnnnnnnntcctcccgctggcaggccgcaagcagtaggtagcccctcagccattcccagccagttgccactaggagaggcggtgctggctgggtcacagtccaggggctgccagagggaggggctagggtaagtgggaccgcggagactggagcgggggctgtccctcggagaggggcggggcttatagctagggccaactggaagtccagggttggggtaagagaggtgggagtatggcaaagggggtattcagtggcggggctcccccaagaaggctcgaccgcaagtagcggacggagagagatcagagcgagtgggaggggcagccagagggagcgcctggggtggagaaggactagcagctcttagaagagagcgggcaggggttgggtgagggtcttccctctgccttcaggacagaccggagatggggcgggactcgctcgagaggggttagggccggccagagtcggttcccctgcagggtgggacttcctcggtgaggcccggagcgtaccggactgccaacttttttgtacaaagt

SEQ ID NO: 194610 - DNA, 1465 bp, Homo Sapiens; identical to SEQ ID NO: 188166
  misc_feature (433)..(442): n is a, c, g, or t

SEQ ID NO: 194611 - DNA, 1043 bp, Homo Sapiens; identical to SEQ ID NO: 188168
  misc_feature (249)..(545): n is a, c, g, or t
  misc_feature (715)..(735): n is a, c, g, or t

SEQ ID NO: 194612 - DNA, 556 bp, Homo Sapiens
ttggggcttctcggagcggcgctgggcgaccagagcagggtcgagatgtcctacatcccgggccagccggtcaccgccgtggtgcaaagagttgaaattcacaagctgcgtcaaggtgagaacttaatcctgggtttcagcattggaggtggaatcgaccaggacccttcccagaatcccttctctgaagacaagacggacaagggtatttatgtcacacgggtgtctgaaggaggccctgctgaaatcgctgggctgcagattggagacaagatcatgcaggtgaacggctgggacatgaccatggtcacacacgaccaggcccgcaagcggctcaccaagcgctcggaggaggtggtgcgtctgctggtgacgcggcagtcgctgcagaaggccgtgcagcagtccatgctgtcctagcagccaccaccatctgcgactcctgcctgccgcctctctgtacagtaacgccacttccacactctgtccccatctggcttctgctgaccgctgggccccagctcagaagggctatagctggtcccaagaggcctgg

SEQ ID NO: 194613 - DNA, 1359 bp, Homo Sapiens; identical to SEQ ID NO: 188178

SEQ ID NO: 194614 - DNA, 2749 bp, Homo Sapiens; identical to SEQ ID NO: 188182

SEQ ID NO: 194615 - DNA, 702 bp, Homo Sapiens
ctttgtacaaaaaagttggattggaatctgtatcagaaagattctagctattattttctttaaagaatgctgggtgttgcatttctggaccctccacttcaatctgagaagacaatatgtttctaaaaattggtacttgtttcaccatacttcattcagaccagtgaaagagtagtgcatttaattggagtatctaaagccagtggcagtgtatgctcatacttggacagttagggaagggtttgccaagttttaagagaagatgtgatttattttgaaatttgtttctgttttgtttttaaatcaaactgtaaaacttaaaactgaaaaattttattggtaggatttatatctaagtttggttagccttagtttctcagacttgttgtctattatctgtaggtggaagaaatttaggaagcgaaatattacagtagtgcattggtgggtctcaatccttaacatatttgcacaattttatagcacaaactttaaattcaagctgctttggacaactgacaatatgattttaaatttgaagatgggatgtgtacatgttgggtatcctactactttgtgttttcatctcctaaaagtggtttttatttccttgtatctgtagtcttttattttttaaatgactgctgaatgacacattttatcttgttctttaaaatcacaacacagagctgctattaaatt

SEQ ID NO: 194616 - DNA, 1146 bp, Homo Sapiens; identical to SEQ ID NO: 181751
  misc_feature (60)..(68): n is a, c, g, or t

SEQ ID NO: 194617 - DNA, 922 bp, Homo Sapiens
ttgggaaagtgttctctagtttgttggattttgaatgatggactatttcagtgaagtgcctgactcccagagatcccaaacactgcatgttctcagagaggaaattagatcctccatctttgagaatatgtgtatccatccttgccctctttaatatatttttagcagtacatcccggggatatatttaaaatataaagttatccatgttacttccgtgtctaaaagcctccactggaatttctaatttgagataatggagtaaacataagtttaccttccctccctccccaggccccactgaaattgaagtcaagaaatgcaaaaaggaactgacacatctcagcaaagaaaactgaagggatttggttataagtggagaggatctcagcatatttctggaagatagaaagtggatgaagcatgataatgaaagagtgaagaacctttcagataaaatgtaagctgatctgaacaacataaccccaaagagacttgcgcacctgaaaagcttgtctactgaagaattactccagttgtaagattgagccctctcctactctcccccaactcttatgcacagaacacaggcagtctccactattgataccagttaaaaatttcttgttattgttgctgttgttgtttgtataaaggaattgaacaggctgcttgcagagagataagagttggtgctctagaaaaaaatttctcttctagtggaaataagtgcccctacccccagccggtcagctaattctctactgacagctgagacctcctactcaagtgcctgttgccttcaggtatagaagaggtttcctgaagaaacagacctaactgtacaacagcagaggaaacccatgccaactgttatacaagttaacagttatgttgattcttaaatggggaatggtgagtta

SEQ ID NO: 194618 - DNA, 1097 bp, Homo Sapiens; identical to SEQ ID NO: 181753
  misc_feature (457)..(491): n is a, c, g, or t
  misc_feature (791)..(885): n is a, c, g, or t

SEQ ID NO: 194619 - DNA, 1795 bp, Homo Sapiens; identical to SEQ ID NO: 188207
  misc_feature (96)..(121): n is a, c, g, or t

SEQ ID NO: 194620 - DNA, 779 bp, Homo Sapiens
ttggctgaagccggcgctgctctgtggggctctggccgcgcctggcctggccgggaccatgtgcgcgtcccgggacgactggcgctgtgcgcgctccatgcacgagttttccgccaaggacatcgacgggcacatggttaacctggacaagtaccggggcttcgtgtgcatcgtcaccaacgtggcctcccagtgaggcaagaccgaagtaaactacactcagctcgtcgacctgcacgcccgatacgctgagtgtggtttgcggatcctggccttcccgtgtaaccagttcgggaagcaggagccagggagtaacgaagagatcaaagagttcgccgcgggctacaacgtcaaattcgatatgttcagcaagatctgcgtgaacggggacgacgcccacccgctgtggaagtggatgaagatccaacccaagggcaagggcatcctgggaaatgccatcaagtggaacttcaccaagttcctcatcgacaagaacggctgcgtggtgaagcgctacggacccatggaggagcccctggtgatagagaaggacctgccccactatttctagctccacaagtgtgtggccccgcccgagcccctgcccacgccctcggagccttccaccggcactcatgacggcctgcctgcaaacctgctggtggggcagacccgaaaatccagcgtgcaccccgccggaggaaggtcccatggcctgctgggcttggctcggcgcccccacccctggctaccttgtgggaataaacagacaaattagc

SEQ ID NO: 194621 - DNA, 611 bp, Homo Sapiens
tttgtacaaaaaagttggggccgcgcctggcctgaaccgggaccatgtgcgcgtcccgggacgactggcgctgtgcgcgctccatgcacgagttttccgccaaggacatcgacgggcacatggttaacctggacaagtaccggggcttcgtgtgcatcgtcaccaacgtggcctcccagtgaggcaagaccgaagtaaactacactcagctcgtcgacctgcacgcccgatacgctgagtgtggtttgcggatcctggccttcccgtgtaaccagttcgggaagcaggagccagggagtaacgaagagatcaaagagttcgccgcgggctatatcttcaaattcgatatgttcagcaagatctgcgtgaacggggacgacgcccacccgctgtggaagtggatgaagatccaacccaagggcaagggcatcctgggaaatgccatcaagtggaacttcaccaagttcctcatcgacaagaacggctgcgtggtgaagcgctacggacccatggaggagcccctggtgatagagaaggacctgccccactatttctagctccacaagtgtgtggccccggcccgagcccctgcacacgccctcggagccttc

SEQ ID NO: 194622 - DNA, 972 bp, Homo Sapiens; identical to SEQ ID NO: 188219
  misc_feature (78)..(96): n is a, c, g, or t
  misc_feature (538)..(589): n is a, c, g, or t

SEQ ID NO: 194623 - DNA, 1033 bp, Homo Sapiens
ctttgtacaaaaaagttggagaaactcggcccatgttaaatctcagggaggatatctaaatggctcgcccctcatgccccatccttgccttcacgcttcctcttccagctggcagcgatcgacccttcacccttgacgatttacagtacatgatctttcatacacccttttgcaagatggtccagaagtctctggctcgcctgatgttcaatgacttcctgtcagccagcagtgacacacaaaccagcttatataaggggctggaggctttcggggggctaaagctggaagacacctacaccaacaaggacctggataaagcacttctaaaggcctctcaggacatgttcgacaagaaaaccaaggcttccctttacctctccactcacaatgggaacatgtacacctcatccctgtacgggtgcctggcctcgcttctgtcccaccactctgcccaagaactggctggctccaggattggtgccttctcttatggctctggtttagcagcaagtttcttttcatttcgagtatcccaggatgctgctccaggctctcccctggacaagttggtgtccagcacatcagacctgccaaaacgcctagcctcccgaaagtgtgtgtctcctgaggagttcacagaaataatgaaccaaagagagcaattctaccataaggtgaatttctccccacctggtgacacaaacagccttttcccaggtacttggtacctggagcgagtggacgagcagcatcgccgaaagtatgcccggcgtcccgtctaaaggtgttctgcagatccatggaaagcttcctgggaaacgtatgctagcagagcttctccccgtgaatcatatttttaagatcccactcttagctggtaaatgaatttgaatcgacatagtagccccataagcatcagccctgtagagtgaggagccatctctagcgggcccttcattcctctccatgctgcaatcactgtcctgggcttatggtgctatggactaggggtcctttgtgaaaagaacaa

SEQ ID NO: 194624 - DNA, 1413 bp, Homo Sapiens; identical to SEQ ID NO: 188226

SEQ ID NO: 194625 - DNA, 798 bp, Homo Sapiens
ctttgtacaaaaaagttggggcctgtagctcttgaaaagaatacttttgcttttcaaattatagtttatcttctgtataactgatttataaaggtttttgtacatttcctaaaactcattgtcaatttgagaaaaaggacatatgagtttttgcatttattaatgaaacttcctttgaaaaactgctttgaattatgatctctgattcattgtccattttactaccaaatattaactaaggccttattaatttttatataaattatatcttgtcctattaaatctagttacaatttatttcatgcataagagctaatgttattttgcaaatgccatatattcaaaaaagctcaaagataattttctttactattatgttcaaataatattcaatatgcatattatctttaaaaagttaaatgtttttttaatcttcaagaaatcatgctacacttaacttctcctagaagctaatctataccataatattttcatattcacaagatattaaattaccaattttcaaattattgttagtaaagaacaaaatgattctctcccaaagaaagacacattttaaatactccttcactctaaaactctggtattataacttttgaaagttaatatttctacatgaaatgtttagctcttacactctatccttcctagaaaatggtaattgagattactcagatattaattaaatacaatatcatatatatattcacagagtataaacctaaataatgatctattagattcaaatatttgaaataaaaacttgatttttttgta

SEQ ID NO: 194626 - DNA, 2117 bp, Homo Sapiens; identical to SEQ ID NO: 181763
  misc_feature (1646)..(1660): n is a, c, g, or t

SEQ ID NO: 194627 - DNA, 2100 bp, Homo Sapiens; identical to SEQ ID NO: 188232
  misc_feature (1123)..(1184): n is a, c, g, or t
  misc_feature (1831)..(1845): n is a, c, g, or t

SEQ ID NO: 194628 - DNA, 231 bp, Homo Sapiens
cctttaatagcccactttgtacaaaaaagttggctatttttaattccaaggtgttgtttgcttttttcttttaaatattttcttaatattttgtcagattaactagatgaataaataaatctagtattaaccgcattatgaattaaataattttgatttaatgaaagggataatatgatttccagtgtttactgtagtgtatcttgtacagataacatgtatttttaaagg

SEQ ID NO: 194629 - DNA, 1370 bp, Homo Sapiens; identical to SEQ ID NO: 188234

SEQ ID NO: 194630 - DNA, 671 bp, Homo Sapiens
gccaactttgtacaaaaaagttggcaccttcaggattgagacccggaaggcttcaaaggctgtcgcaaggaggaagaactggaagaagttcgggaactcagagtttgacccccccggacccaatgtggccaccaccactgtcagtgacgatgtctctatgacgttcatcaccagcaaagaggacctgaactgccaggaggaggaggaccctatgaacaaactcaagggccagaagatcgtgtcctgccgcatctgcaagggcgaccactggaccacccgctgcccctacaaggatacgctggggcccatgcagaaggagctggccgagcagctgggcctgtctactggcgagaaggagaagctgccgggagagctagagccggtgcaggccacgcagaacaagacagggaagtatgtgccgccgagcctgcgcgacggggccagccgccgcggggagtccatgcagcccaaccgcagagccgacgacaacgccaccatccgtgtcaccaacttgtcagaggacacgcgtgagaccgacctgcaggagctcttccggcctttcggctccatctcccgcatctacctggctaaggacaagaccactggccaatccaagggcttcgccttcatcagcttccaccgccgcgaggatgctgcgcgtgccattgccg

SEQ ID NO: 194631 - DNA, 1109 bp, Homo Sapiens; identical to SEQ ID NO: 181767

SEQ ID NO: 194632 - DNA, 939 bp, Homo Sapiens
ttggctgattctctgaagagtaactttgccctcctcctaaagctttcagaagaattattagataaatggctctcctacccagagacccagcacgtgcccctcagccagcatatgcttggttttgctatgaagtctgttacacagatggtaatgggtagtacatttgaagatgatcaggaagtcattcgcttccagaagaatcatggcacagtttggtctgagattggaaaaggctttctagatgggtcacttgataaaaacatgactcggaaaaaacaatatgaagatgccctcatgcaactggagtctgttttaaggaacatcataaaagaacgaaaaggaaggaacttcagtcaacatattttcattgactccttagtacaagggaaccttaatgaccaacagatcctagaagacagtatgatattttctctggccagttgcataataactgcaaaattgtgtacctgggcaatctgttttttaaccacctctgaagaagttcaaaaaaaattatatgaagagataaaccaagtttttggaaatggtcctgttactccagagaaaattgagcagctcagatattgtcagcatgtgctttgtgaaactgttcgaactgccaaactgactccagtttctgcccagtttcaagatattgaaggaaaaattgaccgatttattattcctagagagaccctcgtcctttatgcccttggtgtggtacttcaggatcctaatacttggccatctccacacaagtttgatccagatcggtttgatgatgaattagtaatgaaaactttttcctcacttggattctcagcacacaggagtgtccagagttgaggtttgcatatatggtgaccacagtacttcttattgtattggtgagagactgcacctactttctgtggagggacaggttattgaaacaaagta

SEQ ID NO: 194633 - DNA, 683 bp, Homo Sapiens; identical to SEQ ID NO: 181769

SEQ ID NO: 194634 - DNA, 1145 bp, Homo Sapiens; identical to SEQ ID NO: 188251
  misc_feature (320)..(328): n is a, c, g, or t
  misc_feature (350)..(365): n is a, c, g, or t
  misc_feature (961)..(975): n is a, c, g, or t

SEQ ID NO: 194635 - DNA, 548 bp, Homo Sapiens
aaaaagttggaaactgacaggtgaccgatgtacaggactttcctctaaaatgcaagatacaatggaggagaacagtgagagtgctctacggaaacgtattcgagaggacagaaaggccaccacagctcagaaggtgcagcagatgaaacagaggctaaatgagaatgaacgaaaaagaaaaaggccaagattgacagacacctaatattcatgacttgagaatattctgcagctataaattttgaaccattgatgtgcaaagcaagacctgaagcccactccggaaactaaagtgaggctcgctaaccctctagattgcctcacagttgtttgtttacaaagtaaactttacatccaggggatgaagagcacccaccagcagaagactttgcagaacctttaattggatgtgttaagtgtttttaatgagtgtatgaaatgtagaaagatgtacaagaaataaattaggagagattactttgtattgtactgccattcctactgtatttttatactttttggcagcattaaatatttttgttaaataa

SEQ ID NO: 194636 - DNA, 1242 bp, Homo Sapiens; identical to SEQ ID NO: 181777

SEQ ID NO: 194637 - DNA, 774 bp, Homo Sapiens; identical to SEQ ID NO: 181778

SEQ ID NO: 194638 - DNA, 589 bp, Homo Sapiens
ctttgtacaaaaaagttggccagacgcaagatggctgtcctctctaaggaatatggttttgtgcttctaactggtgctgccagctttataatggtggcccacctagccatcaatgtttccaaggcccgcaagaagtacaaagtggagtatcctatcatgtacagcacggaccctgaaaatgggcacatcttcaactgcattcagcgagcccaccagaacacgttggaagtgtatcctcccttcttattttttctagctgttggaggtgtttaccacccgcgtatagcttctggcctgggcttggcctggattgttggacgagttctttatgcttatggctattacacgggagaacccagcaagcgtagtcgaggagccctggggtccatcgccctcctgggcttggtgggcacaactgtgtgctctgctttccagcatcttggttgggttaaaagtggcttgggcaatggacccaaatgctgcctttaaagaattataggggtttaaaaactctcattcattttaaatgacttacctttatttccatttacattttatttctaaatataataaaaacttacctggcatc

SEQ ID NO: 194639 - DNA, 956 bp, Homo Sapiens
actttgtacaaaaaagttggcgcgagtgctcctgaaacgtcagctgcgctcccctaggagtgctgagcccgcggaaccgcagccatgactgaggctgatgtgaatccaaaggcctatccccttgccgatgcccacctcaccaagaagctactggacctcgttcagcagtcatgtaactataagcagcttcggaaaggagccaatgaggccaccaaaaccctcaacaggggcatctctgagttcatcgtgatggctgcagacgccgagccactggagatcattctgcacctgccgctgctgtgtgaagacaagaatgtgccctacgtgtttgtgcgctccaagcaggccctggggagagcctgtggggtctccaggcctgtcatcgcctgttctgtcaccatcaaagaaggctcgcagctgaaacagcagatccaatccattcagcagtccattgaaaggctcttagtctaaacctgtggcctctgccacgtgctccctgccagcttcccccctgaggttgtgtatcatattatctgtgttagcatgtagtattttcagctactctctattgttataaaatgtagtactaaatctggtttctggatttttgtgttgtttttgttctgttttacagggttgctatcccccttcctttcctccctccctctgccatccttcatccttttatcctccctttttggaacaagtgttcagagcagacagaagcatggtggtggcaccgttgaaaggcagaaagagccaggagaaagctgatggagccaggacagagatctggttccagctttcagccactagcttcctgttgtgtgcggggtgtggtggaattaaacagcattcattgtgtgtccctgtgcctggcacacagaatcattcatacgtgttcaagtgatcaaggggtttcatttgctcttgggggattaaggtatcatttgggg

SEQ ID NO: 194640 - DNA, 910 bp, Homo Sapiens; identical to SEQ ID NO: 181779
  misc_feature (57)..(98): n is a, c, g, or t

SEQ ID NO: 194641 - DNA, 1229 bp, Homo Sapiens; identical to SEQ ID NO: 188259
  misc_feature (88)..(102): n is a, c, g, or t
  misc_feature (884)..(960): n is a, c, g, or t

SEQ ID NO: 194642 - DNA, 1171 bp, Homo Sapiens; identical to SEQ ID NO: 188263
  misc_feature (1001)..(1047): n is a, c, g, or t

SEQ ID NO: 194643 - DNA, 1366 bp, Homo Sapiens; identical to SEQ ID NO: 188266

SEQ ID NO: 194644 - DNA, 1895 bp, Homo Sapiens; identical to SEQ ID NO: 188267

SEQ ID NO: 194645 - DNA, 954 bp, Homo Sapiens
ctttgtacaaaaaagttggcttgaatattatttcacattcctttttcttttttaaataaacaggtttgctttggaaaggcttaatgatggaatgttagcatcttcactagggtaaagaagaacaaaaagaatgttgctggaacgtaaaatagtatttaaaagttaatgaacacttctctagttttcttagttatggccttaataattagtctcttggcttaaatgtccactggttttactttgacacagttgaacaacactggggttaagtctctggtatttaggctggcaatatatatattaaccatattttaaaagtaccaattttgtttttacagaaaagataaaactcaaaagagaacagtgtattccttctgaggggcttttataaattattaactataatatatgatggattttttcctaattttttatatttccttacaattttggtggccattaatttaactttaggcttttgggcatatgctagtctgagcttccgaaaagatacatatatgtttcccttttcattagctgaatgaggatattttaagaagttgaaagagaatttattttcaagttgtgagtaaatcctcctttgaaattcacctgattattagataacttaaagtttatttttaaaagctgacaactttttatgaatcttcgagttgacagttcctaaaagcgtaactcagatattaatgggctgtgtattaaatggttttattttcagttttgcagcacagaacactgttgaaatatccatatcaacttgatttttttaacctaattcaggtgtcctttgcatctcttaaatgttgggggtggggggtcagagccagttatccggcttctgttttgtcgattgcttagatttgttcctgttgtcaaaactgttacccccaaaattggtgtgacacatgctcatgcataaaatgttaaaatgag

SEQ ID NO: 194646 - DNA, 1035 bp, Homo Sapiens; identical to SEQ ID NO: 181786
  misc_feature (819)..(885): n is a, c, g, or t

SEQ ID NO: 194647 - DNA, 955 bp, Homo Sapiens
  misc_feature (594)..(605): n is a, c, g, or t
ctttgtacaaaaaagttgggtttattgccctattaaaataagagagtccccaaaatgggtaacctagacttcagagagaatgagcagagagcaaaggagaaatctggctgtccttccattttcattctgttatctcaggtgagctggtagaggggagacattagaaaaaaatgaaacaacaaaacaattactaatgaggtacgctgaggcctgggagtctcttgactccactacttaattccgtttagtgagaaacctttcaattttcttttattagaagggccagcttactgttggtggcaaaattgccaacataagttaatagaaagttggccaatttcaccccattttctgtggtttgggctccacattgcaatgttcaatgccacgtgctgctgacaccgaccggagtactagccagcacaaaaggcagggtagcctgaattgctttctgctctttacatttcttttaaaataagcatttagtgctcagtccctactgagtactctttctctcccctcctctgaatttaattctttcaacttgcaatttgcaaggattacacatttcactgtgatgtatattgtgttgcnnnnnnnnnnnngtgtctttgtttaaaattacttggtttgtgaatccatcttgctttttccccattggaactagtcattaacccatctctgaactggtagaaaaacatctgaagagctagtctatcagcatctgacaggtgaattggatggttctcagaaccatttcacccagacagcctgtttctatcctgtttaataaattagtttgggttctctacatgcataacaaaccctgctccaatctgtcacataaaagtctgtgacttgaagtttaggtcagcacccccaccaaactttatttttctatgtgtttttgcaacatatggagtgttttgaaaataaagtacccatgtcctttatt

SEQ ID NO: 194648 - DNA, 1579 bp, Homo Sapiens; identical to SEQ ID NO: 188285

SEQ ID NO: 194649 - DNA, 1698 bp, Homo Sapiens; identical to SEQ ID NO: 188286

SEQ ID NO: 194650 - DNA, 859 bp, Homo Sapiens
ttgggtgttaaagtacacctgaagactgttagctatttattctctgataaaggtggacactggttaggggtgaaactcatgaaaaatggcatcatatttgtgtttgtggatgtgtgtgtgtcaactttttttcttttatctaggattagtccaaagagtgatattactgacactggcctggcacagagcaacaatttgcaggtccccagttcttcagaaccaagcagcctcaaaggttccacatctctgcttgttcacccggtttcaggagtgagaaaagagcagggaggtggttgtcattcagatacttgaagaacattttctctcgttactcagaagcaaatttgtgttacactggaagtgacctatgcactgttttgtaagaatcactgttacgttcttcttttgcacttaaagttgcattgcctactgttatactggaaaaaatagagttcaagaataatatgactcatttcacacaaaggttaatgacaacaatatacctgaaaacagaaatgtgcaggttaataatatttttttaatagtgtgggaggacagagttagaggaatcttccttttctatttatgaagattctactcttggtaagagtattttaagatgtactatgctattttacttttttgatataaaatcaagatatttctttgctgaagtatttaaatcttatccttgtatctttttatacatatttgaaaataagcttatatgtatttgaacttttttgaaatcctattcaagtatttttatcatgctattgtgatattttagcactttggtagcttttacactgaatttctaagaaaattgtaaaatagtcttcttttatactgtaaaaaa

SEQ ID NO: 194651 - DNA, 1286 bp, Homo Sapiens; identical to SEQ ID NO: 188292
  misc_feature (1052)..(1062): n is a, c, g, or t

SEQ ID NO: 194652 - DNA, 1123 bp, Homo Sapiens; identical to SEQ ID NO: 188296
  misc_feature (834)..(844): n is a, c, g, or t
  misc_feature (950)..(960): n is a, c, g, or t

SEQ ID NO: 194653 - DNA, 1367 bp, Homo Sapiens; identical to SEQ ID NO: 181790
  misc_feature (1155)..(1179): n is a, c, g, or t

SEQ ID NO: 194654 - DNA, 1357 bp, Homo Sapiens; identical to SEQ ID NO: 188302
  misc_feature (203)..(500): n is a, c, g, or t
  misc_feature (872)..(949): n is a, c, g, or t

SEQ ID NO: 194655 - DNA, 1186 bp, Homo Sapiens; identical to SEQ ID NO: 181794

SEQ ID NO: 194656 - DNA, 614 bp, Homo Sapiens
ttgtacaaaaaagttggagccaggcggccgaccagagcaccaatcagagcgcgcctgcgctctatatatacagcggccctgcccaggcgctgcttcatcggcgctttgccacttgtacccgagtttttgattctcaacatgtccgagactgctcctgccgctcccgctgccgcgcctcctgcggagaaggcccctgtaaagaagaaggcggccaaaaaggctgggggtacgcctcgtaaggcgtctggtcccccggtgtcagagctcatcaccaaggctgtggccgcctctaaagagcgtagcggagtttctctggctgctctgaaaaaagcgttggctgccgccggctatgatgtggagaaaaacaacagccgtatcaaacttggtctcaagagcctggtgagcaagggcactctggtgcaaacgaaaggcaccggtgcttctggctcctttaaactcaacaagaaggcaccctccggggaagccaagcccaaggttaaaaaggcgggcggaaccaaacctaagaagccagttggggcagccaagaagcccaagaaggcggctggcggcgcaactccgaagaagagcgctaagaatacaccgaataaagcgaa

SEQ ID NO: 194657 - DNA, 1222 bp, Homo Sapiens; identical to SEQ ID NO: 181795
  misc_feature (660)..(945): n is a, c, g, or t

SEQ ID NO: 194658 - DNA, 1388 bp, Homo Sapiens; identical to SEQ ID NO: 181796

SEQ ID NO: 194659 - DNA, 2371 bp, Homo Sapiens; identical to SEQ ID NO: 188309
  misc_feature (1725)..(1742): n is a, c, g, or t

SEQ ID NO: 194660 - DNA, 984 bp, Homo Sapiens; identical to SEQ ID NO: 188318

SEQ ID NO: 194661 - DNA, 766 bp, Homo Sapiens; identical to SEQ ID NO: 188320

SEQ ID NO: 194662 - DNA, 1352 bp, Homo Sapiens; identical to SEQ ID NO: 188324

SEQ ID NO: 194663 - DNA, 899 bp, Homo Sapiens
tttgacataaagcaccacttccttgatcgggcattcttgagaaagacgctcctggagctcctttttcagttctttcctggtgcccagggactgctggactcggaggaagtcggaaagctccttaagacctgcgtcagtgaagtatttagcaaaatgatccacactctgtctgttaactggaaagagttcaagcagcctcttgtctaagttggcttttctcaaagacgaggtaacagagttggcatctttttctgccatccatgctttgaaaagcttgacagcaaatgaggccgcaatgccttctttgactaagctgtcggtgaagagactggtgaggatggtggcgggcagggtgccattgcccagcagaatccccgacagcatcgccaactttgtctgctctgtttcggaaaaggctttaaggaagaggagaagctttttcatttcatcttcaaatgccttctccaaatacttatatctcctgatgagtttattgaagacctgagcatagtttcggatggtttcatgatcttcatttgctgaaaacacacagtggttggtcatcttggtcttgtcaccatcatctatgcgcgttcctccaggggcaagcatactgccagccaccaggatatcgaagagtgtgtctgcatagcgacgataatctaatcttgagcctgtagagtccagaaatttggctacagcttcaaggtcatcaccagcctcattaagcccctggacaagtgtatccctgaagactgtgggttcgaatttctctttttcatcccttttccgagttttgaaccgctggcctgttagcactggcttctgatgcttattcataaaatttctgtccgaggaggtagcgacgacgcgcaaggctgggggctgcgacgattcgt

SEQ ID NO: 194664 - DNA, 1147 bp, Homo Sapiens; identical to SEQ ID NO: 188326
  misc_feature (84)..(99): n is a, c, g, or t
  misc_feature (843)..(900): n is a, c, g, or t

SEQ ID NO: 194665 - DNA, 2277 bp, Homo Sapiens; identical to SEQ ID NO: 188330
  misc_feature (1346)..(1410): n is a, c, g, or t

SEQ ID NO: 194666 - DNA, 1503 bp, Homo Sapiens; identical to SEQ ID NO: 188332

SEQ ID NO: 194667 - DNA, 903 bp, Homo Sapiens
gttgtcctggatgtcagtgccaatttgccggtcacactggggtccccaaagaggtcaaggtaatcatcctgaatctgaaagaactcccccatctccagcaggatcttcttggcattggcgtgctccttctcgccatcaatcctgccatgtacatggctgcagctataggaaggtagaaggagtagaaagctgtcttgtacttgacaatagatttgtacctcttttcagtgaatctgacaagatccacattgccctggggggctgtgaggaggtccagggtctgcccaatctcagtctgataggaactctgcaggaagagctcgatcaggttcaggtaatagggctgctcccggcaatagagcttcagcaggcggtagatacatgcttccaggaggttagcatcattgatggcatccaaacccacgcccggcttctgataccagcagatctgtccccggcgggtaagggatgaatccatgatgtcatctgccaccaggaagaaagcttgcagcagttccacacaccagcccacagtccaggcccgctggagactatcagcatcctgtttccttggctccaccagctcccggaatgctactaccaccgtcaaaccccggttatacttgcctccaatggcattgtactccaggacctccttgagccgggcaatagcatctcctatctctgggtgccccatctcatcctcagtcagcaccctaacgatctgggagaagtgctgaacgaaatcctgcttttcttgggcataaacatctgaattctggtctccgttcattctgttcccagatacggattcctgctcggtcccgcttgttggcgggtactcctaaaagcagaatccgctccgcgatcggctctgtgggtcgagtagttcccgctctccaa

SEQ ID NO: 194668 - DNA, 1675 bp, Homo Sapiens; identical to SEQ ID NO: 188340
  misc_feature (416)..(432): n is a, c, g, or t
  misc_feature (1438)..(1467): n is a, c, g, or t

SEQ ID NO: 194669 - DNA, 1773 bp, Homo Sapiens; identical to SEQ ID NO: 188342
  misc_feature (489)..(511): n is a, c, g, or t

SEQ ID NO: 194670 - DNA, 1304 bp, Homo Sapiens; identical to SEQ ID NO: 188363
  misc_feature (75)..(94): n is a, c, g, or t
  misc_feature (674)..(703): n is a, c, g, or t

SEQ ID NO: 194671 - DNA, 348 bp, Homo Sapiens; identical to SEQ ID NO: 188370

SEQ ID NO: 194672 - DNA, 770 bp, Homo Sapiens; identical to SEQ ID NO: 181814

SEQ ID NO: 194673 - DNA, 1100 bp, Homo Sapiens; identical to SEQ ID NO: 181815
  misc_feature (1019)..(1031): n is a, c, g, or t

SEQ ID NO: 194674 - DNA, 878 bp, Homo Sapiens; identical to SEQ ID NO: 181816
  misc_feature (53)..(67): n is a, c, g, or t

SEQ ID NO: 194675 - DNA, 908 bp, Homo Sapiens
ttggcgcggagtgacatcgccggtgtttgcgggtggttgttgctctcggggccgtgtggagtaggtctggacctggactcacggctgcttggagcgtccgccatgaggagaagtgaggtgctggcggaggagtccatagtatgtctgcagaaagccctaaatcaccttcgggaaatatgggagctaattgggattccagaggaccagcggttacaaagaactgaggtggtaaagaagcatatcaaggaactcctggatatgatgattgctgaagaggaaagcctgaaggaaagactcatcaaaagcatatccgtctgtcagaaagagctgaacactctgtgcagcgagttacatgttgagccatttcaggaagaaggagagacgaccatcttgcaactagaaaaagatttgcgcacccaagtggaattgatgcgaaaacagaaaaaggagagaaaacaggaactgaagctacttcaagagcaagatcaagaactgtgcgaaattctttgtatgccccactatgatattgacagtgcctcagtgcccagcttagaagagctgaaccagttcaggcaacatgtgacaactttgagggaaacaaaggcttctaggcgtgaggagtttgtcagtataaagagacagatcatactgtgtatggaagaattagaccacaccccagacacaagctttgaaagagatgtggtgtgtgaagacgaagatgccttttgtttgtctttggagaatattgcaacactacaaagttgctacggcagctggaaatgcagaaatcacaaaatgaagcagtgtgtgaggggctgcgtactcaaatccgagagctctgggacaggttgcaaatacctgaagaaaaagagaagctgtggccaccattatgtctgggtcaaagccca

SEQ ID NO: 194676 - DNA, 911 bp, Homo Sapiens
ttggcagagctatggcgggtttgactgtgagagacccagcggtggatcgttctctacgttctgtgttcgtggggaacattccttatgaagctactgaagagcagttgaaggacatcttttctgaggttggacctgttgttagtttcagattggtatacgatagagagacaggaaagccaaagggttatggcttctgtgaataccaagaccaagagacagcacttagtgccatgcggaacctgaatgggcgcgaattcagtgggagagcacttcgagtggacaatgctgccagtgaaaagaacaaagaagagctgaagagccttggcactggtgcccctgtcattgagtcaccttatggagagaccatcagtcctgaggatgcccctgagtccattagcaaagcagttgccagccttccaccagagcagatgtttgagctgatgaaacaaatgaagctctgtgtccagaatagtccccaggaggcacggaacatgttacttcagaaccctcaactggcttatgctttgctgcaagcacaggtagtgatgagaattgtggatccggaaattgccctgaaaattctgcatcgccagacaaatatcccaacgctgattgcaggcaaccctcagccagtccatggtgctgggcctggctcaggatccaatgtgtcaatgaaccagcagaatcctcaggcccctcaggcccagtctttgggtggaatgcatgtcaatggcgcacctcctctgatgcaagcttctatgcagggtggagttccagcaccagggcaaatgccagctgctgtcacaggacctggccctggttccttagctcctggaggaggaatgcagctcagttggaatgccaggaagtggaccagtgtccatggaacgggggcaagtgccgatgcaaga

SEQ ID NO: 194677 - DNA, 1068 bp, Homo Sapiens
tgtacaaattactgggcaaagggcattcagatttgggagaagtagccccagaaataaaagcatcagagagacgaacagctgtggccattgcagatttggaatggagagaaatggaaggagatgattgcgagttccgttatggagatggtacaaatgaggctcaggacaatgattttccaacagtggagagaagcaggcttcaagaaatgctgtcacttttgggcctagagacgtaccaggtccagaaactcagcctccaggactctctgcagatcagttttgacagtatgaagaactgggcccctcaggttcccaaagacttgccctggaatttcctcaggaagttgcaggccctcaatgctgatgccaggaataccactatggtgctggacgtgctcccagacgccaggcctgtggagaaggagagccagatggaagaggagatcatctactgggacccagctgatgaccttgctgccgacatttattccttttctgagctgcccacccctgatacgccagtgaaccccttagaccttctctgtgccctgctgctctcctcagacagtttcctgcaacaagaaatagcgttgaaaatggccctctgccagtttgcactcccactcgtgttgcctgactcggagaaccactaccatacatttctgctgtgggccatgcggggcattgtgaggacatggtggtcccagcccccaaggggcatggggagcttccgggaagacagcgtggtcttgtccagggcgcccgccttcgccttcgtgcgcatggacgtcagtagcaactccaagtcccagcttctcaacgccgtcctcagcccgggccacaggcagtgggactgcttctggcatcgggacctcaacttgggcaccaatgcccgggagatttcggatgggttggtagaaatttcctggtttttcccagcggaaggaggacttggacattttcccagaacctgtggcctttctgaacctgagaggtgacatcgggtctcactggctgcagtttaagctcttgacagaaatctcctccgctgtgtttatatgactgaca

SEQ ID NO: 194678 - DNA, 1153 bp, Homo Sapiens
ttggctcgcggaaaagccagccatgggcgccgccggctcctccgcgctggcgcgctttgtcctcctcgcgcaatcccggcccgggtggctcggggttgccgcgctgggcctgaccgcggtggcgctgggggctgtcgcctggcgccgcgcatggcccacgcggcgccggcggctgctgcagcaggtgggcacagtggcgcagctctggatctaccctgtgaaatcctgcaagggggtgccggtgagcgaggcggagtgcacggccatggggctgcgcagcggcaacctgcgggacaggttttggcttgtgatcaaccaggagggaaacatggttactgctcgccaggaacctcgcctggtcctgatttccctgacctgcgatggtgacaccctgactctcagtgcagcctacacaaaggacctactactgcctatcaaaacgcccaccacaaatgcagtgcacaagtgcagagtgcacggcctggagatagagggcagggactgtggcgaggccgccgcccagtggataaccagcttcctgaagtcacagccctaccgcctggtgcacttcgagcctcacatgcgaccgagacgtcctcatcaaatagcagacttgttccgacccaaggaccagattgcttactcagacaccagcccattcttgatcctttctgaggcgtcgctggcggatctcaactccaggctagagaagaaagttaaagcaaccaacttcaggcccaatattgtaatttcaggatgcgatgtctatgcagaggattcttgggatgagcttcttattggtgacgtggaactgaaaagggtgatggcttgttccagatgcattttaaccacagtggacccagacaccggtgtcatgagcaggaaggaaccgctggaaacactgaagagttatcgccagtgtgacccttcagaacgaaagttatatggaaaatcaccactctttgggcagtattttgtgctggaaaacccagggaccatcaaagtgggagaccctgtgtacctgctgggctagtaatgggaaccgtatgtcctggaatattagatgccttttaaaaatgttctcaaaaatgacaacacttgaagcatggtgtttcagactgagacctctacattttctttaaatttgtgattt

SEQ ID NO: 194679 - DNA, 2596 bp, Homo Sapiens; identical to SEQ ID NO: 188381
  misc_feature (690)..(698): n is a, c, g, or t
  misc_feature (713)..(992): n is a, c, g, or t

SEQ ID NO: 194680 - DNA, 1285 bp, Homo Sapiens; identical to SEQ ID NO: 188382
  misc_feature (627)..(918): n is a, c, g, or t

SEQ ID NO: 194681 - DNA, 968 bp, Homo Sapiens; identical to SEQ ID NO: 181823

SEQ ID NO: 194682 - DNA, 1165 bp, Homo Sapiens
  misc_feature (939)..(993): n is a, c, g, or t
actttgtacaaaaaagttggcaccagtggccctatacaaggccatggggtctcagcattccgctgctgctcgcccctcctcctgcaggcgaaagcaagaagatgacagggacggtttgctggctgaacgagagcaggaagaagccattgctcagttcccatatgtggaattcaccgggagagatagcatcacctgtctcacgtgccaggggacaggctacattccaacagagcaagtaaatgagttggtggctttgatcccacacagtgatcagagattgcgccctcagcgaactaagcaatatgtcctcctgtccatcctgctttgtctcctggcatctggtttggtggttttcttcctgtttccgcattcagtccttgtggatgatgacggcatcaaagtggtgaaagtcacatttaataagcaagactcccttgtaattctcaccatcatggccaccctgaaaatcaggaactccaacttctacacggtggcagtgaccagcctgtccagccagattcagtacatgaacacagtggtgaattttaccgggaaggccgagatgggaggaccgttttcctatgtgtacttcttctgcacggtacctgagatcctggtgcacaacatagtgatcttcatgcgaacttcagtgaagatttcatacattggcctcatgacccagagctccttggagacacatcactatgtggattgtggaggaaattccacagctatttaacaactgctattggttcttccacacagcgcctgtagaagagagcacagcatatgttcccaaggcctgagttctggacctacccccacgtggtgtaagcagaggaggaattggttcacttaactcccagcaaacatcctcctgccacttaggaggaaacacctccctatggtaccatttatgtttctcaaaccagcagaatnnnnnnnnnnnnnnnnnnnnnnnnnnnnnnnnnnnnnnnnnnnnnnnnnnnnnnnttaatacagatcttttcagctgttcttagggcattataaatggaaatcataacgtggttctaggttatcaaaccatggagtgatgtggagctaggattgtgagtgacctgcaggccattatcagtgcctcatctgtgcagaagtggcagcagagagggaccatccaaatacc

SEQ ID NO: 194683 - DNA, 878 bp, Homo Sapiens
ttgggtaagtcctcaagctggcaggtggtcgggggagcggccggagaggagctgccgggagttcgtgccctgcaggacatgacaccagtggcatatcacggccatggggtctcagcattccgctgctgctcgcccctcctcctgcaggcgaaagcaagaagatgacagggacggtttgctggctgaacgagagcaggaagaagccattgctcagttcccatatgtggaattcaccgggagagatagcatcacctgtctcacgtgccaggggacaggctacattccaacagagcaagtaaatgagttggtggctttgatcccacacagtgatcagagattgcgccctcagcgaactaagcaatatgtcctcctgtccatcctgctttgtctcctggcatctggtttggtggttttcttcctgtttccgcattcagtccttgtggatgatgacggcatcaaagtggtgaaagtcacatttaataagcaagactcccttgtaattctcaccatcatggccaccctgaaaatcaggaactccaacttctacacggtggcagtgaccagcctgtccagccagattcagtacatgaacacagtggtcagtacatatgtgactactaacgtctcccttattccacctcggagtgagcaactggtgaattttaccgggaaggccgagatgggaggaccgttttcctatgtgtacttcttctgcacggtacctgagatcctgggtgcacaacatagtgatcttcatgcgaacttcagtgaagatttcatacattggcctcatgacccagagctcctttggaggacacatcactatgtggattgtgggaggaaattccacagctatttaaacaacttgctattgattc

SEQ ID NO: 194684 - DNA, 1116 bp, Homo Sapiens; identical to SEQ ID NO: 188393
  misc_feature (200)..(244): n is a, c, g, or t
  misc_feature (620)..(683): n is a, c, g, or t

SEQ ID NO: 194685 - DNA, 1484 bp, Homo Sapiens; identical to SEQ ID NO: 188395
  misc_feature (435)..(489): n is a, c, g, or t

SEQ ID NO: 194686 - DNA, 1301 bp, Homo Sapiens; identical to SEQ ID NO: 188400
  misc_feature (1017)..(1054): n is a, c, g, or t

SEQ ID NO: 194687 - DNA, 490 bp, Homo Sapiens
  misc_feature (129)..(166): n is a, c, g, or t
ttggtgtttctttcagatgaatcttccaaagtggattatattaagcaggtattagatttaggaaaacctttccatttcttaaagtattatcaagtgtcaagatcagcaagtgtccttaagtcaaacagnnnnnnnnnnnnnnnnnnnnnnnnnnnnnnnnnnnnnnagaaagttctagaaaataggaaaacgaaaaatttcattgagatgagtagtgcatttaattattttttaaaaaactttttaagtacttgaattttatatcaggaaaacaaagttgttgagccttgcttcttccgttttgccctttgtctcgctccttattctttttttggggggagggttatttgcttttttatcttcctggcataatttccattttattcttctgagtgtctatgttaccttccctctatcccgcttataaaaaaattctctaacaaaaatacttgttgacctgatgttttatcacttctctactaaggttgaa

SEQ ID NO: 194688 - DNA, 1559 bp, Homo Sapiens; identical to SEQ ID NO: 181827
  misc_feature (150)..(314): n is a, c, g, or t
  misc_feature (316)..(341): n is a, c, g, or t
  misc_feature (459)..(726): n is a, c, g, or t

SEQ ID NO: 194689 - DNA, 1292 bp, Homo Sapiens; identical to SEQ ID NO: 181832

SEQ ID NO: 194690 - DNA, 1603 bp, Homo Sapiens; identical to SEQ ID NO: 188419

SEQ ID NO: 194691 - DNA, 1256 bp, Homo Sapiens; identical to SEQ ID NO: 181837
  misc_feature (1077)..(1089): n is a, c, g, or t

SEQ ID NO: 194692 - DNA, 1471 bp, Homo Sapiens; identical to SEQ ID NO: 188425

SEQ ID NO: 194693 - DNA, 907 bp, Homo Sapiens; identical to SEQ ID NO: 188427

SEQ ID NO: 194694 - DNA, 1088 bp, Homo Sapiens; identical to SEQ ID NO: 188432

SEQ ID NO: 194695 - DNA, 1160 bp, Homo Sapiens
ttgggtatctcaagactataaccaagtagagaatgtcataaaacaagcacaggagaaactgggtccagtggacatgctggtaaattgtgcaggaatggcagtgtcaggaaaatttgaagatcttgaagttagtacctttgaaaggttaatgagcatcaattacctgggcagcgtgtaccccagccgggccgtgatcaccaccatgaaggagcgccgggtgggcaggatcgtgtttgtgtcctcccaggcaggacagttgggattattcggtttcacagcctactctgcatccaagtttgccataaggggattggcagaagctttgcagatggaggtgaagccatataatgtctacatcacagttgcttacccaccagacacagacacacctggctttgccgaagaaaacagaacaaagcctttggagactcgacttatttcagagaccacatctgtgtgcaaaccagaacaggtggccaaacaaattgttaaagatgccatacaaggaaatttcaacagttcccttggctcagatgggtacatgctctcggccctgacctgtgggatggctccagtaacttctattactgaggggctccagcaggtggtcaccatgggccttttccgcactattgctttgttttaccttggaagttttgacagcatagttcgtcgctgcatgatgcagagagaaaaatctgaaaatgcagacaaaactgcctaatcttcttaccccttggaagaagactgtttccaaataatttgaacagcttgctgctaaatgggacccaatttttggcctatagacacttatgtattgttttcgaatacgtcagattggaccagtgctcttcaggaatgtggctgcaagcaaggggctagaagttcacctcctgacagtattattaatactatgcaaatatggaataggagaccatttgattttctaggctttgtggtagagaggtgaaggtatgagaattaatagcgtgtgaacaaagtaaagaacaggattccagaatgatcattaaatttgtttctatttattcttttttgcccccctagagattaagtccagaaatgtactttctggcacataaagaaatcttgaggactttgtttaaaccttccataaaaaaacaattttcggtttctcgggt

SEQ ID NO: 194696 - DNA, 556 bp, Homo Sapiens
ttggctggatgcatgctgaagaaagagaagaatgcaaaggaaagcaaaaggatgggacatcttttggagagtatggcggctggtacaaagcctgcaaagttgatagtccaactgttacaaccactctaaaaaaccttggggcactttacagacgtcaaggcaaatttgaagctgcagaaacgttagaagaagctgctatgaggtctcgtaaacagggtcttgacaatgttcacaaacagagggtggcagaagtgctcaatgaccctgagaacatggagaagcgcaggagccgtgagagcctcaacgtggacgtggtcaagtacgagagtggccctgacggaggggaggaaggcgtctctggccgagcctctttttgtggaaaacgacagcagcagcagtggcctggaagacgccaccgctaactgaccccaacctggccccgctccagggtgggactgccgagtgtggcccggagctggcccgggacagccagggcggcagggagggcccctggccgggagccgcaacgctcactcatttctcctgcgtctgtgtg

SEQ ID NO: 194697 - DNA, 312 bp, Homo Sapiens; identical to SEQ ID NO: 181841

SEQ ID NO: 194698 - DNA, 775 bp, Homo Sapiens
ctttgtacaaaaaagttggggcccggctactgacgcgcagtgccagaccttacccctcacggtccttaagtctcggtcgccctcgcctcgcagcctgccacccgcgctcagctgcccgcctcctcagccagccatgctggagcatctgagctcgctgcccacgcagatggattacaagggccagaagctagctgaacagatgtttcagggaattattcttttttctgcaatagttggatttatctacgggtacgtggctgaacagttcgggtggactgtctatatagttatggccggatttgctttttcatgtttgctgacacttcctccatggcccatctatcgccggcatcctctcaagtggttacctgttcaagaatcaagcacagacgacaagaaaccaggggaaagaaaaattaagaggcatgctaaaaataattgaggttttcatgattcagcacctgcttttgtttctgtgagatgagctaaattgctttcataccccagataagagctaaaaccacctaatgctcttatggcacagctgtgtatagatttagttctctttatacttcatttctagcccagttgggttttgatttatataagtagtttagaccttctcttcataatcttgctctgagatgggggaacagaacacacaagtatgaagtttctttcaggtgtaaataatgaaaaataaatgcctcataaatgatagtacaatgtaactatcaaagttttataatttcattatgagttaaccatttaatgg

SEQ ID NO: 194699 - DNA, 2684 bp, Homo Sapiens; identical to SEQ ID NO: 188441

SEQ ID NO: 194700 - DNA, 994 bp, Homo Sapiens
tttgtacaaaaaagttggtcttaatatgcctgttacttggagtgatatagcaggtttagatgatgtcattacggatctgaaagacacagtcatcttacctatcaaaaagaaacatttgtttgagaattccaggcttctgcagcctccaaaaggtgttcttctctatgggcctccaggctgtggtaaaacgttgattgccaaggccacagccaaagaagcaggctgtcgatttattaaccttcagccttcgacactgaccgataagtggtatggagaatctcagaaattggctgctgctgtcttctcccttgccataaagctacaaccatccatcatctttatagatgaaatagactcctttctacgaaaccgttcaagttctgaccatgaagctacagccatgatgaaagctcagtttatgagtctctgggatggattggatactgatcacagctgccaggtcatagtaatgggagctaccaatcgtcctcaggaccttgactcggctataatgagaagaatgcctacaagatttcatatcaaccagcctgctttaaaacagagagaagcaatcctgaaactcatcttgaaaaatgaaaatgtggataggcatgtagacctgctagaagttgcccaggaaactgatgggttttcaggaagtgacctaaaagagatgtgtcgagatgctgccctcctctgtgttagagaatatgttaattctacatcagaagaaagccatgacgaagatgaaattcggcctgttcaacagcaggacctgcatcgggcaattgaaaagatgaagaaatcaaaggatgcagcatttcagaatgttttaacacatgtttgtttagattaacagtaaagatcatttgtacagttcagtgatctagtttggtgtgtcctcttatcagttagtggaaatagaacggaaagagtgctctttaacaatgagggagctcagtgtttatggttttatactctgaatctaagttat

SEQ ID NO: 194701 - DNA, 1762 bp, Homo Sapiens; identical to SEQ ID NO: 188444

SEQ ID NO: 194702 - DNA, 1325 bp, Homo Sapiens; identical to SEQ ID NO: 188449

SEQ ID NO: 194703 - DNA, 1552 bp, Homo Sapiens; identical to SEQ ID NO: 188453
  misc_feature (306)..(356): n is a, c, g, or t
  misc_feature (381)..(426): n is a, c, g, or t
  misc_feature (801)..(877): n is a, c, g, or t

SEQ ID NO: 194704 - DNA, 1408 bp, Homo Sapiens
  misc_feature (1224)..(1232): n is a, c, g, or t
ttggcaacaaataaaaaaattaacagcttgaattgagtagccaacaggaaaggttcctttcacatttacattaaaactattctgtagtcactaatgtaccataatttaaattcttttctcaaaggtatagattataaagcagtgccatttgttgctgtggtcctattctcaaatgcatggacaatgttcccccctttttaaaataatgcttgtgtctgggatgcaagctttgcttatctttttaaatacatttttaaagtatttattaatgaaccaaaggaaatcagatgctttctataagcatcagaatatataatacatagtgatttgactatgaattttaaatccacattttaatattggtgggatattgcaaagacattccttctaaagttttaatattccttttattaagggtctcagggagggtaaattagtcagccatatttattttccagaggtttaagaaattgctgtttttaactttttgaaaaaacttaaatgccaccaaactcatgtaggttgcactgcttattgaaccaataactgttggtatgcactttgttcagacacactgtgtactttttcaaaaactagtttcatgtaaagtgattggaccccatagattagtggaaaaagctgattaaccagctactcataggctgctaattcattcatgccaatgttttggtttttcagttttgcctccgtgataaattaaagaatggggaggggtgaaggaaggggaagaagattgctttagaacaagtggcatgaaattaccatctttgtagaaaccgcagctaacagtgggagttatctaagcaatcagatgttacagggccagccctttagctgctgtggtgtattctgttgggtagtgaggtagtaggtactttatagacttttaattttggaaattgatgacatccctcaggcatgtattctggaaatggaattcctgtaacttcctgtgtctgcagtatgccctacaattagtaggcagcgtgtaaaaacactagtgtagattataaagatatacattaaaagaggaccagaaatacttggtattcagtggcacagaaagcaggttaaacaaacaaaaagcacagtgttacgcttgcaagtttccatttgttttaataccacgcaatctttcacactcgtgcgtgtgcgcgcacacagagcttacctgacttgctctgcttgagtcatgcagttacnnnnnnnnngacatcttgacacccacacaatattctaatcaaaacctttcagtttcaatctggatatttaaaacattggcagaagcttctgtgagtttagttccactaagatgtttcacctgccttatcaagaccattctcagtctacttttttaagctaccgtatcttaaattattgaaaatta

SEQ ID NO: 194705 - DNA, 1170 bp, Homo Sapiens
  misc_feature (758)..(769): n is a, c, g, or t
  misc_feature (811)..(824): n is a, c, g, or t
cttttgtaacaaaaaagttggctggttatatcattctgggtgtgttcttactgacaccaggggtccgctgccccatgtgtcctggtgagaaaatatatgcctggcacagcttttgtatagaaaattcttgagaagtaactgtccgctagaagtctgtccaaatttaaaatgtgtgccatattctggttcttgaaaataagattccagagctctttgatcgcttttaataaactgcaagttcattttaaatgaagggccagcatatatacttgcaagataattttcagctgcaaggattcagcaccagttatgtttgaatgaaccctccttttctctgagattctggtccctggaaatccctttctgctagtggtgagcatgtaagtgttaagtttttaatctgggagcagggcataggaagaaaatgtcagtagtgctaatgcattttgcactagaacgcttcgggaaaatattcatgcttgccatctgttcatttctaaatttatattcataaagttacagtttgatacaggaattattaggagtaattcttttctgtttctgtttataatgaagaacactgtagctacattttcagaagttaacatcaagccatcaaacctgggtatagtgcagaaaacgtggcacacactgaccacacattaggctgtgtcaccattgtgtggtgtacctgctggaagaattctagcatgctacttggggacataatttcagtgggaaatatgccactgaccgannnnnnnnnnnncctctttgcagtggggctaggacagttgattcaacaaagtannnnnnnnnnnnnnctcagtcctaatttgaacaggtcaaagatgtgttcaggcattccaggtaacaggtgtgtatgtaaagttaaaaataggctttttaggaactcactctttagatatttacatccagcttctcatgttaaatatttgtccttaaagggtttgagatgtacatctctcatttcgtatttctcataggctatgccatgtgcggaattcaagttaccaatgtaacactggccagcgggcccagcaatctccatgtgtacttattacagtcttatttaaccaggggtcctacccactaacattgtgactttgctttgagacctttcctctcctgggtactggagtgctatga

SEQ ID NO: 194706 - DNA, 1210 bp, Homo Sapiens; identical to SEQ ID NO: 188464
  misc_feature (291)..(299): n is a, c, g, or t

SEQ ID NO: 194707 - DNA, 1762 bp, Homo Sapiens; identical to SEQ ID NO: 188468
  misc_feature (509)..(521): n is a, c, g, or t
  misc_feature (931)..(940): n is a, c, g, or t
  misc_feature (958)..(986): n is a, c, g, or t

SEQ ID NO: 194708 - DNA, 1486 bp, Homo Sapiens; identical to SEQ ID NO: 188477

SEQ ID NO: 194709 - DNA, 746 bp, Homo Sapiens
ttggcactgtagcgggacttcttttggttttctttctctttggggcacctctggactcactccccagcatgaaggcgctgagcccggtgcgcggctgctacgaggcggtgtgctgcctgtcggaacgcagtctggccatcgcccggggccgagggaagggcccggcagctgaggagccgctgagcttgctggacgacatgaaccactgctactcccgcctgcgggaactggtacccggagtcccgagaggcactcagcttagccaggtggaaatcctacagcgcgtcatcgactacattctcgacctgcaggtagtcctggccgagccagcccctggaccccctgatggcccccaccttcccatccagacagccgagctcgctccggaacttgtcatctccaacgacaaaaggagcttttgccactgactcggccgtgtcctgacacctccagaacgcaggtgctggcgcccgttctgcctgggaccccgggaacctctcctgccggaagccggacggcagggatgggccccaacttcgccctgcccacttgacttcaccaaatcccttcctggagactaaacctggtgctcaggagcgaaggactgtgaacttgtggcctgaagagccagagctagctctggccaccagctgggcgacgtcaccctgctcccaccccacccccaagttctaaggtcttttcagagcgtggaggtgtggaaggagtggctgctctcccaactatgc

SEQ ID NO: 194710 - DNA, 996 bp, Homo Sapiens; identical to SEQ ID NO: 188479

SEQ ID NO: 194711 - DNA, 1947 bp, Homo Sapiens; identical to SEQ ID NO: 188480

SEQ ID NO: 194712 - DNA, 1013 bp, Homo Sapiens
tttgtacaaaaaagttggctatctttgcctccagatttcaagaggagaaatttagttttaaacctgaataaacatgtttgttttcagtgctcactcaaaccactaaaacagatggatagctttgaggttttagataaggaaagattatggagaatgtagttgttattgatttttggcaattttacatttggaattttatcactgtgcttttttatatgaggcactgtagtattttcacatagtatagtactctggatgtaaaagctcaaaaattgtgattccttgaacgttcactaaatcttcaagcaaaaacacatttttacattatttttacgttgattattttagtgaaagaccatatgaagaagcatttttaatattaacttgttacatactttgatccactttacatcatttttatgttgttgaggtagggaaattagggttcagtttatcactggacattcaggaggcaagtcaatcttttttatttccttataaaattaactcttcaaaagctgttaaacagagagttatcttaatttttattgcagtaggaggaaatatatttaaaatatttgtagatttatagcaaatagagactcgttatttaaaggttaaataacaatttgttcttttgttgtttttgccagtttagggcagtagctgcttttgtcataaatatcttcctaccacatcaaaaatgctgcttttaaaatttttgtttataaattgagaaggaattttctctctataagtttctgtcattgaacagatcaccattaaaaagaatattagaatccagcatgaagataatggctaataaaaatgaggtacatactttataaaaccattaatcagatttgaatgaggaatgcttcccacatccttgaaagaaaaactgtggcttacgttttgaagtattctgagaatgaagtattaagatccaatttctataagcaagatcagacttgttaagtatgccgcaagtaagagctaattcattcattccc

SEQ ID NO: 194713 - DNA, 2083 bp, Homo Sapiens; identical to SEQ ID NO: 188483

SEQ ID NO: 194714 - DNA, 1492 bp, Homo Sapiens; identical to SEQ ID NO: 188486

SEQ ID NO: 194715 - DNA, 1059 bp, Homo Sapiens; identical to SEQ ID NO: 188489

SEQ ID NO: 194716 - DNA, 863 bp, Homo Sapiens; identical to SEQ ID NO: 188491

SEQ ID NO: 194717 - DNA, 852 bp, Homo Sapiens
ctttgtacaaaaaagttggggaaagtattgccttttttaagggaagctataattcgatacatagtgaaaaagggaatggtgacccctttgtgcctcttccactgaggataacaaacagcattgtaatccattctcttgcaccttcttcttcttatcttgttattacggttttattaattttgtagagggacagggagtgggcaaggggaagaagcagcttatttgactaaccagcccctctgtggtccaccagcgtcttggcttggtgggagggctctcaatcagcagggccccaggagggaagaagaagtggggcaaagcctggcctcgccgctcgggagctttgccatctgagccacgcctcctccaggccatgctccttgaacttggaaatgtcaaccggagcccttacaccagccctccagcatctaatagacttgaatctactctaaacgaatatttaatccaacctcactacattgtagctcagtccaacgactaaccctgaaatgggggtgttccagccttcagcgagatggccaagcggtcccctgggggctgtggcagcggacttatccttctctgttgccaaccttgccgtccgacctcctccgcccccatgcggtgaccccgtccgtgtctgtgtctgtccatacgtgtgagtccagctaaaaagacaaaacagaacccgtgggcccagctcggaaggtgcgtggagaaggttccgacgtctcggaagtgcagcccttgggatggcattccgttgtgtgccttattcctggagaatctgtatacggctcgcctatagaaatatagcctcttcatgctgtattaaaaggacttttaaaagcc

SEQ ID NO: 194718 - DNA, 873 bp, Homo Sapiens
ctttgtacaaaaaagttggggcatttcgctgatagggttggaactattgaagcccgctttcaggttcttttccccattttccctttgaaaggaagacttctggcttctcctaaatctccgttctctgggtaaggggagtccaagcctctgtcatgaggaacggaaatgcgagggcctcgggtgttactctaaaatccgccctcagcttgcacgccggaagctgcgattcctgcagcggaagaggcgtgatctggccttcgactcgctatgtccactaacaatatgtcggacccacggaggccgaacaaagtgctgaggtacaagcccccgccgagcgaatgtaacccggccttggacgacccgacgccggactacatgaacctgctgggcatgatcttcagcatgtgcggcctcatgcttaagctgaagtggtgtgcttgggtcgctgtctactgctccttcatcagctttgccaactctcggagctcggaggacacgaagcaaatgatgagtagcttcatgctgtccatctctgccgtggtgatgtcctatctgcagaatcctcagcccatgacgcccccatggtgataccagcctagaagggtcacattttggaccctgtctatccactaggcctgggctttggctgctaaacctgctgccttcagctgccatcctggacttccctgaatgaggccgtctcggtgcccccagctggatagagggaacctggccctttcctagggaacaccctaggcttacccctcctgcctccctttcccctgcctgctgctgggggagatgctgtccatgtttctaggggtattcatttgctttctcgttgaaacctgttgttaataaagtttttcactc

SEQ ID NO: 194719 - DNA, 590 bp, Homo Sapiens
ttgtacaaaaaagttggcaatatgtcggacccacggaggccgaacaaagtgctgaggtacaagcccccgccgagcgaatgtaacccggccttggacgacccgacgccggactacatgaacctgctgggcatgatcttcagcatgtgcggcctcatgcttaagctgaagtggtgtgcttgggtcgctgtctactgctccttcatcagctttgccaactctcggagctcggaggacacgaagcaaatgatgagtagcttcatgctgtccatctctgccgtggtgatgtcctatctgcagaatcctcagcccatgacgcccccatggtgataccagcctagaagggtcacattttggacccctgtctatccactaggcctgggctttggctgctaaacctgctgccttcagctgccatcctggacttccctgaatgaggccgtctcggtgcccccagctggatagagggaacctggccctttcctagggaacaccctaggcttacccctcctgcctcccttcccctgcctgctgctgggggagatgctgtccatgtttctaggggtattcatttgctttctcgttgaaacctg

SEQ ID NO: 194720 - DNA, 968 bp, Homo Sapiens; identical to SEQ ID NO: 181861

SEQ ID NO: 194721 - DNA, 1322 bp, Homo Sapiens; identical to SEQ ID NO: 181863

SEQ ID NO: 194722 - DNA, 2863 bp, Homo Sapiens; identical to SEQ ID NO: 188497
  misc_feature (458)..(483): n is a, c, g, or t
  misc_feature (607)..(666): n is a, c, g, or t
  misc_feature (1605)..(1625): n is a, c, g, or t
  misc_feature (1648)..(1889): n is a, c, g, or t
  misc_feature (2038)..(2091): n is a, c, g, or t
  misc_feature (2439)..(2451): n is a, c, g, or t
  misc_feature (2700)..(2708): n is a, c, g, or t

SEQ ID NO: 194723 - DNA, 952 bp, Homo Sapiens
  misc_feature (86)..(148): n is a, c, g, or t
ttggcctttttgtcatcactttagaatgaaaattcccatttaaatctgaaagttaccttaatagtcctcttgtgttattaggacannnnnnnnnnnnnnnnnnnnnnnnnnnnnnnnnnnnnnnnnnnnnnnnnnnnnnnnnnnnnnncttctgctgcttttagggacaattaaaactgggaaactatgaaacatggaacattttatcctacctgaaagtaaacgagtaattgtgaagcataagacactgaggctaatacaactctgtcttcatgtgttgactgcctggcacatagtattcattctcttccctttaacatagaagtgtccagctgcgtacagtctagtaaccagcaactgtaaacgaacctgtgcctctaacaagcgattctaaaccacctatgagtatttcttttagggctcacttaaatacatgtttgtatatactgtattctagccagaataattttagatctgatcaggtagtagctaaaattagaaaaaaacaaaatagatgcttaaagaatttgcatccatttttgagtctaaatcttttaaaatatactgagatccacatctagtgaaatgtcagtgtcaaaatattatagattatagctaaaatccagattaatactcatttggggttttttatagtggaacttcatagtaatacaaaaagcagattgtcttcctgtctccgctgctcccacagtaggtattgaaactggtaaaatcagttttttgatagtgtgtgtatataagaaaaaatagatacacacattcttttttctcagtcaacacattgattgaacactctggcaaagatgctgtggtggatgaggttggagttcgaaagaagaagcaagcgctggcctggccttgaaagaaccgaagtctttcccattcacttctctagaaagctgccaagacagaggcagaaagaaatggatga

SEQ ID NO: 194724 - DNA, 900 bp, Homo Sapiens; identical to SEQ ID NO: 188498
  misc_feature (358)..(372): n is a, c, g, or t
  misc_feature (399)..(531): n is a, c, g, or t

SEQ ID NO: 194725 - DNA, 1158 bp, Homo Sapiens
  misc_feature (945)..(954): n is a, c, g, or t
ttggcgaacacgccgcggtcctcgtcgtggtgagcgcagccactcaggctggtcctgggggtggggctgtaggggaaagtgctaaagccgctgagtgaagtaagaactctgctagagaggaaatggctgcttcatcatcatcctcctcagctggtggggtcagtggaagttctgtcactggatctggtttcagtgtctcagaccttgccccaccacggaaagcccttttcacctaccccaaaggagctggagagatgttagaagatggctctgagagattcctctgcgaatctgtttttagctatcaagtggcatccacgcttaaacaggtgaaacatgatcagcaagttgctcggatggaaaaactagctggtttggtagaagagctggaggctgacgagtggcggtttaagcccatcgagcagctgctgggattcaccccctcttcaggttgatactgcctggatggtcacctctggtgcgcagcaagtgcaaagccagtgggggactttctcacagcttacatagccatccagagatccacagctacgtcactgaattgttaatgcacatttgtacttggtttctctgtatctattcacaggcaacaaatacttatatgtgtgatctttcagggaatgttttgtttatttgtttttaaaagtattgggaatcagattaagacaatcagtttcagagaaccaggaggtttggggttaagagatactcaaaaattttcacaagccaagtagggcatatatcagatttggccaactgaatggcgtctgtcctgtcatccatatggtgcctggaaatatttaccagtcaaggtcaaggtcagcatctgtggttaaaaatatagcattctgacctaaaaaagttattttgcagatgaatgtgttttcaactcaggacctatccaaatgaggaatttttaaatattcnnnnnnnnnncctatttttagacatcaattctatagattctgactttttctaacctcttatagacatgccaaatgctggcaaaaagaagtgctttttggatatggcagcacttgtaaaaataaagcagtaagcaaaatccttttaaacacagaaatcctgagttcttctcattggtggactcaagcaattctgtagcaaataaatcctttgaaa

SEQ ID NO: 194726 - DNA, 868 bp, Homo Sapiens
ttggatttattgttgtggcttgatcaggatgtatccaagaaaaactgtcctatgaagtgtgatgcttttatcctcgtataacttatttcctctgtcaaatttctgccttggcactgccatatcaccccttcataactcataaatcacccacagtcaatcttagttgacataaacagttcgctaatggtaggaattcatgttttaagtagatatactattcttaagcatattttcagttcaaaacctgactgatattttggcctgagacatcaataaaatattgtgaaagtagagagcatagaaaaaaggggagctaactctttacaaaactgtatgctggcccttacagcagctagaatgaaatgttgtcactctcacttccataaacttgccaattgctgtttttctttctctgtagtgaagtaagaactctgctagagaggaaatggctgcttcatcatcatcctcctcagctggtggggtcagtggaagttctgtcactggatctggtttcagtgtctcagaccttgccccaccacggaaagcccttttcacctaccccaaaggagctggagagatgttagaaggtgatctcatgctgctttctgaataattggattcagatctgcaatgcatattaattgtaaagaagctattaagtggattaaagatgagtttgccctgatttcagctccacatttcatttcttgtccccatctcaaaatagtatctttaaaaacaagtcttgctccagaatcagaattttggagctgaaaaggactttggaaatcaatgaagtcatctagagttatttagatccagaaaagttaagtgatttgaccaggttaaaggcagagtcagggctggg

SEQ ID NO: 194727 - DNA, 523 bp, Homo Sapiens
ctttgtacaaaaaagttggctctatcaagaatacaatttcagcaaggctgagggccatctgaaacagatggagaagatatatactcagcaaatacaaagcaaggatgtagaattgacctctatgaaaggggaggttacctccatgaagaaagtactagaagaatacaagaaaaagttcagtgacatctctgagaaacttatggagcgcaatcgtcagtatcaaaagctccaaggcctctatgatagccttaggctacgaaacatcactattgctaaccatgaaggcacccttgaaccatccatgattgcacagtctggtgttcttggcttcccattaggtaacaactccaagtttcctttggataatacacctgttcgaaatcggggcgatggagatggagattttcagttcagaccattttttgcgggttctcccacagcacctgaacccagcaacagcttttttagttttgtctctccaagtcgtgaattagagcagcagcaagtttctagcagggccttc

SEQ ID NO: 194728 - DNA, 938 bp, Homo Sapiens; identical to SEQ ID NO: 181866

SEQ ID NO: 194729 - DNA, 972 bp, Homo Sapiens
actttgtacaaaaaagttggctttctttccctctccgttttggtgggctggttgaagatgaaatccactgaggagggaagtccagcaccctgtgtgccagtccagaactggcccatctgtagaccccctgaaaatcatatgggcttggatttggatattctcaacagaaagggttaaaggctgatggtacctaaagcctggtacttgaattttgatcaagataagctgccttaagttctcttcattacacaaatgatcctagataattgatagatcctgtggttcaactggatttctagatagaagctggattcatgtgatgccagaggagtaaaatttcaagagactgaaaccagatctgagtttcgctgttccagtctggacctctttggtgctgtaaatcctggatatactgtagatgagtactgcgtttttcttttatggactctcttcagcttctggagacctcactatcctattatgtctttgtgtgaagacatgctgctttgtaattatcgaaagtgtcgcatcaaactctctggctatgcatgggtcactgcctgctctcacatcttctgtgatcagcatggcagtggtgagtttagtcgctcaccagctatctgtcctgcctgcaacagtaccctttctggaaagctagatattgtccgcacagaactcagtccatcagaggaatataaagctatggtattggcaggactgcgaaccagagatcgtgttggacattagctcccgagcgctggccttctggacatatcagctagtctctaactcctgggttcaagccattctcccgcctcagcctcctgagtagcctgtgcttcacttgtatttcccttgaaagacctccctgtggatgactttaagcatgtccttgaatggtattgttatatcttacatataacacttatacttctttacgatgtttgtcatctgtcaagtaactttttatta

SEQ ID NO: 194730 - DNA, 2150 bp, Homo Sapiens; identical to SEQ ID NO: 188514
  misc_feature (69)..(93): n is a, c, g, or t

SEQ ID NO: 194731 - DNA, 1314 bp, Homo Sapiens; identical to SEQ ID NO: 188518
  misc_feature (314)..(325): n is a, c, g, or t
  misc_feature (1096)..(1114): n is a, c, g, or t

SEQ ID NO: 194732 - DNA, 750 bp, Homo Sapiens
tttgtacaaaaaagttggttttgggtacttctttaaaggaggaatgcctttcgcaataatgtatccattccctgattgagggtgggtgggtggacccaggctccctttgcacacagagcagctacttctaagccatatcgactgttttgcagaggatttgtgtgtgctgcctcaggaggggagggctggtaggagggggggagaggtctctgtcctactgctctccagagggcatttccccttgcgccttctcccacagggcccagcccctctcccctgccccagtccccagggggtactctggagtgagcagtgcccctgtgggggagcctgtaaatgcgggctcagtggaccactggtgactgggctcatgcctccaagtcagagtttccctggtgccccagagacaggagcacaagtgggatctgacctggtgagattatttctgatgacctcatcaaaaaataaacaattcccaatgttccaggtgagggctttgaaaggccttccaaacagctccgtcgcccctagcaactccaccattgggcactgccatgcagagacgtggctggcccagaatggcctgttgccatagcaactggaggcgatggggcagtgaacagaataacaacagcaacaatgcctttgcaggcagcctgctcccctgagcgctgggctggtgatggccgttggactctgtgagatggagagccaatctcacattcaagtgttcactaaccactgatgtgt

SEQ ID NO: 194733 - DNA, 824 bp, Homo Sapiens; identical to SEQ ID NO: 181872

SEQ ID NO: 194734 - DNA, 926 bp, Homo Sapiens
ctttgtacaaaaaagttggcaggcctgcgccgctcctcccccaggacccccactcgcagtccctcaagcctgtgctcccggaaaggcactgggcgaccgcacccgtggctttctctgggcgaccgggtcccagactccccccagcacagcagagcgcttccctgcccacccgcggaaaccgccccaggatgcagcaccgaggcttcctcctcctcaccctcctcgccctgctggcgctcacctccgcggtcgccaaaaagaaagataaggtgaagaagggcggcccggggagcgagtgcgctgagtgggcctgggggccctgcacccccagcagcaaggattgcggcgtgggtttccgcgagggcacctgcggggcccagacccagcgcatccggtgcagggtgccctgcaactggaagaaggagtttggagccgactgcaagtacaagtttgagaactggggtgcgtgtgatgggggcacaggcaccaaagtccgccaaggcaccctgaagaaggcgcgctacaatgctcagtgccaggagaccatccgcgtcaccaagccctgcacccccaagaccaaagcaaaggccaaagccaagaaagggaagggaaaggactagacgccaagcctggatgccaaggagcccctggtgtcacatggggcctggcccacgccctccctctcccaggcccgagatgtgacccaccagtgccttctgtctgctcgttagctttaatcaatcatgccctgccttgtccctctcactccccagccccacccctaagtgcccaaagtggggagggacaagggattctgggaagcttgagcctcccccaaagcaatgtgagtcccagagcccgcttttgttcttccccacaattccattactaagaaacacatcaaataaactgactttttccccccc

SEQ ID NO: 194735 - DNA, 1121 bp, Homo Sapiens; identical to SEQ ID NO: 188523

SEQ ID NO: 194736 - DNA, 1332 bp, Homo Sapiens
  misc_feature (1125)..(1133): n is a, c, g, or t
ttggcacagccacagcccctgactgccgcagcccccacagagcccgccgcgcaccccacgtcccccacgccagcgcccagccatggaggccatcaagaagaaaatgcagatgctgaagttggacaaggagaatgccatcgaccgcgcggagcaggcggaggcggataagaaagccgctgaggacaagtgcaagcaggtggaggaggagctgacgcacctccagaagaaactaaaagggacagaggacgagctggataaatattccgaggacctgaaggacgcgcaggagaagctggagctcacggagaagaaggcctccgacgctgaaggtgatgtggccgccctcaaccgacgcatccagctcgttgaggaggagttggacagggctcaggaacgactggccacggccctgcagaagctggaggaggcagaaaaagctgcagatgagagtgagagaggaatgaaggtgatagaaaaccgggccatgaaggatgaggagaagatggagattcaggagatgcagctcaaagaggccaagcacattgcggaagaggctgaccgcaaatacgaggaggtagctcgtaagctggtcatcctggagggtgagctggagagggcagaggagcgtgcggaggtgtctgaactaaaatgtggtgacctggaagaagaactcaagaatgttactaacaatctgaaatctctggaggctgcatctgaaaagtattctgaaaaggaggacaaatatgaagaagaaattaaacttctgtctgacaaactgaaagaggctgagacccgtgctgaatttgcagagagaacggttgcaaaactggaaaagacaattgatgacctggaagagaaacttgcccaggccaaagaagagaacgtgggcttacatcagacactggatcagacactaaacgaacttaactgtatataagcaaaacagaagagtcttgttccaacagaaactctggagctccgtgggtctttctcttctcttgtaagaagttccttttgttattgccatcttcgctttgctggaaatgtcaagcaaattatgaatacatgaccaaatattttgtatcggagaagctttgagcaccagttaaatctcattccttcccnnnnnnnnncaaatggcaccagctttttcagctctcttattttttccttaagtagcatttattcctaaagtagcagggtatttcctagtaagcatactttcttaagacggaggccatttggttcctgggagaataggcagccccacactttgaagaatacagaccccagtatctagtcgtggatataattaaaacgctgaagaccata

SEQ ID NO: 194737 - DNA, 1616 bp, Homo Sapiens
caaggccttgtgcagggtcaccccagccccgataacggtcacctggtcatccttgctcttcaggaccaccttggcttgtccgacctggaagtcctcattgttgttatagatgatggcattttctgggcggctggtccggatgaagcagataccctttgtattggcggctagttccactgccttctctgtagcaacgccatcacttgggtaaaagacagttgatgtggggactgaccgaaacatagccagatcttctagggccatctgggagggcccgtcttccccgatggaaacgccgcagtgggagccgcagaggttgatgttgctctcggagatggcggccatgcgaatctggtcaaaggcccgcgtgaagaaggctgcaaaagtgctgcagaagggcaccgtcctgttgcgggtggcacagcccaccgcgatgctcaccatgttctgctcggcaatgtagcactcgatgaagcggtccgggtgctcctttttgaagatctccgagaaggtggaatttttggtgtccccatccagggcgatgatgcggtcactggcatggcccagcttggccagtgcctgcccgtaggccttgcgggtggctatcttgtccccaactttgtagctgggcaggctgggcatgcggatgttggcaatgtccactgagggtgcgtcctcctgtggaggggttgccaggatcttctttttgctctggatctggctgtagatctcctggatgatctgctcagccatgtttttggggaggggcttcccatgccaagactccttatcttctacccccgtgatccctcggcccttgaaggtcttggcaatgatggctgttggctggtgcttggcctggccaaaggccttgcacagctcctccacgctgtgtccatccacgatgatggcatgccaaccgaaggcctcgcaccgcttctggtagatgtccatctggtgctgcagcggggccgggtcactctggcccaggcgattgatgtctagaatggccacaaggttgtccagcttatagatgctggcgaaggccatggcctcccatacagagccctctgacagctccccgtctcccagcaagcaatagactcggtagctggccttgtcgaagtatttgccggtgtaggccatcccacaagcggccccgaggccctggcccagggagccagtggccacgtcggtgaaagcttgtttcgggaccgggtgcccgtccaagtcggagctgatcttcctcaggttcagcagctccgcctcggccaggaaaccagcttcagcccagaccgcgtagaggatgggagctgcatggcccttggagagcacaaagcggtcattgtgcggattccgggggtcctgggacttgtagcgcatggtgtggaaaaagaggacagccatgatctctgcggcgctgcagcatgacgtggggtggccagagcccgccgcagtggtggcctggatggagctgatacgtaggcggttggccgtgtccttcaaggcctgcagcttctgctggtcaggcttgtggtagctctccatggtgcggcaggcggggaccgggcgcacacgcggacacacagagatagcggctgctcccgcggcgccaa

SEQ ID NO: 194738 - DNA, 1578 bp, Homo Sapiens; identical to SEQ ID NO: 188524

SEQ ID NO: 194739 - DNA, 945 bp, Homo Sapiens
actttgtacaaaaaagttggagatggaggcagcggagacagaggcggaagctgcagccctagaggtcctggctgaggtggcaggcatcttggaacctgtaggcctgcaggaggaggcagaactgccagccaagatcctggttgagtttgtggtggtatgtacaagatgagagcgagcctttcagaagccagggtctggtcctggctcctcttactgagatacagggcagcattggcagagagcagacttaaggaaacctgtaaggaggtaaggatgttccctgtctctgccctccctctgagcaggactctcagaagaaagacaagctgctctgcagccagcttcaggtagcggatttcctgcagaacatcctggctcaggaggacactgctaagggtctcgaccccttggcttctgaagacacgagccgtgagtaggcaggggattgtagtagcagctgacctgagtggggaaggaaggaggatttcagttaggtctcccatttggctgatgggaaggaggcccagtgttgcagggaggcaggctagcaggccaccctcactcatgtactcattcctggtggctcatctcaggacagaaggcaattgcagctaaggaacaatggaaagagctgaaggccacctacagggagcacgtagaggccatcaaaattggcctcaccaaggccctgactcagatggaggaagcccagaggaaacggacacaactccgggaagcctttgagcagctccaggccaagaaacaaatggccatggagaaacgcagagcagtccagaaccagtggcagctacaacaggagaagcatctgcagcatctggcggaggtttctgcagaggtgagggagcgtaagacagggactcagcaggagcttgatgggtgtttcagaacttggaaacctgaagcagcaggcagacaggagcggga

SEQ ID NO: 194740 - DNA, 855 bp, Homo Sapiens
ataaaagccaactttgtacaaaaaagttggctcattaaatccgtaaatcacctctataagtaagtggtaataataaagcagatatttttgtccccatttaaaaaatgaagaaattaatgcttaatagggtggtaccctggaaaggatctgggaagtggtagaatttctggtctgtacttttacaaatggagcccttgggaggtgggttaggtaaaagaagctttttacttaacgttgtcttatttccagtctaattttacgctgtagcagaaccagatggctgagaaaattctggaactatggatcttgaccccaaggatatattattttattccaagaaagatcaggtaggcgaaaagatgacaggatacagagtcaatccataaactaaatatttataactgttctgaattatacagagtctaaaaatatgtgtcagctacttcattcctgtaaatactcttgctgtgttataaatatggcaagaaataaacatgaccaatatcaatagacttcttgaggctactataagttttgagaaataaggttcaaaaaataagaatgctaacacttaagcacagactagagcttgcttgggtttcttcctgcattacaaggtaaaaatttgttaatgtttgtttttattcagcttgggaaagctttgtgccatgaatacgtcgcatttaataacaagcaacacacggcatatagaaataactttaattaaaaaacttacatagaagatcataatatcagacgtgacaagatttgagtttatttgcctggacaacttgggtttgtctggcttttgttttcttttctttaaaaataaatgtacagtaaaactacaagcaa

SEQ ID NO: 194741 - DNA, 1552 bp, Homo Sapiens; identical to SEQ ID NO: 188527
  misc_feature (1294)..(1308): n is a, c, g, or t

SEQ ID NO: 194742 - DNA, 951 bp, Homo Sapiens; identical to SEQ ID NO: 188532

SEQ ID NO: 194743 - DNA, 1139 bp, Homo Sapiens
ttggcgccatgagcgcgctgctgcggctgctgcgcacgggtgccccagccgctgcgtgcctgcggttggggaccagtgcagggaccgggtcgcgccgtgctatggccctgtaccacactgaggagcgcggccagccctgctcgcagaattaccgcctcttctttaagaatgtaactggtcactacatttccccctttcatgatattcctctgaaggtgaactctaaagaggaaaatggcattcctatgaagaaagcacgaaatgatgaatatgagaatctgtttaatatgattgtagaaatacctcggtggacaaatgctaaaatggagattgccaccaaggagccaatgaatcccattaaacaatatgtaaaggatggaaagctacgctatgtggcgaatatcttcccttacaagggttatatatggaattatggtaccctccctcagacttgggaagatccccatgaaaaagataagagcacgaactgctttggagataatgatcctattgatgtttgcgaaataggctcaaagattctttcttgtggagaagttattcatgtgaagatccttggaattttggctcttattgatgaaggtgaaacagattggaaattaattgctatcaatgcgaatgatcctgaagcctcaaagtttcatgatattgatgatgttaagaagttcaaaccgggttacctggaagctactcttaattggtttagattatataaggtaccagatggaaaaccagaaaaccagtttgcttttaatggagaattcaaaaacaaggcttttgctcttgaagttattaaatccactcatcaatgttggaaagcattgcttatgaagaagtgtaatggaggagctataaattgcacaaacgtgcagatatctgatagccctttccgttgcactcaagaggaagcaagatcattagttgaatcggtatcatcttcaccaaataaagaaagtaatgaagaagagcaagtgtggcacttccttggcaagtgattgaaacatctgaaattctgctgtcaagattcccatctctaaggactccaagtgctagagacaagggggtctatgagcatttactgacttcctgttaaaacttcattttttcaaacttttttgagc

SEQ ID NO: 194744 - DNA, 927 bp, Homo Sapiens; identical to SEQ ID NO: 188541

SEQ ID NO: 194745 - DNA, 321 bp, Homo Sapiens
ccattaaacaactttgtacaaaaaagttgggtcgaagcgaggcacaataaaaaagggtcctctggtgcgaaattccggatttccttgggtcttccggtaggagctgtaatcaattgtgctgacaacacaggagccaaaaacctgtatatcatctccgtgaaggggatcaagggacggctgaacagacttcccgctgctggtgtgggtgacatggtgatggccacagtcaagaaaggcaaaccatagctcagaaaaaaggtacatccagcagtggtcattctacaacgaaagtcataccgtagaatagatggcgtgtttctt

SEQ ID NO: 194746 - DNA, 934 bp, Homo Sapiens
gtggggaagagggtgagagtcgtaaaggggcaatagcaatagagattacactgtgctgacacagagactaaattctagtcagagtgaagacccatataaaaggccggctgatggtttaaaggaagtaactacatggagtctaatcgagacattcatgagttacatctcattattagccttagtaatgtaagaaaacaattctcaacaaaactggagtccacagttgtcaagtatgctttctcaggcacgggtaggtaaaagtctggagaaatgggttctctccatgcccaatgacaaagcaagacggtcctaggtttgaggttaagagcaggtcccattgccgggcggtatccgcagctcacagctgagtttagcagtggaatcgagtggagaatttgggagatacaggcacagtcagaggctggtcacttgactttatctccagaccctggtacttgcgtattggatttgccttatgcaccagttctctccgtagcctggccagctcctcttttttctgctcttcctcctgtagtctggcctcctccaactgctgggctttctgggcttctacctcagccattctcttctccagctcctgccgctctttggctctcttctcagtagccagctgaaaaggttcctgaactagagaaccagaaaggccctcagcaactgatttcttctctttcttgggaacaaagggctcctgagagatgacggtgtttggacgagccttgaaacaagctgcttctttctgctgtctcagttcttcttccagctggtgcttccaagtctgtgccttcagagcacctctcctgtcagtctccaagcagaaaggttcaatctgggtcacattctttaccttcttctctggcaggttaatggtgtcaaaatgaggcaagggaaggccaacttttttgtacaaagttgg

SEQ ID NO: 194747 - DNA, 868 bp, Homo Sapiens; identical to SEQ ID NO: 188552

SEQ ID NO: 194748 - DNA, 1036 bp, Homo Sapiens; identical to SEQ ID NO: 181892
  misc_feature (676)..(694): n is a, c, g, or t

SEQ ID NO: 194749 - DNA, 1042 bp, Homo Sapiens
  misc_feature (549)..(558): n is a, c, g, or t
ccccaagtcccaaccaacggcactgtacattcagaaagtctgaagagagtaggctcagcaaggggagggctccagagggctcaaagtgccatcccctgcaggagggtgcagggggataaagggctattaatccgtttctcaggaacacgaggcagggaagagcttaaggcaaccagccttctctggatccgtttatgaggcagagaagagcttgaggcaaccagccttctctggaagcctggagaccactggagtgacctggggaacagatctgtccaccagaacctgtgagaggcttattcccagcccaggcaggaaggactgggctgtgtctaagaagccagattcaggccaggcctgcagggtgggggagtcaaggcccaggaccctggcagaaagctccagctgggatgggcccaggtcagcctgtgatcccaactgtgtgggggtgtctgtgtgtgcacaggacgaagagaacttcagtcccactgcttccagagacaaaagaatcctaccaaaccatcaccagagaaggaaagagagctttgnnnnnnnnnngtacatagagggggaaaaaattccctgtccctcccgttccagggagagctggtcgctgagggaggaggaagagccacggcaagaaccctgccaggtctgtgctgggcacaaccaccaccacataaggcacccacggaaagtgcagctcagaaggcaggcgagagaaaggctgagggggagagaagagaggaggactaattcccctggaaggctccttgggcagcagatgaagcagctctgtggaaggttctgttgctgaagatgccctgggaaaactcctcctgggcctgctggaagctggcccctgtccgtcggtagagggagtgcacccgctgcaggaggaagactgagagcacggcacagagggtgaagaagccagccaccaccatcatgatgactgatatggccagggaatgattatccagtgtagacagggctgcaacttttttgtacaaagttttttattgggaaaaaagcattgctc

SEQ ID NO: 194750 - DNA, 1524 bp, Homo Sapiens; identical to SEQ ID NO: 188564
  misc_feature (446)..(488): n is a, c, g, or t

SEQ ID NO: 194751 - DNA, 2000 bp, Homo Sapiens; identical to SEQ ID NO: 181897
  misc_feature (1453)..(1510): n is a, c, g, or t

SEQ ID NO: 194752 - DNA, 828 bp, Homo Sapiens; identical to SEQ ID NO: 188570

SEQ ID NO: 194753 - DNA, 899 bp, Homo Sapiens
ttggctacgacgccggcgagcagtggccgttacggccgaaaagatggcggtcttggcacctctaattgctctcgtgtattcggtgccgcgactttcacgatggctcgcccaaccttactaccttctgtcggccctgctctctgctgccttcctactcgtgaggaaactgccgccgctctgccacggtctgcccacccaacgcgaagacggtaacccgtgtgactttgactggagagaagtggagatcctgatgtttctcagtgccattgtgatgatgaagaaccgcagatccatcactgtggagcaacatataggcaacattttcatgtttagtaaagtggccaacacaattcttttcttccgcttggatattcgcatgggcctactttacatcacactctgcatagtgttcctgatgacgtgcaaaccccccctatatatgggccctgagtatatcaagtacttcaatgataaaaccattgatgaggaactagaacgggacaagagggtcacttggattgtggagttctttgccaattggtctaatgactgccaatcatttgcccctatctatgctgacctctcccttaaatacaactgtacagggctaaattttgggaaggtggatgttggacgctatactgatgttagtacgcggtacaaagtgagcacatcacccctcaccaagcaactccctaccctgatcctgttccaaggtggcaaggaggcaatgcggcggccacagattgacaagaaaggacgggctgtctcatggaccttctctgaggagaatgtgatccgagaatttaacttaaatgagctataccagcgggccaagaaactatcaaatgctggagacaatatccctgaggagcagcctgtggcttcaacccccacca

SEQ ID NO: 194754 - DNA, 430 bp, Homo Sapiens
ctttgtacaaaaaagttggccaagatgtcgttcccaaagtataagccgtcgagcctgcgcactctgcctgagaccctcgacccagccgaatacaacatatctccggaaacccggcgggcgcaagccgagcggttggccataagagcccagctgaaacgagagtacctgcttcagtacaacgatcccaaccgccgagggctcatcgaaaatcctgccttgcttcgttgggcctatgcaagaacaataaatgtctatcctaatttcagacccactcctaaaaactcactcatgggagctctgtgtggatttgggcccctcatcttcatttattatattatcaaaactgatagggataggaaagaaaaactcatccccgaaggaaaattggatcgaacatttcacctctcatattaagtctggcaatgatgac

SEQ ID NO: 194755 - DNA, 1192 bp, Homo Sapiens; identical to SEQ ID NO: 181903

SEQ ID NO: 194756 - DNA, 241 bp, Homo Sapiens
ttggcgcccctttcatgaccttcaccgggaggctgaggtcggagtcccgattttctcctgctgctgtggcccggacatggcgactcccggccctgtgattccggaggtcccctttgaaccatcgaagcctccagtcattgaggggctgagccccactgtttacaggaatccagagagtttcaaggaaaagttcgttcgcaagacccgcgagaacccggtggtacccataagttgcctggcc

SEQ ID NO: 194757 - DNA, 1093 bp, Homo Sapiens; identical to SEQ ID NO: 188587

SEQ ID NO: 194758 - DNA, 1440 bp, Homo Sapiens; identical to SEQ ID NO: 188588
  misc_feature (877)..(918): n is a, c, g, or t

SEQ ID NO: 194759 - DNA, 432 bp, Homo Sapiens; identical to SEQ ID NO: 188592
  misc_feature (267)..(321): n is a, c, g, or t

SEQ ID NO: 194760 - DNA, 1509 bp, Homo Sapiens
ttggggagaggatcccggagccgcgtgatggccagaggcctgggggccccccactgggtggccgtgggactgctgacctgggcgaccttggggcttctggtggctggactcgggggtcatgacgacctgcacgacgatctgcaagaggacttccatggccacagccacaggcactcacatgaagatttccaccatggccacagccatgcccatggccatggccacactcacgagagcatctggcatggacatacccacgatcacgaccatggacattcacatgaggatttacaccatggccatagccatggctactcccatgagagcctctaccacagaggacatggacatgaccatgagcatagccatggaggctatggggagtctggggctccaggcatcaagcaggacctggatgctgtcactctctgggcttatgcactgggggccacagtgctgatctcagcagctccattttttgtcctcttccttatccccgtggagtcgaactctccccggcatcgctctctacttcagatcttgctcagttttgcttccggtgggctcctgggagatgctttcctgcacctcattcctcatgctcttgaacctcattctcaccacactctggagcaacccggacatggacactcccacagtggccagggccccattctgtctgtgggactgtgggttctcagtggaattgttgcctttcttgtcgtggagaaatttgtgagacatgtgaaaggaggacatggtcacagtcatggacatggacacgctcacagtcatacacgtggaagtcatggacatggaagacaagagcgttctaccaaggagaagcagagctcagaggaagaagaaaaggaaacaagaggggttcagaagaggcgaggagggagcacagtacccaaagatgggccagtgagacctcagaacgctgaagaagaaaaaagaggcttagacctgcgtgtgtcggggtacctgaatctggctgctgacttggcacacaacttcactgatggtctggccattggggcttcctttcgagggggccggggactagggatcctgaccacaatgactgtcctgctacatgaagtgccccacgaggtcggagactttgccatcttggtccagtctggctgcagcaaaaagcaggcgatgcgtctgcaactactgacagcagtaggggcactggcaggcacagcctgtgcccttctcactgaaggaggagcagtgggcagtgaaattgcaggtggtgcaggtcctggctgggtcctgccatttactgcaggtggctttatctacgtagcaacagtgtctgtgttgcccgagctgctgagggaggcatcaccattgcaatcacttctggaggtgctggggctgctggggggagttatcatgatggtgctgattgcccaccttgagtgaggggtggataaactacccctgccccaaacctctacccctaactccaggtcaggggtgcgtagaggttggggg

SEQ ID NO: 194761 - DNA, 1289 bp, Homo Sapiens; identical to SEQ ID NO: 188600
  misc_feature (304)..(336): n is a, c, g, or t
  misc_feature (532)..(550): n is a, c, g, or t

SEQ ID NO: 194762 - DNA, 932 bp, Homo Sapiens; identical to SEQ ID NO: 188602
  misc_feature (245)..(254): n is a, c, g, or t

SEQ ID NO: 194763 - DNA, 2354 bp, Homo Sapiens; identical to SEQ ID NO: 188606
  misc_feature (338)..(347): n is a, c, g, or t
  misc_feature (861)..(871): n is a, c, g, or t

SEQ ID NO: 194764 - DNA, 964 bp, Homo Sapiens
ttggggatgaccttgacccctcaggaacgagatggcggttctctggaggctgagtgccgtttgcggtgccctaggaggccgagctctgttgcttcgaactccagtggtcagacctgctcatatctcagcatttcttcaggaccgacctatcccagaatggtgtggagtgcagcacatacacttgtcaccgagccaccattctggctccaaggctgcatctctccactggactagcgagagggttgtcagtgttttgctcctgggtctgcttccggctgcttatttgaatccttgctctgcgatggactattccctggctgcagccctcactcttcatggtcactggggccttggacaagttgttactgactatgttcatggggatgccttgcagaaagctgccaaggcagggcttttggcactttcagctttaacctttgctgggctttgctatttcaactatcacgatgtgggcatctgcaaagctgttgccatgctgtggaagctctgacctttttgacttcatactttgaagaattgatgtatgcctctttgcctctgctttgtcatgccattaagctcacaataaggaagaaatatatctaagttgtgagactgagttctatattctggtgagttaatggggttgcctcccagcttcttataagactcacagtataactaaacatgatatatcagcttttgcctttcaatttatcaatctcttaaagagaatccaactttattacgattagtatatgatcaaacttccatatttgccttgggaataatggacaaagggaaatactcttatttcatgaataaaaacttttgcagaaaattagacagtgtttaattttcgaaaacttctctctctaaacagtagataccacctactgatggttacatatactagggaaattttaaaagttaggaaatgctgatagctcatattataaatttc

SEQ ID NO: 194765 - DNA, 1085 bp, Homo Sapiens
  misc_feature (898)..(918): n is a, c, g, or t
actttgtacaaaaaagttgggtcaaaggcaggatcaggttccccgccttccagtccaaaaatcccgccaagagagccccagagcagaggaaaatccaaagtggagagaggggaagaaagagaccagtgagtcatccgtccagaaggcggggagagcagcagcggcccaagcaggagctgcagcgagccgggtacctggactcagcggtagcaacctcgccccttgcaacaaaggcagactgagcgccagagaggacgtttccaactcaaaaatgcaggctcaacagtaccagcagcagcgtcgaaaatttgcagctgccttcttggcattcattttcatactggcagctgtggatactgctgaagcagggaagaaagagaaaccagaaaaaaaagtgaagaagtctgactgtggagaatggcagtggagtgtgtgtgtgcccaccagtggagactgtgggctgggcacacgggagggcactcggactggagctgagtgcaagcaaaccatgaagacccagagatgtaagatcccctgcaactggaagaagcaatttggcgcggagtgcaaataccagttccaggcctggggagaatgtgacctgaacacagccctgaagaccagaactggaagtctgaagcgagccctgcacaatgccgaatgccagaagactgtcaccatctccaagccctgtggcaaactgaccaagcccaaacctcaagcagaatctaagaagaagaaaaaggaaggcaagaaacaggagaagatgctggattaaaagatgtcacctgtggaacataaaaaggacatcagcaaacaggatcagttaactattgcatttatatgtaccgtaggctttgtattcaaaaattatctatagctaagtacacaataagcnnnnnnnnnnnnnnnnnnnnntttttgtagtagcgttttttaaatgtatactatagtaccagtaggggcttataataaaggactgtaatcttatttaggaagttgacttatagtacatgataaatgatagacaattgaggtaagtttttgaaattatgtgacattttacataaatttttttacatttt

SEQ ID NO: 194766 - DNA, 1859 bp, Homo Sapiens; identical to SEQ ID NO: 188626
  misc_feature (1591)..(1636): n is a, c, g, or t

SEQ ID NO: 194767 - DNA, 915 bp, Homo Sapiens
ttggcgcagagccggaaagaagtgctgtaagggacgctcgggggacgctgttcctgaggtgtcgccgcctccctgtcctcgccctccgcggtgggggagaaacccaggagcgaagcccagagcccgcggcgcggccggcggacgaacgagcgcgcagcagccggtgcgcggccgcggcgagggcgggggaagaaaaacaccctgtttcctctccggcccccaccgcggatcatgtaccaggattatcccgggaactttgacacctcgtcccggggcagcagcggctctcctgcgcacgccgagtcctactccagcggcggcggcggccagcagaaattccgggtagatatgcctggctcaggcagtgcattcatccccaccatcaacgccatcacgaccagccaggacctgcagtggatggtgcagcccacagtgatcacctccatgtccaacccataccctcgctcgcacccctacagccccctgccgggcctggcctctgtccctggacacatggccctcccaagacctggcgtgatcaagaccattggcaccaccgtgggccgcaggaggagagatgagcagctgtctcctgaagaggaggagaagcgtcgcatccggcgggagaggaacaagctggctgcagccaagtgccggaaccgacgccgggagctgacagagaagctgcacgcggagacagaggagctggaggaggagaagtcatgcctgcagaagagattgctgagctgcagaaggagaagagaagctggagttcatgttggtggctcacggcccagtgtgcaagattagccccgaggagcgccgatcgcccccagcccctgggctgcagcccatgcgcagtgggggtggccttgtgggcgctgtagtgggaaacaggaaccccctggaagagga

SEQ ID NO: 194768 - DNA, 516 bp, Homo Sapiens
ttggggccgagctggttggtggcggcggtcgtgcggacgcaaacatgcagatctttgtgaagaccctcactggcaaaaccatcacccttgaggtcgagcccagtgacaccattgagaatgtcaaagccaaaattcaagacaaggagggtatcccacctgaccagcagcgtctgatatttgccggcaaacagctggaggatggccgcactctctcagactacaacatccagaaagagtccaccctgcacctggtgttgcgcctgcgaggtggcattattgagccttctctccgccagcttgcccagaaatacaactgcgacaagatgatctgccgcaagtgctatgctcgccttcaccctcgtgctgtcaactgccgcaagaagaagtgtggtcacaccaacaacctgcgtcccaagaagaaggtcaaataaggtggttctttccttgaagggcagcctcctgcccaggccccgtggccctggagcctcagtaaagtgtccctttcattgactggag

SEQ ID NO: 194769 - DNA, 1467 bp, Homo Sapiens; identical to SEQ ID NO: 188639
  misc_feature (584)..(634): n is a, c, g, or t

SEQ ID NO: 194770 - DNA, 2402 bp, Homo Sapiens; identical to SEQ ID NO: 188640

SEQ ID NO: 194771 - DNA, 1733 bp, Homo Sapiens; identical to SEQ ID NO: 181928

SEQ ID NO: 194772 - DNA, 1596 bp, Homo Sapiens; identical to SEQ ID NO: 188642

SEQ ID NO: 194773 - DNA, 1401 bp, Homo Sapiens
  misc_feature (1113)..(1184): n is a, c, g, or t
ttggctcttccaatcaggccctgctgaggcaggggacctctgcccgagacctgctcagagagatggcccgggacaagccacgcctcctagctgccctggaagtggcttcagctgccatggccaagcggagcccccgggccggaggcgggagctgcttcacactgaggttcagaacctcatggcccgagctgaatacttgaaggagcagatgagggaatctcgctgggaagctgacaccctggacaaagagggactgtcggaatctgttcgtagctcttgcacccttcagtgaccctagaagaatgattggacagatgtgagccatctggagcagaggggcactaacccaggctgacgccaagaatgaagtggcccactgcagccctggcgagcaggcttcttggatggacagtgctgagacccccatatcccagagtccccagcctccctcaggttactctgcaccccacagatggtttgatggctgtgctgtatactggaggggagggcaggactctgggagaacagcacttctttcatgagacctttgttactcggtggttactgggtcctgtgcctgtccgttttggggcatgcagccctctatcatttttggctccgagaagagggcaaggggcccccgcagggtacttctgtgcttgccctcgccctgccagcaggcagctgtgcccctggcctgcccttcccgggaccccttattccaactcagctcctctttgcactggaatggggcactccaacacccctcagggaccaccctccccacagtatgcactcagcccaacagaacccaccagtctttctgggaactcacacctgcccgccatcttggtactttaggttaatccctcaagcatgaaagctggatcttttggggtttaagaagcccaagccttgttcctgccctggcctagggagcactcaggagggttccttggtcctcatctctcccacctccgttccctctgggccccacactagccacagcgcgggccttgtgctggagtttgagcctgggacagggagagggaggcttggagacagtctgacccagtgccctctaggccacccacttctaggcctgccctgccnnnnnnnnnnnnnnnnnnnnnnnnnnnnnnnnnnnnnnnnnnnnnnnnnnnnnnnnnnnnnnnnnnnnnnnnccttcacagcccacagcatgggcacttatgaggacaaagtgaatttaacctggaaaagaatgtatttgagagtttcttttaaataatcagcgggtgttggtgatttgtagcccttctgcccttaaatgcttccttgggcaagagctgtctgtcctccctgcaggaggctgagtgtgaagagtatcattcattgtttctctattaaattattttctct

SEQ ID NO: 194774 - DNA, 631 bp, Homo Sapiens
  misc_feature (46)..(67): n is a, c, g, or t
ttggattattattattgctgccaagagggtctgatggcacgttgtnnnnnnnnnnnnnnnnnnnnnnaagtgctctaacttttcttaaggttttgttgctagcccttcaagtgcactgagctatgtgactcggatggtctttcacacggcacatttggacatttccagaactaccatgagatggtttagacgggaattcatgcaaatgaggggtcaaaaatggtatagtgaccccgtccacgtcctccaagctcacgaccttggagccccgtggagctggactgaggaggaggctgcacagcgggagagcagctggtccagaccagccctgcagcccccactcagccggcagccagatggccccgcaaggcctccagggatggcccctagccacaggccctggctgaggtctctgggtcggtcagtgacatgtaggtaggaagcactgaaaatagtgttcccagagcactttgcaactccctgggtaagagggacgacacctctggtttttcaataccaattacatggaacttttctgtaatgggtacaatgaagaagtttctaaaaacacacacaaagcacattgggccaactatttagtaagcccggatagacttattgccaaaaacaa

SEQ ID NO: 194775 - DNA, 1550 bp, Homo Sapiens; identical to SEQ ID NO: 188647
  misc_feature (469)..(479): n is a, c, g, or t
  misc_feature (1019)..(1040): n is a, c, g, or t

SEQ ID NO: 194776 - DNA, 924 bp, Homo Sapiens; identical to SEQ ID NO: 188652

SEQ ID NO: 194777 - DNA, 1094 bp, Homo Sapiens; identical to SEQ ID NO: 188654
  misc_feature (813)..(821): n is a, c, g, or t

SEQ ID NO: 194778 - DNA, 957 bp, Homo Sapiens
actttgtacaaaaaagttgggtcctttacgagaaggagcagaaggggcccgtgaccgccctgtgccactgcaatggccacctggtgtcggccatcggccagaagattttcctgtggagcctgcgggccagcgagctgacgggcatggccttcatcgacacgcagctctacatacaccagatgatcagcgtcaagaacttcatcctggcagccgacgtcatgaagagcatttcgctgctgcgctaccaggaggaaagcaagacgctgagcctggtgtcgcgggatgccaagcccctggaggtgtacagcgtggacttcatggtggacaatgcccagctgggttttctggtgtctgaccgcgaccgcaacctcatggtgtacatgtacctgcccgaagccaaggagagtttcgggggcatgcgcctgctgcgtcgggcagacttccacgtgggtgcccacgtgaacacgttctggaggaccccgtgccggggggccactgaagggctcagcaaaaagtcggtcgtgtgggagaataagcacatcacgtggtttgccaccctggacggcggcatcgggctgctgctgcccatgcaggagaagacctaccggcggctgctgatgctgcagaacgcgctgaccaccatgctgccacaccacgccggcctcaacccccgcgccttccggatgctgcacgtggaccgccgcaccctccagaatgccgtgcgcaacgtgctggatggggagctgctcaaccgctacctgtacctgagcaccatggagcgcagcgagctagcccaagaagatcggcaccacaccagacataatcctggacgacttgctggagacggaccgcgtcaccgcccacttctagccccgtggatgccgtcaccaccagcacacggaactacctcccaccccctttttgtacaaaacacaaggaaaaacatttttttgcttg

SEQ ID NO: 194779 - DNA, 853 bp, Homo Sapiens; identical to SEQ ID NO: 188656

SEQ ID NO: 194780 - DNA, 1955 bp, Homo Sapiens; identical to SEQ ID NO: 188657

SEQ ID NO: 194781 - DNA, 886 bp, Homo Sapiens
ctttgtaaaaaagttgggagcccaccccgtccccgcaggcctatgggggaacccccaatccccaaacacctggctacccagacccctcgtccccacaggtcaacccacaatacaacccgcagacgccagggacgccggccatgtacaacacagaccagttctctccctatgctgccccctccccacaaggttcctaccagcccagccccagcccccagagctaccaccaggtggcgccaagcccagcaggctaccagaatacccactccccagccagctaccaccctacaccgtcgcccatggcctatcaggctagccccagcccgagccccgttggttacagtcctatgacacctggagctccctcccctggtggctacaacccacacacgccaggctcaggcatcgagcagaactccagcgactgggtaaccactgacattcaggtgaaggtgcgggacacctacctggatacacaggtggtgggacagacaggtgtcatccgcagtgtcacggggggcatgtgctctgtgtacctgaaggacagtgagaaggttgtcagcatttccagtgagcacctggagcctatcacccccaccaagaacaacaaggtgaaagtgatcctgggcgaggatcgggaagccacgggcgtcctactgagcattgatggtgaggatggcattgtccgtatggaccttgatgagcagctcaagatcctcaacctccgcttcctggggaagctcctggaagcctgaaagcaggcagggccggtggacttcgtcggatgaagagtgatcctcctttctttccctggcccttggctgtgacaaagatcctcctgcaaggctaggcggaattgttctggatttcttttgtttttccttta

SEQ ID NO: 194782 - DNA, 815 bp, Homo Sapiens; identical to SEQ ID NO: 188666
  misc_feature (355)..(365): n is a, c, g, or t

SEQ ID NO: 194783 - DNA, 1266 bp, Homo Sapiens; identical to SEQ ID NO: 188668

SEQ ID NO: 194784 - DNA, 1506 bp, Homo Sapiens
ctttgtacaaaaaagttggcacaaagattggtggggatcagtcagcctcggaaccccttggaagagctcaggcctagccctaggggtcaaaatgtggggcctgggccccctgcccagacagaggctccagggaccatagagtttgtggctgaccctgcagccctggccaccatcctgtcaggtgagggtgtgaagagctgtcacctggggcgccagcctagtctggctaaaagagtactggttcgaggaagtcagggaggcaccacccagagggtccagggtgttcgggcctctgcatatttggcccccagaacccccacccaccgactggaccctgccagggcttcctgcttctctaggctggagggaccaggacctcgaggccggacattgtgcccccagaggctacaggctctgatttcaccttcaggaccttcctttcacccttccactcgccccagtttccaggagctaagaagggagacagctggcagcagccggacttcagtgagccaggcctcaggattgctcctggagaccccagtccagcctgctttctctcttcctaaaggagaacgcgaggttgtcactcactcagatgaaggaggtgtggcctctcttggtctggcccagcgagtaccattaagagaaaaccgagaaatgtcacataccagggacagccatgactcccacctgatgccctcccctgcccctgtggcccagcccttgcctggccatgtggtgccatgtccatcaccctttggacgggctcagcgtgtaccctccccaggccctccaactctgacctcatattcagtgttgcggcgtctcaccgttcaacctaaaacccggttcacacccatgccatcaacccccagagttcagcaggcccagtggctgcgtggtgtctcccctcagtcctgctctgaagatcctgccctgccctgggagcaggttgccgtccggttgtttgaccaggagagttgtataaggtcactggagggttctgggaaaccaccggtggccactccttctggaccccactctaacagaacccccagcctccaggaggtgaagattcaacgcatcggtatcctgcaacagctgttgagacaggaagtagaggggctggtagggggccagtgtgtccctcttaatggaggctcttctctggatatggttgaacttcagcccctgctgactgagatttctagaactctgaatgccacagagcataactctgggacttcccaccttcctggactgttaaaacactcagggctgccaaagctctgtcttccagaggagtgcggggaaccacagctctgcctctccggcagagcctgggctcccagaggccttctgtaggagtgagcctgagataccagagctctctctccaggaacagcttgaagtaccagagccctactctccagcagacctaggtctctagagtcctgctgtaggagtgagcctgagataccggagtcctctcgccaggaacag

SEQ ID NO: 194785 - DNA, 1122 bp, Homo Sapiens
ttgtacaaaaaagttggccaaaaaggtttgactggcctccagattccagttatttttaaaaagcaacttaccactaaatccttgagtctccatagagtaacagtaaagaaactgatgtaacagactctcctctcaaaggatctcctctggaagagactatcagcggcagcattctccagggaagacccatcccctagtgccagagcttgcatcctggagactaaagattgcacttttttgtagttttttgtccaaatgcaatcccatttctgtgcctcttagcatgcagttagatttggacaaacaagattcctaaggaatgactttattaactataatatggttacagctattatataaatatatattctggttatagttctaatatggagatgttgtgtgcaatgctggcctgtggtggtctgtgtaatgctttaacttgtatggaggaggccaggctcagagctgagatgtggcctgaaccttccctgtatcgatcctttaatttagaactgtcaagatgtcactttctccccctctgccttttagtggtatctgacatatactcaaaacagtaatttcctggtcacatcattaactgctaattctgtatttataaagaattttcagatggacatgtacaaatttgaactcaaaccatccccagtccagatacagggcagcgtgtaggtgaccacaccagagcctcagcctcggtccttctcagccgtcgggataggatccaggcatttcttttaaatctcagaggtagcagtaaacttttcagtattgctgttagcaagtgtgtgtttgccaatagatacccattatactaatgtgccaagtaaatgttcattgcacatctgcttccactgtgttcccacgggtgccatgaagtgtgtgaggagcccctcatctggagggatgagtgctgcgttgactactgctatcaggattgtgttgtgtggaatattcatctacataaattttatatgcacagtaatttccctttttatatgtcaagtaactatttgtaaaagttatactcacaaattattataatgattactaatatattttttccatgtttcattgcctgaataaaaactgtttaccactgtt

SEQ ID NO: 194786 - DNA, 2025 bp, Homo Sapiens; identical to SEQ ID NO: 181950
  misc_feature (214)..(270): n is a, c, g, or t
  misc_feature (284)..(333): n is a, c, g, or t
  misc_feature (351)..(413): n is a, c, g, or t
  misc_feature (416)..(435): n is a, c, g, or t
  misc_feature (446)..(520): n is a, c, g, or t
  misc_feature (772)..(918): n is a, c, g, or t
  misc_feature (1262)..(1545): n is a, c, g, or t

SEQ ID NO: 194787 - DNA, 1731 bp, Homo Sapiens; identical to SEQ ID NO: 188698

SEQ ID NO: 194788 - DNA, 886 bp, Homo Sapiens; identical to SEQ ID NO: 188708

SEQ ID NO: 194789 - DNA, 1283 bp, Homo Sapiens
  misc_feature (1000)..(1016): n is a, c, g, or t
  misc_feature (1155)..(1164): n is a, c, g, or t
ttggcttagctgttaactgcttaactcactgctgagtacatattgaacgtgcaatatatattttatttctggttgtctttatggcacattttgttgggaggcaggtgtttcatttgcatttggttgtatgtgtgttctcttgttcatacaagggtcttacaagactaaatgttatttaatgtgagaattttgaactttcatcagtactcatagggcctttcattttgtagacatcttcatttgattgtacaccatctcccagcaagacaccagttgaaaaccccttgaatattatgttgaacattgtcaaaaacgaattgcaggaaccctgtgacagtcccaaagttaaggaagaacgaattgatacaccaccagcttgtacagaggaaagcatagcaacaccctctgaaattaaaacagaaaatgacacagtcgagtcagtttaaataaaatgagaaaggtatgtttttcttttttaaaaaagctgctgttggatctagaaggtgaagaatttttttatgtatatatagacatatctatataaattgtctggctgaggcagggccttcagctatcatttggttaataaatacattttagtatttgcatttcctactgcctgcagagtttcaggtgcttgttgtgtgaaagttctgtagatgtgtgcaaatttaacgaaatgaaattgtatgtgtaaaaatgtacgatttttcactgtgcaactgtaaattataaataaaaaatatttttgctattcatggagtgtaatatttatgcacaccatcaaatagtttctgtactttttattgggtaaaaatggaattgaacagcaacctcaacataagattttttttctagtagcctcccactgattaaagaagcaagtttgaggtttcatccttcaaaagggggttccgagagagcaccgtagggcttttctcaaatagaaaagccagattttgaaaaaattttaaagataaaataggacatattttgcagnnnnnnnnnnnnnnnnncacaaacacatctccaggtatagagaaccatccagatgttcacttttgaaaatatctaatgatgcaaagttttattcttgaacttggacactgatgccatcaaacaattaacaaatatatttaagtactaaaaggtgannnnnnnnnnaaagactttttcaaatttgtcaaatgatttaatgcaggatgaacatatttctattttaaagtaaacgggaatctgtaagaaatgtttgctttgaggatatggttaactttttttctttt

SEQ ID NO: 194790 - DNA, 1258 bp, Homo Sapiens; identical to SEQ ID NO: 181976
  misc_feature (215)..(224): n is a, c, g, or t
  misc_feature (278)..(288): n is a, c, g, or t
  misc_feature (1085)..(1106): n is a, c, g, or t

SEQ ID NO: 194791 - DNA, 1079 bp, Homo Sapiens; identical to SEQ ID NO: 188729

SEQ ID NO: 194792 - DNA, 971 bp, Homo Sapiens
actttgtacaaaaaagttgggggaaaaagcacctgctttcctgatctgcaacttggctggatgctaagatgtcagtggacatgaatagccaggggtctgacagcaatgaagaggactatgacccaaattgtgaggaagaggaagaagaagaagaagacgaccctggggacatagaggactattacgtgggagtagccagcgatgtggagcagcagggggctgatgcctttgatcccgaggagtaccagttcacttgcttgacctacaaggaatctgagggtgccctcaatgagcacatgaccagcttagcttctgtcctaaaggtgagcagtgttgtaaactccagtgtaatcccccccagttaaatctaaggatgagctgttgttaattaatgtctcctccagactaattgaatggccttgtagcttgaaaccaaatttaagtgtatgtcaacatcatttggacattttgttacatttactttgttttctaatatatgcatgtctaaggtcctcagattcccaaattagtaagaattagaaagtaggggtgggacagattcaagaaagatgtaccataccagaaatgtgtagtagcagaattgcacaactttgcacgtttcaggaagtgagttttcagaattttatgaggttgatacaataagcatcagaatcaccatcttctgtacgactgtgagtgactgataaatgtcttgagagtatacagatccctctggtttgccctgaatagtcattgcctttgggctaatgagctcatttgtttcatgtactgattttaataataattctttcttatgcttgtatttcattgatttagggggtgttagtatggaaattgtaaaagaatgaacaaagttgattaccccatcagcaagcaattttatttaccacataagctaaaacataccttttggatgtcttgtaccttaaggccagtttattatcctattt

SEQ ID NO: 194793 - DNA, 1266 bp, Homo Sapiens; identical to SEQ ID NO: 188748
  misc_feature (224)..(232): n is a, c, g, or t
  misc_feature (1192)..(1209): n is a, c, g, or t

SEQ ID NO: 194794 - DNA, 969 bp, Homo Sapiens; identical to SEQ ID NO: 188749

SEQ ID NO: 194795 - DNA, 843 bp, Homo Sapiens
tttgtacaaaaaagttggccatgatgaaacagaaatacaaaaccaaactgacttactgagtcttagtggaaaaacactttgtgtgactgcaggatcggctccctctctgatcaacagttctagtactcttctttgtcagtatatcaacctacagctcctgaatgcaaagccacaagagtgtttaatggggacagtgggcactctcctgcttgaaaacccacttgggcagaatggactcacccaccaaggtcttctgtatgaagcagccaaggtgtttggccttcggagcaggaagctaaagctgtttctgaatgagacccaaacgcaggaaattacagaagacatccccgtgaagactttgaatatgaagactgtgtatgtttctgtgttaccaacaacagcagacttctagcatgtacttatcaatgttgttcggtcagcccttccctaattacacctatcccctacacatacatgcacatagacacacacatgaacacactgaagatatttccttcaggtgtgtgtaaaatatgctgcttggattgaaattcaaatgggattgattagtcaagtaacttgagacctcacagtaatcttcacacttaaccttagacacctatgcagtcatgttgggagcaggttacaatgttacttcagcccacagtttatttctatacttgagttcttaagtacagaagatagaagtgatttaaatggcatagtatatatatcattttctggccttttaaaatttatttgagacctcttgatgaaatggacatattatatatttctgccacctggattttcctggataatttgatgggaatattttaagtt

SEQ ID NO: 194796 - DNA, 315 bp, Homo Sapiens
gattagtcaacttttcaaaggggtcctcacagtaatcttcacacttaaccttagacacctatgcagtcatgttgggagcaggttacaatgttacttcagcccacagtttatttctatacttgagttcttaagtacagaagatagaagtgatttaaatggcatagtatatatatcattttctggccttttaaaatttatttgagacctcttgatgaaatggacatattatatatttctgccacctggattttcctggataatttgatggaatattttaagtttcagtaaatcagaacaatattcaaattcagatat

SEQ ID NO: 194797 - DNA, 1326 bp, Homo Sapiens; identical to SEQ ID NO: 181989
  misc_feature (315)..(323): n is a, c, g, or t
  misc_feature (855)..(865): n is a, c, g, or t

SEQ ID NO: 194798 - DNA, 1218 bp, Homo Sapiens; identical to SEQ ID NO: 188758

SEQ ID NO: 194799 - DNA, 771 bp, Homo Sapiens
tttgtacaaaaaagttggcacactcaaaagcaaagcattctcttcccagtgcctatcggacagtgcggcggtcgaggtcccgctcccggtcccctcggaggagagcccactcccctgagagacggagggaagagaggagtgtgcccactgcctaccgcgtgagccgcagccctggggccagcaggaagcggacccgctccagaagtccccacgagaagaagaagaagaggcggtcccggtcgcggaccaagtccaaggccaggtctcagtcggtgtcacccagcaagcaggcagcgccccggcccgcggcccccgcggcccactcggcgcactcagccagcgtctcccctgtggagagtcggggctccagccaggagcgctccaggggagtctctcaggaaaaagaagcccagatctcttcagcaatcgtttcttccgtgcagagcaaaatcactcaggatctcatggccaaagtcagagcgatgcttgcagcttccaaaaacctgcaaaccagcgcttcctgagacggggccagcggaggcaaagccgggaggctgcgtgggcttctgggcaggctcacgcagacgccggccacaccatccacctggccgcctccatggacccttggtggcttttgtaaattaatttttgatgacattttgagttttaagatttctgaccagcagtctcttacctgtatatttgtaaatatatcatgtttctgtgaaaatgtattatgaaataaaatgggaggaaacaccttttctagct

SEQ ID NO: 194800 - DNA, 995 bp, Homo Sapiens
  misc_feature (79)..(119): n is a, c, g, or t
  misc_feature (847)..(863): n is a, c, g, or t
ggttagggcttttttcgttgcatgtgatggttctgtggacatatgatccccacaaactgtgggagtgattggccaggcnnnnnnnnnnnnnnnnnnnnnnnnnnnnnnnnnnnnnnnnnaagaatagagtggtatttagaaaataaattgcattgcaaagctcttatcggctcatatgagagagcaggttcctgcccttgaaaatgccggtaagctatagcatatgttttttaagacttaagcatttcatgctttaaaataccttcacaagtgaacattacacacagaagttcatttggttttcctttgttttatggtgcatatagcaataaagacccccctccaccctgcaacccccatcccccaccgggcctttgtccctgccttggcttttctccccttctcattctcctctcccctttcctcactgaaggctgtgagttgctttcaatgtgacaacactatgatgtcatttggaaggatttgccaggacagactgattctgagtcctgggtgccgtatgtgtatgcggcagtgttgtcaggcgatcttgtttgaagctctatgttgccataattaccatcaagtacacactgttggcaaaaggctaacacctgactttagaaaatgctgatttgagaacaaaaggaaaggtcttttttcactgcttaaagtggggtcactttgatacctttgcggtcatgtctgtgtctgatgagtgtagaatctctggatgtgcactgtcagtcatgtgtccaccaggcctcgaatatcatatgggaaatgtcatagttaaaaacgtacagccaggcccgtgtgctgttaatagtgtgaaattgtcatgttnnnnnnnnnnnnnnnnncaggaaccaaatgtgaccttgtgcatatattgggtagctgaaaatcttcaaggctactgatgggtggccccttaatcttgtctttgattgctgtgtgcagggaaaggtgtccccgtttgttcatgctgtttt

SEQ ID NO: 194801 - DNA, 778 bp, Homo Sapiens; identical to SEQ ID NO: 181997

SEQ ID NO: 194802 - DNA, 789 bp, Homo Sapiens
actttgtacaaaaaagttggataaatagacctctcacgatcctgtaactgccaaacccaagttggttggagatgtggattttgaaggagtcagacaaaaagctgggtatatcactccagttcctggaggtgttggccccatgacagtggcaatgctaatgaagaataccattattgctgcaaaaaaggtgctgaggcttgaagagcgagaagtgctgaagtctaaagagcttggggtagccactaattaactactgtgtcttctgtgtcacaaacagcactccaggccagctcaagaagcaaagcaggccaatagaaatgcaatatttttaatttattctactgaaatggtttaaaatgatgccttgtatttattgaaagcttaaatgggtgggtgtttctgcacatacctctgcagtacctcaccagggagcattccagtatcatgcagggtcctgtgatctagccaggagcagccattaacctagtgattaatatgggagacattaccatatggaggatggatgcttcactttgtcaagcacctcagttacacattcgccttttctaggattgcatttcccaagtgctattgcaataacagttgatactcattttaggtaccaaaccttttgagttcaactgatcaaaccaaaggaaaagtgttgctagagaaaattggggaaaaggtgaaaaagaaaaaatggtagtaattgagcagaaaaaaattaatttatatatgtattgattggcaaccagatttatctaagtagaactgaattggctagga

SEQ ID NO: 194803 - DNA, 935 bp, Homo Sapiens
  misc_feature (190)..(245): n is a, c, g, or t
ttgggtgattaatatgggagacattaccatatggaggatggatgcttcactttgtcaagcacctcagttacacattcgccttttctaggattgcatttcccaagtgctattgcaataacagttgatactcattttaggtaccaaaccttttgagttcaactgatcaaaccaaaggaaaagtgttgctagnnnnnnnnnnnnnnnnnnnnnnnnnnnnnnnnnnnnnnnnnnnnnnnnnnnnnnnnttaatttatatatgtattgattggcaaccagatttatctaagtagaactgaattggctaggaaaaaagaaaaactgcatgttaatcattttcctaagctgtccttttgaggcttagtcagtttattgggaaaatgtttaggattattccttgctattagtactcattttatgtatgttacccttcagtaagttctccccattttagttttctaggactgaaaggattcttttctacattatacatgtgtgttgtcatatttggcttttgctatatactttaacttcattgttaaatttttgtattgtatagtttctttggtgtatcttaaaacctatttttgaaaaacaaacttggcttgataatcatttgggcagcttgggtaagtacgcaacttacttttccaccaaagaactgtcagcagctgcctgcttttctgtgatgtatgtatcctgttgacttttccagaaattttttaagagtttgagttactattgaatttaatcagactttctgattaaagggttttctttcttttttaataaaacacatctgtctggtatggtatgaatttctgaaattctgtcttcctatgactcctagttgtgacctaaccagtttttttctcatttaatcaatgtagctattcctatattcagtaacacttacttctatagccttaaatagataa

SEQ ID NO: 194804 - DNA, 1140 bp, Homo Sapiens; identical to SEQ ID NO: 188780

SEQ ID NO: 194805 - DNA, 1047 bp, Homo Sapiens; identical to SEQ ID NO: 188786

SEQ ID NO: 194806 - DNA, 813 bp, Homo Sapiens
ctttgtacaaaaaagttggctcagattcctgcttttctcaccccgtccccatgctggtgtccgacgccgcttactcagagccctggcctccctccccctacctcacacgctgctcatgaaagtttccacccacgctgtctccacggaacagcctccgtctgctggctcttcgtggaaggccatttgtctttcaggtagacactcagcagccctcacggtcttagtgacgtgtgtgcctttctggtcacacagctgcccagtttcctgatcggggtggatttgtgtcccctaaggggtaaaacagccgtttaccgcagatcctctcattgtgcttttctagaataacacccttctaggggaggcgggtgggggagggagggatcataaccccttctgtgccttgggatgccggagctgggggacctggaggcccatcagccggagccacgtgaaaggtactgaagaaagctgagacccggctgtgaggagcgcctcagcggtgaggtggtttagggataaatgtttctggaaccctgtggtcccccataatgttgatagaatatcatatgcactgggagttaaatatatttaatttaatgatcattatatatgtgggggttaatatgttgtttttctgtccctttaaagtctttacatgtaattgtagctgtataatcgttatttttcttttgcatcttaagtcttagaaattaagatattccatcgtgaggatgagagaggtccctcagtgtgtttttggtctggtttgtagggaaaggactcaagtcctggaatgtccttccactggtctac

SEQ ID NO: 194807 - DNA, 908 bp, Homo Sapiens; identical to SEQ ID NO: 188789

SEQ ID NO: 194808 - DNA, 1071 bp, Homo Sapiens; identical to SEQ ID NO: 182010
  misc_feature (428)..(443): n is a, c, g, or t
  misc_feature (716)..(725): n is a, c, g, or t

SEQ ID NO: 194809 - DNA, 1051 bp, Homo Sapiens
ttggccaagagtctaggtaagagtttgttcccgtggtgcggagggtcaaggcccacacccggaaacctagcgaggtaaagttgcgtcttggttgtagagacgacaacttctccgcttcctcggcgatggcggcgtccgggagcggtatggcccagaaaacctgggaactggccaacaacatgcaggaagctcagagtatcgatgaaatctacaaatacgacaagaaacagcagcaagaaatcctggcggcgaagccctggactaaggatcaccattactttaagtactgcaaaatctcagcattggctctgctgaagatggtgatgcatgccagatcgggaggcaacttggaagtgatgggtctgatgctaggaaaggtggatggtgaaaccatgatcattatggacagttttgctttgcctgtggagggcactgaaacccgagtaaatgctcaggctgctgcatatgaatacatggctgcatacatagaaaatgcaaaacaggttggccgccttgaaaatgcaatcgggtggtatcatagccaccctggctatggctgctggctttctgggattgatgttagtactcagatgctcaatcagcagttccaggaaccatttgtagcagtggtgattgatccaacaagaacaatatccgcagggaaagtgaatcttggcgcctttaggacatacccaaagggctacaaacctcctgatgaaggaccttctgagtaccagactattccacttaataaaatagaagattttggtgtacactgcaaacaatattatgccttagaagtctcatatttcaaatcctctttggatcgcaaattgcttgagctgttgtggaataaatactgggtgaatacgttgagttcttctagcttgcttactaatgcagactataccactggtcagggtctttgatttgtctgaaaagttagagcagtcagaagcccagctgggacgagggagttcatgttgggtttagaaacgcatgaccgaaaatcagaagacaaacttgccaaagctacagagacagctgtaaa

SEQ ID NO: 194810 - DNA, 165 bp, Homo Sapiens; identical to SEQ ID NO: 182014

SEQ ID NO: 194811 - DNA, 888 bp, Homo Sapiens
ttggggcgctgaggctgctggaggcgcgggccgggcggtgcgcactgcgggcgcatccctgccccggcgccgtccgtgcccgcgggacctgacagccgggtcagagggcgaagctgtgctcaggcccgggctggacgcagagccagagctgtccccagaggagcagagggtcctggaaaggaagctgaaaaaggaacggaagaaagaggagaggcagcgtctgcgggaggcaggccttgtggcccagcacccgcctgccaggcgctcgggggccgaactggccctggactacctctgcagatgggcccaaaagcacaagaactggaggtttcagaagacgaggcagacgtggctcctgctgcacatgtatgacagtgacaaggttcccgatgagcacttctccaccctgctggcctacctggaggggctgcagggccgggcccgagagctgacggtgcagaaggcggaagccctgatgcgggagctggatgaggagggctctgatccccccctgccggggagggcccagcgcatccgacaggtgctgcagctgctctcctagtgggttcagcgcggggcggggccgctgcccagtgcagggctgcctcagaccacacagggtgcagctcctccggcggtgggggccgggttcaccagcagggcagcggctgagcaagggctttcagctcctccggtggtgggggccgggatcaccagcaccagagcctcgcaagggccccttccctcctccagaccctccttggccggtgacggctgtgacagtgatggcaggttcagtgccttcagcgcagagcgtggatgctctggaatcacccggacccctggcccttggagggaccctccagccccaggaatctgctttggagg

SEQ ID NO: 194812 - DNA, 1201 bp, Homo Sapiens; identical to SEQ ID NO: 188802

SEQ ID NO: 194813 - DNA, 790 bp, Homo Sapiens; identical to SEQ ID NO: 188803

SEQ ID NO: 194814 - DNA, 1496 bp, Homo Sapiens; identical to SEQ ID NO: 188805
  misc_feature (770)..(794): n is a, c, g, or t
  misc_feature (1132)..(1142): n is a, c, g, or t

SEQ ID NO: 194815 - DNA, 1977 bp, Homo Sapiens; identical to SEQ ID NO: 182023
  misc_feature (255)..(265): n is a, c, g, or t

SEQ ID NO: 194816 - DNA, 1422 bp, Homo Sapiens; identical to SEQ ID NO: 188830
  misc_feature (662)..(672): n is a, c, g, or t
  misc_feature (907)..(940): n is a, c, g, or t
  misc_feature (945)..(1078): n is a, c, g, or t
  misc_feature (1108)..(1245): n is a, c, g, or t

SEQ ID NO: 194817 - DNA, 1618 bp, Homo Sapiens; identical to SEQ ID NO: 188833

SEQ ID NO: 194818 - DNA, 1205 bp, Homo Sapiens
gggggtgggcagggagggtcctgaacacatgtgggctgctgggctgctgggccggggtgcctacactgtaactagcagcatagtgcttaactagttaacaagaaatgctgcttccctttgaattgtttcgggggtgtagaaattgcacttatttctatgaaccccatggagggatgcccacagctgagcctccaggcgaggcatggcaggtcagtgcctggccgctgagcatccacgggccacagggcgggatcctcccggcccccagggactgcagcctctgcggccacgggtgcagcgaggaccggaacccacagggggaacctgagcaacgtctgaggtgccctgaagtggctccaggcgagaccggagccacacagtcccggggagcacgaggcggcccagccccaggtcccggtgcagagggagtggcctgatggtgactgggcggaggcctctgcccctcacaggacgtcgtcaaagtccagcagcttcgagtgctggcggctcttccacaggcgatacaaccggaagtcaaagtacgtctcgatcatctgcttcccttgggctgagagctccaggggtgactcgaaggtgaccctataaggagtcatgagggtcctgaggttctggaacagcttctctccattggggttccccagaatgtagcagcccatgatgtggatgacgttcggctctgggttcactttgctcatcaggcggctcagccgcttccagaagtgaatcatgtcctcttccttctccactttggcaaaggtggccaccttgttcttgaggagatagaggtgtccaggacctccctggcagaaaatcagcattttccagatcttggctcccttgtggtagacgttcagcttcctctctatctcctcaaggatgtcctcgaaggttgcgtgctcatggtcgtagaggatggggatgatggaggggtcatcccggcggatgatagtggggatgtactcagccttgggcaccttggaggaaatgagcatgacctttggtggcacgaagccttcggtgtcgcaggccacagcctccaggcccttctcagtgtcccagtccaggtcctcgaaggcctcgtccagcgtgcagtgggagctctgcaggtcactgctgtctcgggagtcgtgggaagtgccaacttttttgtacaaagttggccattataggaaaagcattgctca

SEQ ID NO: 194819 - DNA, 1644 bp, Homo Sapiens; identical to SEQ ID NO: 188839

SEQ ID NO: 194820 - DNA, 644 bp, Homo Sapiens; identical to SEQ ID NO: 182040

SEQ ID NO: 194821 - DNA, 1509 bp, Homo Sapiens; identical to SEQ ID NO: 182043
  misc_feature (1293)..(1358): n is a, c, g, or t

SEQ ID NO: 194822 - DNA, 1324 bp, Homo Sapiens
ttgggtttgaattgcgcttccgccatctttccagcctcagtcggacgggcgcggagacgcttctggaaggaacgccgcgatggctgcgcagggagagccccaggtccagttcaaacttgtattggttggtgatggtggtactggaaaaacgaccttcgtgaaacgtcatttgactggtgaatttgagaagaagtatgtagccaccttgggtgttgaggttcatcccctagtgttccacaccaacagaggacctattaagttcaatgtatgggacacagccggccaggagaaattcggtggactgagagatggctattatatccaagcccagtgtgccatcataatgtttgatgtaacatcgagagttacttacaagaatgtgcctaactggcatagagatctggtacgagtgtgtgaaaacatccccattgtgttgtgtggcaacaaagtggatattaaggacaggaaagtgaaggcgaaatccattgtcttccaccgaaagaagaatcttcagtactacgacatttctgccaaaagtaactacaactttgaaaagcccttcctctggcttgctaggaagctcattggagaccctaacttggaatttgttgccatgcctgctctcgccccaccagaagttgtcatggacccagctttggcagcacagtatgagcacgacttagaggttgctcagacaactgctctcccggatgaggatgatgacctgtgagaatgaagctggagcccagcgtcagaagtctagttttataggcagctgtcctgtgatgtcagcggtgcagcgtgtgtgccacctcattattatctagctaagcggaacatgtgcttcatctgtgggatgctgaaggagatgagtgggcttcggagtgaatgtggcagtttaaaaaataacttcattgtttggacctgcatatttagctgttttggaacgcagttgattccttgagtttcatatataagactgctgcagtcacatcacaatattcagtggtgaaatcttgtttgttactgtcattcccattccttttcgtttagaatcagaataaagttgtatttcaaatatctaagcaagtgaactcatcccttgtttataaatagcatttggaaaccactaaagtagggaagttttatgccatgttaatatttgaattgccttgcttttatcacttaatttgaaatctattgggttaatttctccctatgtttatttttgtacatttgagccatgtcacacaaactgatgatgacaggtcagcagtattctatttggttagagggttacatggtgtaatattagtgcagttaa

SEQ ID NO: 194823 - DNA, 285 bp, Homo Sapiens
  misc_feature (265)..(273): n is a, c, g, or t
actttgtacaaaaaagttgggttacttacaagaatgtgcctaactggcatagagatctggtacgagtgtgtgaaaacatccccattgtgttgtgtggcaacaaagtggatattaaggacaggaaagtgaaggcgaaatccattgtcttccaccgaaagaagaatcttcaggtgtgtaaaattaaaacttactgagttatttctcttagcggagattatatgtaagaccatgaaattaaccagtgtctattatatatggaaatgannnnnnnnnccccaagacgga

SEQ ID NO: 194824 - DNA, 361 bp, Homo Sapiens
actttgtacaaaaaagttgggtcatccgccctccccattgacctgaagaccatgactgagcggctgcgaagccgctactacgtgacccggaagctctttgtggccgacctgcagcgggtcatcgccaactgtcgcgagtacaaccccccggacagcgagtactgccgctgtgccagcgccctggaaaagttcttctacttcaagctcaaggagggaggcctcattgacaagtaggcccatctttgggccgcagccctgacctggaatgtctccacctcggattctgatctgatccttagggggtgccctggccccacggacccgactcttcttgagacactccaaccaaaggtcctccaga

SEQ ID NO: 194825 - DNA, 1817 bp, Homo Sapiens; identical to SEQ ID NO: 188857

SEQ ID NO: 194826 - DNA, 1009 bp, Homo Sapiens; identical to SEQ ID NO: 188867
  misc_feature (652)..(664): n is a, c, g, or t

SEQ ID NO: 194827 - DNA, 636 bp, Homo Sapiens
cctggcccagactttactcgctcccggccccacgggcacaaggaacactgccgcaaacgtcggggcccagcctgagaggagcctctgggcggcccaggcctcctggggatccctgccaagctggccccgggctggaaggtgcatgggcagcacacgaaaccaggatccacccactgcccaccggtggccctcacagctccccgggatctgtgtcctcagtgcaaagggcctggcagggaaagctgggcctgttggtcaggcatggaggagctgtgtggtcactggccactggctctcttctgcaccaccgccggctctgacagtgcctgctgctgcagctgctggatcagctccgccacatagatcttgaacaggggtacagggtccttctcctccaaaagtctctgcttctcaatggcctcctccagcgtgaggcccacccactctgcctcctcctctgggatggcaaattccttgtacttgtcgtagatggctgcccgccgctcggggtcctcggggtgcagctgggggtcctgccgggcaagccgcagcagcatccctcgcttcaggtccatcccaaacttggagcacaggtcctccttcggggtcttgaggatgccaacttttttgtacaaa

SEQ ID NO: 194828 - DNA, 1403 bp, Homo Sapiens; identical to SEQ ID NO: 188869

SEQ ID NO: 194829 - DNA, 1707 bp, Homo Sapiens; identical to SEQ ID NO: 188876

SEQ ID NO: 194830 - DNA, 341 bp, Homo Sapiens
tcgccttcctcttcccggcgcggccccccggcttccgcgcgccgcccgccaccaatcctcttgctatcatgtccgtggagctcgaggaggccctgccagtgaccaccgccgagggaatggccaagaaggtgaccaaggctggcggctcggcggcgttgtccccatctaagaagaggaagaataccaagaagaaaaaccaaccgggccaatacagccagctggtggtggaaacaatccgtaggctggcccagcacaaatgctcttcgctagccaatatctacaacaaagccaaaaaggttccgtggtacgaccaacagaatgagacgcaccaacctcaagta

SEQ ID NO: 194831 - DNA, 754 bp, Homo Sapiens
  misc_feature (413)..(603): n is a, c, g, or t
ccggggctccgcgccgctccccgccgccctccagcttcttgcggttgagcttgaaggaaccgttggcgccggtgcccttcacctgcagaagcgtgtcgttctgcaccagcgccttgatcgagtacttgaggtaggtgcgcccattctgctggtcgaaccacggaaccttcttggcctcggtgtagatcttggccagcgacgagccgttgcgctcgcccagcctacggatggtctccaccaccagctggctgtacttgcccggctggttcttcttcttgctattcttcctcttcttagatggggacaacgccgccgagccgccagccttggtcaccttcttggccattccctcggcggtcgtcactggcagggcctcctcgagctccacggacatggtagcaagaggattggtnnnnnnnnnnnnnnnnnnnnnnnnnnnnnnnnnnnnnnnnnnnnnnnnnnnnnnnnnnnnnnnnnnnnnnnnnnnnnnnnnnnnnnnnnnnnnnnnnnnnnnnnnnnnnnnnnnnnnnnnnnnnnnnnnnnnnnnnnnnnnnnnnnnnnnnnnnnnnnnnnnnnnnnnnnnnnnnnnnnnnnnnnnnnnnngccggactaggggaccgagttgggggtcagagaccgagtccgagccggcggctggagctggggacgtagacctaggccgagccggagcgaagagaaatcccgccgaacgcgagacaccgccgccgcagcttccactggcgcctctggccaa

SEQ ID NO: 194832 - DNA, 729 bp, Homo Sapiens
tttgtacaaaaaagttggagctcatcacccggttcctcccgatgctcatgtccttcctggtggatgactacactttcaatgtggatcagaaacttccggctgaggagaaagccccagtctcatatccaaacacacttcccgaaagcttcactaagtttctgcaggagcagcgcatggcctgcgaggtggggctgtactacgtcctgcacatcaccaagcagaggaacaagaacgcgctcctccgcctgctgcccgggctggtggagacctttggcgacttggcctttggcgacatcttcctccacctgctcacgggcaaccttgcgctgctggccgacgaatttgcccttgaggacttctgcagcagcctcttcgatggcttcttcctcaccgcctctccaaggaaggagaacgtgcaccggcacgcgctgcggctcctcattcacctgcaccccagggtggccccatctaagctggaggcgttgcagaaggccctggagcctacaggccagagcggagaggcagtgaaggagctttactcccagctcggcgagaagctggaacagctggatcaccggaagcccagcccggcacaggctgcggagacgccggccctggagctgcccctccccagcgtgcccgcccctgccccgctctgagggccctccagacctgctcgggtgctggggccatgccgagtcgcggccctgctcagcaggaaaaaggctc

SEQ ID NO: 194833 - DNA, 1806 bp, Homo Sapiens; identical to SEQ ID NO: 188883

SEQ ID NO: 194834 - DNA, 725 bp, Homo Sapiens
ttggctggattctaccgcgtggagaggccccgttcgctcagcgtatcgacccgactcgggagaagctgacacccgagcaactgcattccatgcggcaggcggagcttgcccagtggcagaaggtcctaccacggcggcgaacccggaacatcgtgaccggcctaggcatcggggccctggtgttggctatttatggttacaccttctactcgatttcccaggagcgtttcctagatgagctagaagacgaggccaaagctgcccgagcccgagctctggcaagggcgtcagggtcctaatctggatgggtattgatcatgtccaacctgctggagccccttcacatggtggatgatgccccatgaccctgtagaaattgaatcctgctcacaacattgttggccttcttactaaccttggaccgtgattgagcccaagaaaccagggacttacgcatttggccaatgtcaaaagaacagaactttgcccactgcacacttgctgtgtacaatgactgagccctttcttgtagtttgtttccttgtttgagaggtgtgcatgcgaccgtggcttttcccaaagtttctgactttgtggtttacccccttcaccttccagggacgcagttgttacgaggttagacgtggcagctctgtgcagtgtttgagcctacagtgggatacatagggtcaaattgagaataataaactgagtcattctcctgg

SEQ ID NO: 194835 - DNA, 717 bp, Homo Sapiens
ttggcaaaggtaaggctcgggagagcgggtgcccggcagttcgatgccgaccgccgacggcacagcaagtgtgtgcagacgcctctttttcttcatcagggaagactgagagcgaggcgcgggagatcgaacacgtcatgtaccatgactggcggctggtgcccaagcacgaggaggaggccttcaccgcgttcacgccggcgccggaagacagcctggcctccgtgccgtacccgcctctcctccgggccatgattatcgcagaacgacagaaaaatggagacacaagcaccgaggagcccatgctgaatgtgcagaggatacgcatggaaccctgggattaccctgcaaaacaggaagacaaaggaagggccaagggcacccccgtctagaatgccagaaccagcgggtggccttaggggctgtgaggcagtggggaccttattgatgaaagaaaccgtctttgcgttacacccgagtctgcctctcggagcagggagctcaccttccgcgacgtgttctgagggtctgcatcttaggggggagggctggggcaaatcgccacctgtgcctttcctctggccctgctgcccccacacccaactccgagggcccacgctggggaaagcgggaagcgctcgctccctttcccccattagtgctctctctgcctggatcccggcagaagctatgaaagggaataaagagaaaagaagt

SEQ ID NO: 194836 - DNA, 925 bp, Homo Sapiens
  misc_feature (727)..(751): n is a, c, g, or t
ttgggtgagaagccgtcaagcaggggtagaaattggtatgcttaaaagcagattctaaaagcagtttctcttcagaacatcttttttcataccacttgataagcatcttgaaacaccatggctgtagctgcagtaaaatgggtgatgtcaaagagaactatcttgaaacatttatttccagtccaaaatggagctttatattgtgtttgtcataaatctacgtattctcctctaccagatgactataattgcaacgtagagcttgctctgacttctgatggcaggacaatagtatgctaccacccttctgtggacattccatatgaacacacaaaacctatccctcggccagatcctgtgcataataatgaagaaacacatgatcaagtgctgaaaaccagattggaagaaaaagttgaacaccttgaggaaggacctatgatagaacaacttagcaaaatgttctttactactaagcaccgttggtatcctcatggacggtatcacagatgtcgtaagaatctgaatcctccaaaagacagatgatgcggaggttcctgggggaatcaaagagaaatgtgcctcatttgccatttgagaaaatgcagtctggtgtattcagtaatatatagtaaagtaataatgataaaatatcttttcatatattagaatgtgtacttttatataaagtaattctggatttgacattctcatttagagaaacctnnnnnnnnnnnnnnnnnnnnnnnnnagtgtttcatttatgtgcggtctccaatttagacttttccatagtgccaaagccatacatattcagtagaacatcaataaattacatcagaaattcacactttattataaacgggcttcgtgttagataattttgctaaacagttagctactgtagtgttctgagcatatttaa

SEQ ID NO: 194837 - DNA, 1472 bp, Homo Sapiens; identical to SEQ ID NO: 182090
  misc_feature (252)..(352): n is a, c, g, or t
  misc_feature (882)..(896): n is a, c, g, or t

SEQ ID NO: 194838 - DNA, 733 bp, Homo Sapiens
ttggcgttgctctgggctctgcggctgacggcgcttttgtctccggtgagttttgtggcgggaagcttctgcgctggtgcttagtaaccgactttcctccggactcctgcacgacctgctcctacagccggcgatccactcccggctgttcccccggagggtccagaggcctttcagaaggagaaggcagctctgtttctctgcagaggagtagggtcctttcagccatgaagcatgtgttgaacctctacctgttaggtgtggtactgaccctactctccatcttcgttagagtgatggagtccctagagggcttactagagagcccatcgcctgggacctcctggaccaccagaagccaactagccaacacagagcccaccaagggccttccagaccatccatccagaagcatgtgataagacctccttccatactggccatattttggaacactgacctagacatgtccagatgggagtcccattcctagcagacaagctgagcaccgttgtaaccagagaactattactaggccttgaagaacctgtctaactggatgctcattgcctgggcaaggcctgtttaggccggttgcggtggctcatgcctcagcctcccaaagtgctgctgggattacaggcgtgagccaccactcccggctaagttagtatttctttaaatcttaatgctttaaactaagccactttgggatcctgaataatttaaatct

SEQ ID NO: 194839 - DNA, 790 bp, Homo Sapiens; identical to SEQ ID NO: 182094
  misc_feature (611)..(662): n is a, c, g, or t

SEQ ID NO: 194840 - DNA, 1527 bp, Homo Sapiens; identical to SEQ ID NO: 182096
  misc_feature (618)..(638): n is a, c, g, or t

SEQ ID NO: 194841 - DNA, 825 bp, Homo Sapiens
ttggcggaggtgcaggtcgaagaggccgggctacgtcgtgccctgcgcgtgagcagctgcagcggcagaggcagcatccagcggcggcgccagcagttccagtccgttgctttactttttgcttcaccgacatagtcattatgccgaagagaaagtctccagagaatacagagggcaaagatggatccaaagtaactaaacaggagcccacaagacggtctgccagattgtcagcgaaacctgctccaccaaaacctgaacccaaaccaagaaaaacatctgctaagaaagaacctggagcaaagattagcagaggtgctaaagggaagaaggaggaaaagcaggaagctggaaaggaaggcacagaaaactgaatctgtagataacgagggagaatgaattgtcatgaaaaattggggttgattttatgtatctcttgggacaacttttaaaagctatttttaccaagtattttgtaaatgctaattttttaggactctactagttggcatacgaaaatatataaggatggacattttatcgtctcatagtcatgctttttggaaatttacatcatcctcaagtaaaataaatatcagttaaatattggaagctgtgtgtaagattgattcagcattccatgcacttgctttaaaatttagtcctgtgcatactgtggtgtttttactgtgcatatttgaatttttcatgcagtttttctagagcaataatcagtggtgcttttgtacctaggttttatgtgattttaatgaaacatggatagttgtggccacctgctgactatttgtggtttgaaataaaagg

SEQ ID NO: 194842 - DNA, 943 bp, Homo Sapiens
attcaggtcctcaaacttactctggatgtagctggctgcctcatcatatttgttggcccctgtgtactcagagaagcagatggtcagaggactgtgtgtgatcttctcctcaaacaggtccttcttgtgaggaagaggatgatggacgtgtctgtgaaccacttgttgttgcagatgctatcgaatagcttcatgctctcatgcatgcggttcatctcctcgtcctcagctagcaccaagtcataggcgctcaaggctacgcagaagatgatggctgtgacgccctcaaagcagtggatccacttcttccgctcagaccgctgaccacccacatcaaacatcttgaagtgtaggtccttgaaggtgaagtgtgtctccacgatccccgtggtctttacgcgggtccgtagcacatcttgctgtgtggggatgtagtcactctgtgcaatacgctccaggtcgttcaggtagtaggcagctgagtcgttgagctggtattcccttgagcggccaaagcaggcctgcacaccatggtcagcccagagcctccggatgacgccggacaggtcatcagggagcacgccttgctcctcggcggtgcaggacagtgcaaatagctgcctggcgtcgtccgctctggaggggtcggcaaagtcgatctgcaggttgcccatggctttgacaatggccatgatggactggatggtgttgctgtagacaaccgcccggtactgccggcattcctcctcggagtagccatcctcgtggatgatcttcatctgcttgacgatggtgctcttccctgactccccagcacccaacagcagcaacttcacctcccgcgccgccttctctccgtcctcccgcaggttcttgtcgatcatcttagagcgctcggccgccgccttgtcctcggcgctcacggtgcagcccatcccgccgt

SEQ ID NO: 194843 - DNA, 910 bp, Homo Sapiens
ttggagtggaagcgcgagaaggagggagcgtctcatgacggagggtgtgaagacgctaggctggacgaagcagaaaggcgggtgtcactggggacgttctgagggtgctggggagtcagggaagagcaccatcgtcaagcagatgaagatcatccacgaggatggctactccgaggaggaatgccggcagtaccgggcggttgtctacagcaacaccatccagtccatcatggccattgtcaaagccatgggcaacctgcagatcgactttgccgacccctccagagcggacgacgccaggcagctatttgcactgtcctgcaccgccgaggagcaaggcgtgctccctgatgacctgtccggcgtcatccggaggctctgggctgaccatggtgtgcaggcctgctttggccgctcaagggaataccagctcaacgactcagctgcctactacctgaacgacctggagcgtattgcacagagtgactacatccccacacagcaagatgtgctacggacccgcgtaaagaccacggggatcgtggagacacacttcaccttcaaggacctacacttcaagatgtttgatgtgggtggtcagcggtctgagcggaagaagtggatccactgctttgagggcgtcacagccatcatcttctgcgtagccttgagcgcctatgacttggtgctagctgaggacgaggagatgaaccgcatgcatgagagcatgaagctattcgatagcatctgcaacaacaagtggttcacagacacgtccatcatcctcttcctcaacaagaaggacctgtttgaggagaagatcacacacagtcccctgaccatctgcttccctgagtacacaggggccaacaaatatgatgaggcagccagctacatccagagtaagttt

SEQ ID NO: 194844 - DNA, 1338 bp, Homo Sapiens
ctttgtacaaaaaagttgggacgccaggcagctatttgcactgtcctgcaccgccgaggagcaaggcgtgctccctgatgacctgtccggcgtcatccggaggctctgggctgaccatggtgtgcaggcctgctttggccgctcaagggaataccagctcaacgactcagctgcctactacctgaacgacctggagcgtattgcacagagtgactacatccccacacagcaagatgtgctacggacccgcgtaaagaccacggggatcgtggagacacacttcaccttcaaggacctacacttcaagatgtttgatgtgggtggtcagcggtctgagcggaagaagtggatccactgctttgagggcgtcacagccatcatcttctgcgtagccttgagcgcctatgacttggtgctagctgaggacgaggagatgaaccgcatgcatgagagcatgaagctattcgatagcatctgcaacaacaagtggttcacagacacgtccatcatcctcttcctcaacaagaaggacctgtttgaggagaagatcacacacagtcccctgaccatctgcttccctgagtacacaggggccaacaaatatgatgaggcagccagctacatccagagtaagtttgaggacctgaataagcgcaaagacaccaaggagatctacacgcacttcacgtgcgccaccgacaccaagaacgtgcagttcgtgtttgacgccgtcaccgatgtcatcatcaagaacaacctgaaggactgcggcctcttctgaggggcagcggggcctggcgggatgggccaccgccgactttgtaccccccaacccctgaggaagatgggggcaagaagatcacgctccccgcctgttcccccgccgcttttctcctctttcctctctttgttctcagctccccctgtcccctcagctccagacgtaggggaggggttgccacaggcctccctgtttgaagcctgcccttgtctgagatgctggtaatggccatggtacccccttctgggcatctgttctggtttttaaccattgtcttgttctgtgatgaggggaggggggcacatgctgagtctcccaaggctgcgtctggaggggcccctgcttctccagcctggacccccagctttgcccaacaccagcccctgccccagcccaagtccaaatgtttacagggagcctcctgcccagtcccccaaccccagccgctcggaggccccaaaggaaaaagcacaagaagcgtgagacgccaccattcctggaaaccacagtccacctgctcattctcgtagctttttaaaaaaatgaaagtaaaggaa

SEQ ID NO: 194845 - DNA, 904 bp, Homo Sapiens; identical to SEQ ID NO: 188918
  misc_feature (463)..(494): n is a, c, g, or t

SEQ ID NO: 194846 - DNA, 531 bp, Homo Sapiens
ctttgtacaaaaaagttggagctgagcgccaccgccactgagctgctgcaggactacatgctgacgctgcgcaccaagctgtcatcacaggagatccagcagtttgcagcactgctgcacgagtaccgcaatggggcctctatccacgagttctgcatcaacctgcggcagctctacggggacagccgcaagttcctgctgcttggtctgaggcccttcatccctgagaaggacagccagacctgcgtgtcagcccttggtggtggccagggagaggcgcccggcgcagatggccccgggcggcccaggtcctctactgtgaaggagcagggagctgccgagggacacgagcctcagtgcggggtggaaggctctttgccttgtccaccagggctcagccaagccctgcagtgtgtccccgctcggggagggcccggccgagcgggcagggagagccagtcctgtcggctgggcccttggacggctgtcagttttgcacatgatgttcctattgtaactctcaaagacctt

SEQ ID NO: 194847 - DNA, 2034 bp, Homo Sapiens; identical to SEQ ID NO: 188928
  misc_feature (1655)..(1713): n is a, c, g, or t

SEQ ID NO: 194848 - DNA, 981 bp, Homo Sapiens; identical to SEQ ID NO: 188931
  misc_feature (126)..(136): n is a, c, g, or t

SEQ ID NO: 194849 - DNA, 1949 bp, Homo Sapiens; identical to SEQ ID NO: 188935
  misc_feature (1478)..(1506): n is a, c, g, or t

SEQ ID NO: 194850 - DNA, 1616 bp, Homo Sapiens; identical to SEQ ID NO: 182114
  misc_feature (1028)..(1107): n is a, c, g, or t

SEQ ID NO: 194851 - DNA, 470 bp, Homo Sapiens
tttgtacaaaaaagttggggaacggttgccctaacgtggctctttattcgtgagttttccatttacctccgctgaacctagagcttcagacgccctatggcgtccgcctcgacccaaccggcggccttgagcgctgagcaagcaaaggtggtcctcgcggaggtgatccaggcgttctccgccccggagaatgcagtgcgcatggacgaggctcgggataacgcctgcaacgacatgggtgtccttaagtttgctcgcttggtcaagtcctacgaagcccaggatcctgagatcgccagcctgtcaggcaagctgaaggcgctgtttctgccgcccatgaccctgccaccccatgggcctgctgctggtggcagcgtggccgcctcctgagagttggccctcccttgtgccactgccaggggaggaaaggccttgatgttccagacaataataaatgcgccggtgactta

SEQ ID NO: 194852 - DNA, 1092 bp, Homo Sapiens; identical to SEQ ID NO: 188956

SEQ ID NO: 194853 - DNA, 1208 bp, Homo Sapiens; identical to SEQ ID NO: 188957
  misc_feature (635)..(692): n is a, c, g, or t

SEQ ID NO: 194854 - DNA, 599 bp, Homo Sapiens; identical to SEQ ID NO: 182121

SEQ ID NO: 194855 - DNA, 1829 bp, Homo Sapiens; identical to SEQ ID NO: 188963

SEQ ID NO: 194856 - DNA, 1130 bp, Homo Sapiens; identical to SEQ ID NO: 182128
  misc_feature (574)..(582): n is a, c, g, or t
  misc_feature (1065)..(1073): n is a, c, g, or t

SEQ ID NO: 194857 - DNA, 938 bp, Homo Sapiens; identical to SEQ ID NO: 188966

SEQ ID NO: 194858 - DNA, 521 bp, Homo Sapiens; identical to SEQ ID NO: 188970

SEQ ID NO: 194859 - DNA, 954 bp, Homo Sapiens; identical to SEQ ID NO: 188972

SEQ ID NO: 194860 - DNA, 946 bp, Homo Sapiens; identical to SEQ ID NO: 188975

SEQ ID NO: 194861 - DNA, 2019 bp, Homo Sapiens; identical to SEQ ID NO: 188979
  misc_feature (769)..(828): n is a, c, g, or t

SEQ ID NO: 194862 - DNA, 1477 bp, Homo Sapiens; identical to SEQ ID NO: 188992
  misc_feature (337)..(360): n is a, c, g, or t
  misc_feature (610)..(610): n is a, c, g, or t

SEQ ID NO: 194863 - DNA, 1034 bp, Homo Sapiens; identical to SEQ ID NO: 189025

SEQ ID NO: 194864 - DNA, 2061 bp, Homo Sapiens; identical to SEQ ID NO: 189030
  misc_feature (748)..(757): n is a, c, g, or t

SEQ ID NO: 194865 - DNA, 889 bp, Homo Sapiens
ttggcgcgtcgactgcccagagtccgcggccggggcgcgggaggagccaagccgccatggcctaccacagcttcctggtggagcccatcagctgccacgcctggaacaaggaccgcacccagattgccatctgccccaacaaccatgaggtgcatatctatgaaaagagcggtgccaaatggaccaaggtgcacgagctcaaggagcacaacgggcaggtgacaggcatcgactgggcccccgagagtaaccgtattgtgacctgcggcacagaccgcaacgcctacgtgtggacgctgaagggccgcacatggaagcccacgctggtcatcctgcggatcaaccgggctgcccgctgcgtgcgctgggcccccaacgagaacaagtttgctgtgggcagcggctctcgtgtgatctccatctgttatttcgagcaggagaatgactggtgggtttgcaagcacatcaagaagcccatccgctccaccgtcctcagcctggactggcaccccaacaatgtgctgctggctgccggctcctgtgacttcaagtgtcggatcttttcagcctacatcaaggaggtggaggaacggccggcacccaccccgtggggctccaagatgccctttggggaactgatgttcgaatccagcagtagctgcggctgggtacatggcgtctgtttctcagccagcgggagccgcgtggcctgggtaagccacgacagcaccgtctgcctggctgatgccgacaagaagatggccgtcgcgactctggcctctgaaacactaccactgctggcgctgaccttcatcacagacaacagcctggtggcagcgggccacgactgcttcccgggtgctgttcacctatgacgccgccgcgggga

SEQ ID NO: 194866 - DNA, 480 bp, Homo Sapiens; identical to SEQ ID NO: 182167

SEQ ID NO: 194867 - DNA, 1381 bp, Homo Sapiens
  misc_feature (1181)..(1207): n is a, c, g, or t
ctttgtacaaaaaagttggctccaaatgatgacactttggatgaaggagtaggacttgtgcattcaaacatagcaactgagcatattccaagccctgccaagaaagtaccaagactccctgccacagcagcagaacctgaagcagctgtcattagtaatggggaacattaagatactctgtgaggtgcaagacttcagggtggggtgggcatggggtgggggtatgggaacagttggaggaatgggatatctggggataattttaaaggattacatgttatgtaaatttttatgtgactgacatggagcctggatgactatcgtgtacttgggaaagtctctttgctctatttgctgacatgcttcctgttgtggtctggccaatgccaaatgtactcgaatgatgttaagggctctgtaaaacttcatacctctttggccatttgtatgcatgatgtttggtttttaaacatggtataatgaattgtgtacttctgtcagaagaaagcagaggtactaatctccaattaaaaaattttttaacatgtaagaattttgtactttgaacaacaagattacagaaagtacctgtggtttttggaaaacatttctagcttggggaatgtgacaacattccccagtgtggtaaaattggggtaaaatgtggtaaaatgtgatacgcacaaaccctttgaaaatagcaaaacaaacatgccctttttctaaaattgataaatcctaaagaggaagaaaagagctgggacaataaaacactggctctggaatctggaatgttaagtccaggccagcagtgacaaaagttattgtaatgacctctgaacagagaaacactgccattgaagaggcttctggtatagaaaacatggtacattcaggagctgtgaatatagctctaggtgtgctcctgaatcagttcatggtagattatgctgaacaacagtgagatgttattggaggtgtggatgagggagtttgttgttgcagtccttctttgcaccttattttaaagaataaatgaaacatttttctggttacttttttaaaaatttaaaatggaagggaagaataggggcagggcattattagctatttctgatgcttcagtgttataaattcaacatagaggctgacaacctaaattcatggtgtaacacagctcnnnnnnnnnnnnnnnnnnnnnnnnnnnggtatctgttcaatgaaaataaggtatgacccaaagtttttacctagtctgactagaagtattccacttcaagggtctgaagtaggacttttaccttttaaaaccacctcaaaacaaaactatcacacaggatagataagaagattggttaaacagttttgtgtaaatcttttt

SEQ ID NO: 194868 - DNA, 845 bp, Homo Sapiens
aacatacagaaaaagtgtaaactacggcaatctgaattgcaagtattaattttcatggcactccaacgactatgaaattcttcatcatatagtaaaacccagcccatgacccctaacaggggccctctcagccctcctaatgacctccggcctagccatgtgatttcacttccactccataacgctcctcatactaggcctactaaccaacacactaaccatataccaatgatggcgcgatgtaacacgagaaagcacataccaaggccaccacacaccacctgtccaaaaaggccttcgatacgggataatcctatttattacctcagaagtttttttcttcgcaggatttttctgagccttttaccactccagcctagcccctaccccccaattaggagggcactggcccccaacaggcatcaccccgctaaatcccctagaagtcccactcctaaacacatccgtattactcgcatcaggagtatcaatcacctgagctcaccatagtctaatagaaaacaaccgaaaccaaataattcaagcactgcttattacaattttactgggtctctattttaccctcctacaagcctcagagtacttcgagtctcccttcaccatttccgacggcatctacggctcaacattttttgtagccacaggcttccacggacttcacgtcattattggctcaactttcctcactatttgcttcatccgccaactaatatttcactttacatccaaacatcactttggcttcgaagccgccgcctgatactggcattttgtagatgtggtttgactatttctgtatgtctccatctattgatgagggtctt

SEQ ID NO: 194869 - DNA, 1361 bp, Homo Sapiens
actttgtacaaaaaagttggggcacgagtccgtggaaaatctgtggcctagatcctacatctacacttggcatctattttgaagttgtcaatcagcacaacaccccgatcccccaaggaggcagaggagccatccagtttgtcacgcattatcagcactccagcacccagagacgcatccgcgtgaccaccatcgcccgaaattgggcagatgtacagagtcagctcaggcacatagaagcagcatttgaccaggaggctgcggcagtgttgatggcacggcttggggtgttccgagcggagtcagaggaggggcccgatgtgctccggtggctggaccgacaactcatccgactgtgtcaaaagtttggacagtataacaaagaagaccccacttcttttaggttatcagattccttttctctatatcctcagtttatgttccatctgagaagatctccatttcttcaagtgtttaacaacagtcctgatgagtcgtcatattacagacatcattttgcccggcaggacctgacccagtccctcatcatgatccagcccattctctactcttactcctttcatgggccaccagagccagtactcttggatagcagcagcattctagctgacagaattttgctgatggatactttctttcaaattgtcatttatcttggtgagaccatagcccagtggcgtaaagctggctaccaggacatgcccgagtatgaaaacttcaagcaccttctgcaggcaccactggatgatgctcaagaaattctgcaagcacgcttcccgatgccacgttacatcaacacggagcatggaggcagtcaggctcgattccttttgtccaaagtgaacccatctcagacacacaataacctgtatgcttggggacaggaaactggagcacccatcctaactgatgatgttagcctgcaggtgttcatggaccatttgaagaagctggctgtctccagtgcctgttaagctgaggatacaaccaggaaatgcaacggtgtcagattgtgttcaaaatgtctagaaaggcttgataacattcctgttacttttctagcagattttaacaaataatcaaggacattttatatgtaactctttagattataatttatttgtattcctgtctttgtcctttttcttgcactataaaattataaggtcataaaatgttttggtacttgtagatgtttatgtgctttttgtatcctaacttttagaatctaaataaaatcagaggtaatgtattttggcagcttgtttatgtgagatcttaatgatcataaaggaaataaatctagatgcagaaagtactggctaaaatattgctaatac

SEQ ID NO: 194870 - DNA, 395 bp, Homo Sapiens
ccccctttgtacaaaaaagttggccaaggtcccccctaaataatgtgtctcgctgttgatgggagagcagtttctcgtcagctggtgttagccgggcggagtgtgttactctctccagagggaggctggttccccagggaagcagagcctgtgtgcgggcagcagctgtgtgcgggcctgggggttgcatgtgtcacctggagctgggcactaaccattccaagccgccgcatcgcttgtttccacctcctgggccggggctctggcccccaacgtgtctaggagagctttctccctagatcgcactgtgggctggggccctggagggctgttctgtgttaataagattgtaaagtttgccctcctcacctgatgccggcatgcgggtattatta

SEQ ID NO: 194871 - DNA, 1220 bp, Homo Sapiens
ataaaagccaactttgtacaaaaaagttggcccttacatcctcctaagacccggtcggtagtcgtcgccccagcccgccgggggcgcagcgcccgagccgcggccctcgagacgggaccgagagcatcatgggcagcactgtcccgcgctccgcctccgtgctgcttctgctgctgctcctgcgccgggccgagcagccctgcggggccgagctcaccttcgagctgccggacaacgccaagcagtgcttccacgaggaggtggagcagggcgtgaagttctccctggattaccaggtcatcactggaggccactacgatgttgactgctatgtagaggacccccaggggaacaccatctacagagaaacgaagaagcagtacgacagcttcacgtaccgggctgaagtcaagggcgtttatcagttttgcttcagtaatgagttttccaccttctctcacaagaccgtctactttgactttcaagtgggcgatgagcctcccattctcccagacatggggaacagggtcacagctctcacccagatggagtccgcctgcgtgaccatccatgaggctctgaaaacggtgattgactcccagacgcattaccggctgcgggaggcccaggaccgggcccgagcggaagaccttaatagccgagtctcttactggtctgttggcgagacgattgccctgttcgtggtcagcttcagtcaggtgctactgttgaaaagcttcttcacagaaaaacgacccatcagcagggcagtccactcctagccccggcatcctgctctagggcccctcatgccccaggctggagcagctctcctaggtcacagcctgctgggctgggtcgcgtagcccagggtggaggcagaacgatgctgctgtggtagccctttgcctttcatgcccatgcttgattcttgcccctcagcagctgaaggtctcagagaccagtaatcagaaggcatccgactgcattaagtgtgcagcgctgaaaagacatttacaactaggccagggattagccactgtgggagggtggacaggcaatggttcagtggcctggctgttggcaggaactccaagtgcccaggcctcttgggcagcttagggccctgcctctgtttcatgatgcatgggtcatttgtcttgggtgtcctatcccatatggagaagaaagggggctctaaattcttgctcttctttctt

SEQ ID NO: 194872 - DNA, 1106 bp, Homo Sapiens; identical to SEQ ID NO: 189070

SEQ ID NO: 194873 - DNA, 949 bp, Homo Sapiens; identical to SEQ ID NO: 189082

SEQ ID NO: 194874 - DNA, 1404 bp, Homo Sapiens; identical to SEQ ID NO: 189094
  misc_feature (1046)..(1123): n is a, c, g, or t

SEQ ID NO: 194875 - DNA, 892 bp, Homo Sapiens
  misc_feature (631)..(684): n is a, c, g, or t
ttgggttgggtccggccgctctgcgggactctgaggaaaagctcgcaccaggtggacgcggatctgtcaacatgggtaaaggagaccccaacaagccgcggggcaaaatgtcctcgtacgccttcttcgtgcagacctgccgggaagagcacaagaagaaacacccggactcttccgtcaatttcgcggaattctccaagaagtgttcggagagatggaagaccatgtctgcaaaggagaagtcgaagtttgaagatatggcaaaaagtgacaaagctcgctatgacagggagatgaaaaattacgttcctcccaaaggtgataagaaggggaagaaaaaggaccccaatgctcctaaaaggccaccatctgccttcttcctgttttgctctgaacatcgcccaaagatcaaaagtgaacaccctggcctatccattggggatactgcaaagaaattgggtgaaatgtggtctgagcagtcagccaaagataaacaaccatatgaacagaaagcagctaagctaaaggagaaatatgaaaaggatattgctgcatatcgtgccaagggcaaaagtgaagcaggaaagaagggccctggcaggccaacaggctcaagaagaagaacgaaccnnnnnnnnnnnnnnnnnnnnnnnnnnnnnnnnnnnnnnnnnnnnnnnnnnnnnntgaagatgaagaataaatggctatcctttaatgatgcgtgtggaatgtgtgtgtgtgctcaggcaattattttgctaagaatgtgaattcaagtgcagctcaatactagctttcagtataaaaactgtacagatttttgtatagctgataagattctctggtagagaaaatactttttaaaaaatgcaggttgtagctttttgatggg

SEQ ID NO: 194876 - DNA, 1139 bp, Homo Sapiens; identical to SEQ ID NO: 189104

SEQ ID NO: 194877 - DNA, 741 bp, Homo Sapiens; identical to SEQ ID NO: 189106

SEQ ID NO: 194878 - DNA, 1726 bp, Homo Sapiens; identical to SEQ ID NO: 189111
  misc_feature (984)..(1000): n is a, c, g, or t
  misc_feature (1014)..(1277): n is a, c, g, or t

SEQ ID NO: 194879 - DNA, 839 bp, Homo Sapiens; identical to SEQ ID NO: 189112
  misc_feature (339)..(369): n is a, c, g, or t

SEQ ID NO: 194880 - DNA, 944 bp, Homo Sapiens
  misc_feature (191)..(222): n is a, c, g, or t
ttggatacttgtgcttcaaccaatctaaattggattctttaatgttgtttcaccataacacaaaaagcatgaacttgtattaatcctatataatagattgatcatgcaccatatccacaggaggttggaaaaaccatgccattttctggaatttaagggtgttgcattatttcatcaatcatttgttgacnnnnnnnnnnnnnnnnnnnnnnnnnnnnnnnntgtgaaccttcaggtattgagtaacacctttatcttggtatagaactgatacttttttttgattttgaaatatctgataataatttggaatgaagtaaggttctgttaaaatatatttgaagaccctttaaagcagtgaatctgaaacaattttcacacccttaagtggttgatacgtacctattttaggtattttgaggtatttaccataaactaaatttagaaattttttagattcacttgaagtaaacattacaaacattggatacggtggggttttctttagattttacttgagagaaggtgagtacaaagcaatttgcagttgttgtaatgacaagattactgcgcaagtgtgaatccaaacagtatagcttttaaattttaaagcatttggtaaattatcgctgagtttttttctgttgccaatagcaaactgcttttccattaatggagaattcatgcctttcaagcattttaaatatgacaatatttataaatgtatggtttggaggaatcgtttaaattctctttcctaattttctttcttttgaagatagattctttcaacaagtaatttgtagtaatgactgtgttgacttcaattttggagcgcagtagctatgttaaagatgaactatttggtctcattgaagccaacacagaacttgctgctgtgtttttccttcagtgataaataaaatacttacagaatttgttta

SEQ ID NO: 194881 - DNA, 1096 bp, Homo Sapiens; identical to SEQ ID NO: 182233

SEQ ID NO: 194882 - DNA, 812 bp, Homo Sapiens; identical to SEQ ID NO: 182240

SEQ ID NO: 194883 - DNA, 1087 bp, Homo Sapiens
aaaaaagttggattcagaatcatagagaaagaggtcgctcgagtatgttaagtgtcactgcaggaacggagctgtggtgatcacgttttgcctgcctgtgcccatgtctcttcccttgagcttattctgttgctgattcatatcttgtgttcaattattttggaagcttttcagtcgacattctgtagagtgtgttctgaggaggaactgtgataagaaagtttattataaatattatgtaaaatatatggctctctctgcaccagttatatcttattggttggtcatatcactggaaactggaacctttgattagcaaatttattattgaaataagaaatagttcttttatattgtgtcatttggacactttcaagtacaaaatggtaataataacttggattgaggcggaaacacctattttatggctatctatctaaacatcttaaaatggccttctctgtaatacactttcttttaaaagacttcactaaatctatctttaaaaggaaaaacaaaagggagaggttgaaaatgcgcgagctgccctgcactgtgtgatgctccctccccgggagacgtggacgggggacgaggcacccgcagacgcccttctgctcactcgctcctctgtgcattcagcgagccacttgccacagatggagcccgtgacggtgtggagggtttcctggaaaggccatcttccaccaggtagaggcgagcgtgcctaggacaggccacagggctccacagaaatacctcaccccagcttcagggttctctctcctgagcctagatttgccagggtcttggtgccacgcaaatggtttcaaactgatctctatggataaatgctgatgttggttaaagaactgaaaaatgtgctcaactgtttcatcttttctattttatttttgtaatttatattgtacacaacccaggaagtaactattttggacatgtattttttataaaccaggtaatttactattatcctggaattttagactaggtttgtttcatttgttgacttactttccagccaagaaggaaacgactgtctcccccatgtccaggtctcactttc

SEQ ID NO: 194884 - DNA, 557 bp, Homo Sapiens
  misc_feature (249)..(257): n is a, c, g, or t
actttgtacaaaaaagttggttttaatttacccgtgcgtcattttctgattctcatcattgggagatcttaaatcttagcaagcattagcaatattaaatgccaaaattccattgaaactttcaagttggagcaattgtctgtgtttgaaaagatgaaataaaaataataatcaagggcaaagctttgagtgcccagaagggaaagctgtaccagttgctaacctgtcttgtttcaggagccaccatgnnnnnnnnncagtgttaacaacaatcatgataattaaattaaaacactagtttgttcacttgtaggactgcagttctgaattttgggttaaaggttttggctgctgtaagaatgtgaatttgaatgtattttgaattgtaagagcaaaagaacgtttttgtacaattttttttcatttaattggaatgatcttcaggtttctacaaatagggtaattgtaaatttaaagcattaacatttattggtgaataatgtatatatcccaattccaagaaatataaagtgagtgaaattgaaataaaatcttta

SEQ ID NO: 194885 - DNA, 1305 bp, Homo Sapiens; identical to SEQ ID NO: 189140

SEQ ID NO: 194886 - DNA, 853 bp, Homo Sapiens
  misc_feature (774)..(796): n is a, c, g, or t
ttggcgaaggagaatgggagggtaggggcgctgccagactccttccctggtgggcctagatgaagacgctcaaggaccctcgtgacttggccgagacaggggaagggagaagttgagtcgggcaaggaagagatgctaaagcctggggaattaagaacatgccagaatcatcccgagggagtctggaattagggagggtgaggactcgctaggatcgtcctgtggatctggctacagcaggagctgatgaccctcatgatgtctggcgataaagggatttctgccttccctgaatcagacaaccttttcaaatgggtagggaccatccatggagcagctggaacagtatatgaagacctgaggtataagctctcgctagagttccccagtggctacccttacaatgcgcccacagtgaagttcctcacgccctgctatcaccccaacgtggacacccagggtaacatatgcctggacatcctgaaggaaaagtggtctgccctgtatgatgtcaggaccattctgctctccatccagagccttctaggagaacccaacattgatagtcccttgaacacacatgctgccgagctctggaaaaaccccacagcttttaagaagtacctgcaagaaacctactcaaagcaggtcaccagccaggagccctgacccaggctgcccagcctgtccttgtgtcgtctttttaatttttccttaaatggtctgtcctttttgtgatttctgtataggactctttatcttgagctgtggtannnnnnnnnnnnnnnnnnnnnnnaaattaagcctcggttgagcccttgtatattaaataaatgcatttttgtcctttttt

SEQ ID NO: 194887 - DNA, 1809 bp, Homo Sapiens; identical to SEQ ID NO: 182258
  misc_feature (693)..(707): n is a, c, g, or t

SEQ ID NO: 194888 - DNA, 1313 bp, Homo Sapiens
  misc_feature (68)..(91): n is a, c, g, or t
  misc_feature (154)..(180): n is a, c, g, or t
  misc_feature (408)..(416): n is a, c, g, or t
  misc_feature (801)..(801): n is a, c, g, or t
ggtttttagctcatttgcctggccggcaagttttgcaaatagctcttccccacctcctcattttagtnnnnnnnnnnnnnnnnnnnnnnnncctgagaagtttgaattgtagttaaatgaccccaaactggcatttaacactgtttataaaaannnnnnnnnnnnnnnnnnnnnnnnnnnatgaaaaaggtttcagagttgctaaagcttcagtttgtgacattaagtttatgaaattctaaaaaatgccttttttggagactatattatgctgaagaaggctgttcgtgaggaggagatgcgagcacccagaacgtcttttgaggctgggcgggtgtgattgtttactgcctactggatttttttctattaacattgaaaggtaaaatctgattatttagcatgagnnnnnnnnntccaactctgcttttggtcttgcttctataaatatatagtgtatacttggtgtagactttgcatatatacaaatttgtagtattttcttgttttgatgtctaatctgtatctataatgtaccctagtagtcgaacatacttttgattgtacaattgtacatttgtatacctgtaatgtaaatgtggagaagtttgaatcaacataaacacgttttttggtaagaaaagagaattagccagccctgtgcattcagtgtatattctcaccttttatggtcgtagcatatagtgttgtatattgtaaattgtaatttcaaccagaagtaaatttttttcttttgaaggaataaatgttctttatacagcctagttaatgtttaagagngaaaaaatagcttggttttatttgtcatctagtctcaagtatagcgagattctttctaaatgttattcaagattgagttctcactagtgtttttttaatcctaaaaaagtaatgttttgattttgtgacagtcaaaaggacgtgcaaaagtctagccttgcccgagctttccttacaatcagagcccctctcaccttgtaaagtgtgaatcgcccttcccttttgtacagaagatgaactgtattttgcattttgtctacttgtaagtgaatgtaacatactgtcaattttccttgtttgaatatagaattgtaacactacacggtgtacatttccagagccttgtgtatatttccaatgaacttttttgcaagcacacttgtaaccatatgtgtataattaacaaacctgtgtatgcttatgcctgggcaactattttttgtaactcttgtgtagattgtctctaaacaatgtgtgatctttattttgaaaatacagaactttggaatctg

SEQ ID NO: 194889 - DNA, 354 bp, Homo Sapiens
tataagagtcatggaaaaagacagagaaaaaaaacagacaaatcagttgtcagtatccatggcctctgattctgtctcaaccatgaaacagaagtgttcaacatatacctgctaaaaagcttaggaagatgtaggctccacaaaggaatgtaaacagcaacgagatgtggaacaacagcaggcttttccattcaaactttgtcatttgtttctttaagttcaagaaagacaaaatctacactgaaatccttgtttggtgagctcacaagcttttctccggtaatttcttgtaactgtccagtatagatttttaacatacttaaaactcctccaacttttttgtacaaagtgggc

SEQ ID NO: 194890 - DNA, 1395 bp, Homo Sapiens; identical to SEQ ID NO: 189179
  misc_feature (306)..(329): n is a, c, g, or t
  misc_feature (469)..(500): n is a, c, g, or t
  misc_feature (509)..(687): n is a, c, g, or t

SEQ ID NO: 194891 - DNA, 896 bp, Homo Sapiens
gggcctgggaagcaaggggaaaactggaaggggtaccccaggtgaagaagggtatggaatggggtgcagaagtccatggagatgaccggcagatctcagggcggtttctggcacatcagaagttgggcttatgcttcttgagctccaccataaggtggtgaatgttgatgagctcagcccgggcagggagggctcggagctgcggctgggacagcacccggtggaagcgatgatagagctggatcagctgggtcagcgctccctgaatgatactggtgccatttctgaagttggtgaaactccgcattacatcctgactcagagattccactgatgatttccaggaactaccaaagccacggatcagctgagttacccgggcttcttcccctcgaagtcgctcagcctgtccacgctcaatcaaagcctcagcctccttcacaaatgccactaaacccccaaaagggggagacagcaactcttcaatgaattcctgtgtccgagcattgagcagctgctggaagctctcaacctctttgctgtcatctgcagcccgctccatcagcacacccagcatcatgtcatagttgttgatcagaaacacaagctgctccttccttgaggagaactcagctgccactcggaggacaaaattctccacctccacctgcagctgtcccagcaattgcatggtccgttcattaggaattgtctggttgatactgacaagagcggaggagaactctgcatagcggcgtgtgatatagtggggccgagtatccaacccccctaggcgctgggggtcagtgcttcggacgctctgaacattcatctccaggatcagttcaaaccgtggccatagcaaggcaagcacctgttcccagtacctgtgccaa

SEQ ID NO: 194892 - DNA, 924 bp, Homo Sapiens; identical to SEQ ID NO: 189187

SEQ ID NO: 194893 - DNA, 904 bp, Homo Sapiens
ttggctaccactctacctcagcacagaatcgccccgggtcctactacagaatcaatccttgaacactgcctccacgtcgccggctcaatctgggcgagaacccagacttccaccgcagccccgcaatctgcagacctcagcggcagcgcaggtggcagacctgcctcctttgcctgtgagtcatggcagctcccatgaatggccaagtgtgtgtggtgactggtgcctccaggggtattggccgtggcattgccttgcagctctgcaaagcaggcgccacagtttacatcactggccgccatctggacacccttcgcgttgttgctcaggaggcacaatccctcgggggccaatgtgtgcctgtggtgtgcgattcaagccaggagagtgaagtgcgaagcctgtttgagcaagtggatcgggaacagcaagggcgtctagatgtgctggtcaacaatgcttatgcaggggtccagacgatcctgaacaccaggaataaggcattctgggaaacccctgcctccatgtgggatgatatcaacaacgtcggactcagaggccactacttttgctcagtgtatggggcacggctgatggtaccagctggccaggggctcatcgtggtcatctcctccccaggaagcctgcagtatatgttcaatgtcccctatggtgtgggcaaagctgcggtgaggacccagtggcataggagctgagaggtaaaagacagtgatgttacctatagctcaggaggtacaatccccagtggtcagaatggtaggctggctcctctcagctcctcctctgcctcatccatggacagttcctttgcttgtgctcttcttggttggctaaagtaggcatcacactggggagcgtgggcagctgaaaaccttggggctcc

SEQ ID NO: 194894 - DNA, 654 bp, Homo Sapiens; identical to SEQ ID NO: 189211
  misc_feature (58)..(66): n is a, c, g, or t

SEQ ID NO: 194895 - DNA, 921 bp, Homo Sapiens; identical to SEQ ID NO: 189213

SEQ ID NO: 194896 - DNA, 1568 bp, Homo Sapiens; identical to SEQ ID NO: 189220
  misc_feature (633)..(658): n is a, c, g, or t
  misc_feature (794)..(820): n is a, c, g, or t
  misc_feature (867)..(952): n is a, c, g, or t
  misc_feature (978)..(993): n is a, c, g, or t
  misc_feature (1193)..(1211): n is a, c, g, or t

SEQ ID NO: 194897 - DNA, 926 bp, Homo Sapiens
actttgtacaaaaaagttggaatatatgtttggagactgctcgggaagctgtggtcagtgtgtgtggccacctgtactgttggccatgtcttcatcagtggctggagacacggccagaacggcaagagtgtccagtatgtaaagctgggatcagcagagagaaggttgtcccgctttatgggcgagggagccagaagccccaggatcccagattaaaaactccaccccgcccccagggccagagaccagctccggagagcagagggggattccagccatttggtgataccgggggcttccacttctcatttggtgttggtgcttttccctttggctttttcaccaccgtcttcaatgcccatgagcctttccgccggggtacaggtgtggatctgggacagggtcacccagcctccagctggcaggattccctcttcctgtttctcgccatcttcttctttttttggctgctcagtatttgagctatgtctgcttcctgcccacctccagccagagaagaatcagtattgagggtccctgctgacccttccgtactcctggacccccttgacccctctatttctgttggctaaggccagccctggacattgtccaggaaggcctggggaggaggagtgaagtctgtgcatagatgggagagccttctgctcagaggctcactcagtaacgttgtttaattctctgccctgggggaaggaggatggattgagagaatgtctttctcctctcctaagtctttgctttccctgacttcttgatttgatcttcaaaggtgggcaaagttccctctgactcttcccccactccccatcttactgatttattttatattttcactccccaagagtcctaatatggattctgactcttaagtgctttcccgcccccctcactacctcctttta

SEQ ID NO: 194898 - DNA, 719 bp, Homo Sapiens
gtacaaaaaagttggcctagtttggttgctacttatataataagagcaaaaggagatgacttaaaatccgcttaatctcttccagtgtccgtgttaatgtatttggctattagatcactagcactgctttaccgctcctcatcgccaacacccccatgctctgtggccttcttacacttctcagagggcagagtggcagccgggcaccctacagaaactcagagggcagagtggcagccaggcccacatgtctctcaagtacctgtcccctcgctctggtgattatttcttgcagaatcaccacacgagaccatcccggcagtcatggttttgctttagttttcttagtccgtttcagtcccttccttggtctgaagaaattctgcagtggcgagcagtttcccacttgccaaagatcccttttaaccaacactagcccttgtttttaacacacgctccagcccttcatcagcctgggcagtcttaccaaaatgtttaaagtgatctcagaggggcccatggattaacgccctcatcccaaggtccgtcccatgacataacactccacacccgccccagccaacttcatgggtcactttttctggaaaataatgatctgtacagacaggacagaatgaaactcctgctgctcttttggcctgaaagttgggaatggttgggggagagaagtggcagccagcttattggtggtcttttca

SEQ ID NO: 194899 - DNA, 1362 bp, Homo Sapiens; identical to SEQ ID NO: 189225

SEQ ID NO: 194900 - DNA, 744 bp, Homo Sapiens
ctttgtacaaaaaagttggcaactgtggtcccgctctacaccccttctgctgctctcgtggccccctcgcgatggcgggcatcctgtttgaggatattttcgatgtgaaggatattgacccggagggcaagaagtttgaccgagtgtctcgactgcattgtgagagtgaatctttcaagatggatctaatcttagatgtaaacattcaaatttaccctgtagacttgggtgacaagtttcggttggtcatagctagtaccttgtatgaagatggtaccctggatgatggtgaatacaaccccactgatgataggccttccagggctgaccagtttgagtatgtaatgtatggaaaagtgtacaggattgagggagatgaaacttctactgaagcagcaacacgcctctctgcgtacgtgtcctatgggggcctgctcatgaggctgcagggggatgccaacaacctgcatggattcgaggtggactccagagtttatctcctgatgaagaagctagccttctgaacctcgcctgaagccagcctctctgccaagtcactcaggtcatgggcattgttcaagcctgagtggcagccgctcttgctcacctgttgaggaagggctggctcactgtccaccgtggcggcatctttaactggcctccactcaatgggaaactgactcgcctgtgaagacacagtggaagagctgaaaatgaatcacaagctttatgtatatgattttt

SEQ ID NO: 194901 - DNA, 343 bp, Homo Sapiens
gcccactttgtacaaaaaagttgggtggatacaaccccactgatgataggccttccagggctgaccagtttgagtatgtaatgtatggaaaagtgtacaggattgagggagatgaaacttctactgaagcagcaacacgcctctctgcgtacgtgtcctatgggggcctgctcatgaggctgcagggggatgccaacaacctgcatggattctaggtggactccaaagtttatctcctgatgaagaagctagccttctgaacctcgcctgaagccagcctctctgcaaagtcactcaggacatgggcattgttcaaccctgagtggtagccgctcttgctcac

SEQ ID NO: 194902 - DNA, 1239 bp, Homo Sapiens; identical to SEQ ID NO: 189236

SEQ ID NO: 194903 - DNA, 457 bp, Homo Sapiens; identical to SEQ ID NO: 189241

SEQ ID NO: 194904 - DNA, 1975 bp, Homo Sapiens; identical to SEQ ID NO: 189244

SEQ ID NO: 194905 - DNA, 896 bp, Homo Sapiens; identical to SEQ ID NO: 182314

SEQ ID NO: 194906 - DNA, 939 bp, Homo Sapiens; identical to SEQ ID NO: 189253

SEQ ID NO: 194907 - DNA, 960 bp, Homo Sapiens; identical to SEQ ID NO: 189256
  misc_feature (323)..(382): n is a, c, g, or t
  misc_feature (837)..(872): n is a, c, g, or t

SEQ ID NO: 194908 - DNA, 584 bp, Homo Sapiens; identical to SEQ ID NO: 189257
  misc_feature (384)..(405): n is a, c, g, or t

SEQ ID NO: 194909 - DNA, 1790 bp, Homo Sapiens; identical to SEQ ID NO: 182316
  misc_feature (393)..(405): n is a, c, g, or t
  misc_feature (1449)..(1458): n is a, c, g, or t

SEQ ID NO: 194910 - DNA, 839 bp, Homo Sapiens; identical to SEQ ID NO: 182319
  misc_feature (204)..(212): n is a, c, g, or t

SEQ ID NO: 194911 - DNA, 443 bp, Homo Sapiens
aactttgtacaaaaaagttgggtttccaaaaaagttggcagcgatggatgtggataccccgagcggcaccaacagcggcgcgggcaagaagcgctttgaagtgaaaaagtggaatgcagtagccctctgggcctgggatattgtggttgataactgtgccatctgcaggaaccacattatggatctttgcatagaatgtcaagctaaccaggcgtccgctacttcagaagagtgtactgtcgcatggggagtctgtaaccatgcttttcacttccactgcatctctcgctggctcaaaacacgacaggtgtgtccattggacaacagagagtgggaattccaaaagtatgggcactaggaaaagacttcttccatcaagcttaattgttttgttattcatttaatgactttccctgctgttacctaattacaaattggatgga

SEQ ID NO: 194912 - DNA, 435 bp, Homo Sapiens
ctttgtacaaaaaagttggcaaaatggcggccgcgatggatgtggataccccgagcggcaccaacagcggcgcgggcaagaagcgctttgaagtgaaaaagtggaatgcagtagccctctgggcctgggatattgtggttgataactgtgccatctgcaggaaccacattatggatctttgcatagaatgtcaagctaaccaggcgtccgctacttcagaagagtgtactgtcgcatggggagtctgtaaccatgcttttcacttccactgcatctctcgctggctcaaaacacgacaggtgtgtccattggacaacagagagtgggaattccaaaagtatgggcactaggaaaagacttcttccatcaagcttaattgttttgttattcatttaatgactttccctgctgttacctaattacaaattggatgga

SEQ ID NO: 194913 - DNA, 905 bp, Homo Sapiens
ttggcttggcgggaagatggcggccgtgcaggcggccgaggtgaaagtggatggcagcgagccgaaactgagcaagaatgagctgaagagacgcctgaaagctgagaagaaagtagcagagaaggaggccaaacagaaagagctcagtgagaaacagctaagccaagccactgctgctgccaccaaccacaccactgataatggtgtgggtcctgaggaagagagcgtggacccaaatcaatactacaaaatccgcagtcaagcaattcatcagctgaaggtcaatggggaagacccatacccacacaagttccatgtagacatctcactcactgacttcatccaaaaatatagtcacctgcagcctggggatcacctgactgacatcaccttaaaggtggcaggtaggatccatgccaaaagagcttctgggggaaagctcatcttctatgatcttcgaggagagggggtgaagttgcaagtcatggccaattccagaaattataaatcagaagaagaatttattcatattaataacaaactgcgtcggggagacataattggagttcaggggaatcctggtaaaaccaagaagggtgagctgagcatcattccgtatgagatcacactgctgtctccctgtttgcatatgttacctcatcttcactttggcctcaaagacaaggaaacaaggtatcgccagagatacttggacttgatcctgaatgactttgtgaggcagaaatttatcatccgctctaagatcatcacatatataagaagtttcttagatgagctgggattcctagagattgaaactcccatgatgaacatcatcccagggggagccgtggccaagcctttcatcacttatcacaacgagctggacatgaacttatatatga

SEQ ID NO: 194914 - DNA, 1442 bp, Homo Sapiens; identical to SEQ ID NO: 182322

SEQ ID NO: 194915 - DNA, 905 bp, Homo Sapiens; identical to SEQ ID NO: 182323

SEQ ID NO: 194916 - DNA, 618 bp, Homo Sapiens
tttgtacaaaaaagttgggtatagagctagttttaaaataatgatctcagatttttaaaaaggatataggaacctgcattgtcattctctgaattaagaactgatggtttctatcattatttagccccacctttgtattttaaaatccttcagaatacatttatgaaccaatgcgactggacttagccacacacaatggaaattcagaccttgactatttggtgtttccagttcacaaaggtgatgaagactgtcttgggagcagcttaatcccaaaatttgtacatttcttgctgctcctggcgtggaaacttaagtgagaccaccaaatacattggtcctgtccaattctactgaatgggggtggacctggcatttatctggccaaaaacaggagccagagaaatatgaatataccaaagttgtttgtttagcctccaacttaaattacattagtcaacttatagatactcatatgatcacttttctttttagatactacatcaactagattcaggagtatatcatttgcagtgcttgtattggtttaaaatgtaagattttaagatcctctaacactgtactaaaacatttcaataaaatcattctgactgcgtt

SEQ ID NO: 194917 - DNA, 1111 bp, Homo Sapiens; identical to SEQ ID NO: 189273
  misc_feature (192)..(225): n is a, c, g, or t

SEQ ID NO: 194918 - DNA, 781 bp, Homo Sapiens
  misc_feature (241)..(275): n is a, c, g, or t
cactcctgttcctctttccagggattaagcattcaacttcaaaagacaaaatttaagccaaaagacattagtaaggaagtaattccaattctaaacttcagaagttctgccagttgagaagtggccttccttgggcgctgggattgcagtggtcaggagcaggcgcactggcccttgcctggagtgcggctgggcagtggctgctgggtgagacaggtcaatctcacttgagaagctgcannnnnnnnnnnnnnnnnnnnnnnnnnnnnnnnnnntccctcagtgctgcccgcctgcacccccactcccaggcattcctttccctgagttgtgtggttgccagtaagacgcagaaatgccacagggcatagggggcacagccaccaccacaagaggcttctggggagatcagggtaagaaaaggaaatgggtaccagtcttaggggtgggccagcgagcaagttcatagcttgcctccagcccctctggagtccacacttgggaacgggagctaatactgttcggcactgcagtgtgactccgcacatacaagtagggcttggaggggcagccccttctcctggaaaggggtgggggaagaagagggcttctcagaggctaaaccttctgccttcatggccccagcagaacacagggctgaagagttggagaggaaggctggaactgacccgagatccccatggctgcctgggactggagtcaaatgggaaccccagcctcctttttccaagcttggcctagggccaacttttttgtacaa

SEQ ID NO: 194919 - DNA, 1450 bp, Homo Sapiens; identical to SEQ ID NO: 189276

SEQ ID NO: 194920 - DNA, 783 bp, Homo Sapiens; identical to SEQ ID NO: 189286
  misc_feature (108)..(117): n is a, c, g, or t
  misc_feature (555)..(597): n is a, c, g, or t

SEQ ID NO: 194921 - DNA, 229 bp, Homo Sapiens
aactttgtacaaaaaagttgggccgggttccatggggcagatcgagtgggccatgtgggccaacgagcaggcgctggcgtccggcctgatcctcatcaccgggggcatcgtggccacaactgggcgcttcacccaatggtactttggtgcctactccattgtggcgggcgtgtttgagtgcctgctggaaaacccccaggagaatagaaagaaggacaccaccaaggag

SEQ ID NO: 194922 - DNA, 744 bp, Homo Sapiens; identical to SEQ ID NO: 182373

SEQ ID NO: 194923 - DNA, 385 bp, Homo Sapiens
ttactacaagtcaataaatattgatccccaaagaagagctcggttatttatcagattactggtccatagagagctgaatgaaactgaaccaagcgattgctgggatgactgaagtcactcctgcttcttgggaaatgaagccacagccagctcatatatggcatatgctgttccaccaactgtaagaatcatggtggctctatacaggagggcatcagctaccccaccctttagatacagtggaatttcatcatcctcctggaacagtttttgcttctccggaactttatttttaaaatgcctgcgggaagcagtgcttatcgtcctctgcccaatctgacgaagagccagcagattccgcagccattttagagagaggttactg

SEQ ID NO: 194924 - DNA, 946 bp, Homo Sapiens
tatcaaatggagagggtgccccaacctgctgcatgtgacccagcacatcttccgcagtcaaaacacgcctttggccctcttctgaatacagctggtaaatgaagtcggtggtgtagttttcactgcagctctcatttctgagcacaaggcctctctggatggtggtcttcattttctccgtcaggtgctccacgttggactgcagatccctgatgtcgaagggctcttcgaaaatgtatgcggcatcagctccggccgcgagcccccccatgttggccaggtagccacagtagccgcccatggtctcgatgatgaacacgcgccgcttggttccgctggcggactgcttgatgcggtcgcaggtgtcggtgatagtgttcagggcggtgtctgccccgatgctgaaatcggaacccggcacattgttggacacagtagcgggaaccatgaccatggggacacagaactcctcgtgcttctcccgggcggctgacagctccaggagtcccaggtaggcctcgaatccaccgatgatcagcagcgcgttgatgctgtgcgtgcgcatctgtgtggcgatctcttccaagtacttccccgggagaacgcgttttgtcccaagaatggagcctccttggccggtccagcccccgacatctgtccagccgatttctttgatctggcccttggcgaagccgtcaaagccatcatagatggcgagcatcctgtggccgtcggcaatgcccacgcgcacagctgagcgtacggccgcgttcatcccagccgcgggtgcccccacgttgatgacagctacgttgcaattggtctttgggatctgatcatccggcagcttgatggcaagtcgcttgtaggtgttcaggttgcccgcaaagctcctccctcggagtcgaaccgcatcttgaaatctcctctcgtccatcgcctccaa

SEQ ID NO: 194925 - DNA, 434 bp, Homo Sapiens
actttgtacaaaaaagttggctgcttgctgcggcagaaacgccagaggtgcagctccagcagcaatggcagtgacggcgttggcggcgcggacgtggcttggcgtgtggggcgtgaggaccatgcaagcccgaggcttcggctcggatcagtccgagaatgtcgaccggggcgcgggctccatccgggaagccggtggggccttcggaaagagagagcaggctgaagaggaacgatatttccgagcacagagtagagaacaactggcagctttgaaaaaacaccatgaagaagaaatcgttcatcataagaaggagattgagcgtctgcagaaagaaattgagcgccataagcagaagatttatatgctaaaacatgatgattcagtgcacaccgtgtgccatagaacggaacatgtcattgcccacttctgtg

SEQ ID NO: 194926 - DNA, 1643 bp, Homo Sapiens; identical to SEQ ID NO: 182408

SEQ ID NO: 194927 - DNA, 326 bp, Homo Sapiens
ctttgtacaaaaaagttgggtgaagaggaaacaacaagaatttcatattttacttttattggtactccagtccaggcaacaaatatgaatgacttcaaacgagtagttggcaaaaaaggagaaagccactaaggtacaaaagacactggacaaccatattgcaatcagatctacagctcctggataattgcttgattctcgccagagactgtcaatgtttcattcattgccattaccaataaatcattgcttttgttcagatggtatcactagtgtttccattgtaatcttgacacatgcaattgtaaataaaagtcaccactttt

SEQ ID NO: 194928 - DNA, 1764 bp, Homo Sapiens; identical to SEQ ID NO: 189340

SEQ ID NO: 194929 - DNA, 476 bp, Homo Sapiens; identical to SEQ ID NO: 189365

SEQ ID NO: 194930 - DNA, 429 bp, Homo Sapiens
cctataatagcccactttgtacaaaaaagttgggctcgcgtcgcctttggccgcctccctaccgctccaagcccagccctcagccatggcatgccccctggatcaggccattggcctcctcgtggccatcttccacaagtactccggcagggagggtgacaagcacaccctgagcaagaaggagctgaaggagctgatccagaaggagctcaccattggctcgaagctgcaggatgctgaaattgcaaggctgatggaagacttggaccggaacaaggaccaggaggtgaacttccaggagtatgtcaccttcctgggggccttggctttgatctacaatgaatccctcaagggctgaaaataaatagggaagatggagacaccctctgggggtcctctctgagtcaaatccagtggtgggtaattgta

SEQ ID NO: 194931 - DNA, 732 bp, Homo Sapiens
tttgtacaaaaaagttggccaaggcgccccctcgctgtttcactcggatggcttcgcggtcgccgattggctgcgtgagcacgtcggcgggagggcgcgcgacactgcaccgcccctcccttcgcggcgcctgctctgtagagccggcggaaccgggtagcttggccaggttgtgaggaaccgcagcgcgccgcaggaccgggccgctgagcctgcagccgccccgcgccgtgacctgcgaccctagaccccgactccctttggctcagcccgcgcgccccaggcccggcccgggcggcgcgacgggaggatgagcggcgggcggcggaaggaggagccgcctcagccgcagctggccaacggggccctcaaagtctccgtctggagtaaggtgctgcggagcgacgcggcctgggaggataaggatgaatttttagatgtgatctactggttccgacagatcattgctgtggtcctgggtgtcatttggggagttttgccattacgagggttcttgggaatagcaggattctgcctgatcaatgcaggagtcctgtacctctacttcagcaattacctacagattgatgaggaagaatatggtggcacgtgggagctcacgaaggaagggtttatgacctcttttgccttgttcatggtcatttggatcatcttttacactgccatccattatgactgatggtgtacagctcccaagtgctcccctatcca

SEQ ID NO: 194932 - DNA, 1787 bp, Homo Sapiens; identical to SEQ ID NO: 182476
  misc_feature (116)..(144): n is a, c, g, or t
  misc_feature (412)..(433): n is a, c, g, or t

SEQ ID NO: 194933 - DNA, 1445 bp, Homo Sapiens; identical to SEQ ID NO: 182477
  misc_feature (221)..(263): n is a, c, g, or t
  misc_feature (365)..(375): n is a, c, g, or t
  misc_feature (384)..(639): n is a, c, g, or t

SEQ ID NO: 194934 - DNA, 2039 bp, Homo Sapiens; identical to SEQ ID NO: 182478

SEQ ID NO: 194935 - DNA, 1338 bp, Homo Sapiens
  misc_feature (663)..(673): n is a, c, g, or t
  misc_feature (1124)..(1147): n is a, c, g, or t
ctttgtacaaaaaagttgggaattttacagacattaaaaaggagaaatagcaggacctccagacacaccatatgaaggaggaagataccaactagagataaaaataccagaaacatacccatttaatccccctaaggtccggtttatcactaaaatatggcatcctaatattagttccgtcacaggggctatttgtttggatatcctgaaagatcaatgggcagctgcaatgactctccgcacggtattattgtcattgcaagcactattggcagctgcagagccagatgatccacaggatgctgtagtagcaaatcagtacaaacaaaatcccgaaatgttcaaacagacagctcgactttgggcacatgtgtatgctggagcaccagtttctagtccagaatacaccaaaaaaatagaaaacctatgtgctatgggctttgataggaatgcagtaatagtggccttgtcttcaaaatcatgggatgtagagactgcaacagaattgcttctgagtaactgaggcatagagagctgctgatatagtcaagcttgcctcttcttgaggagcaccaacatctgttatttttaggattctgcatagatttcttttaaactggcattcttgcctaatgatgttatctaggcaccattggagactgnnnnnnnnnnntccctgctctgtaaataaagctaattaaacgtctgtgtaaatttaaaaaggggaaatactttaattttttttcttaatagtgtaaaaattccctgagctaagctaaaaccatggaagaaacatgctactttagtgtttagcagtgtaccaagactagcaagagtttgcttcaggattttgttgaataattaagataatattttgagtgtgtcagggccattcaaattgttggtgttgcatcacagctaccttaactgtttttaacatggatcctctgtgcctgtgaatttacttgcatgcttgtacttgacttcttaggatgggtagctgaaaagaccaccattttaagcatttgagaattcttaaatatgaaatttattcagaattgaagatggtgacctattcagagcctttttgtcctttgtcaacagactgggacagtgtctgattnnnnnnnnnnnnnnnnnnnnnnnngccttgccacacacagctaatattctaatggtaaatttctctgtatcaggtggggaaatgttgctgaaggacagtatgtatcccttgcttcatttttaggtcgtaaggtttgggaatgtcttggtccagattcttccaaacctctttaaatttttcttaagtaatggtaaaaatggaaactgcccatttta

SEQ ID NO: 194936 - DNA, 1375 bp, Homo Sapiens; identical to SEQ ID NO: 189378

SEQ ID NO: 194937 - DNA, 878 bp, Homo Sapiens; identical to SEQ ID NO: 189387
  misc_feature (144)..(180): n is a, c, g, or t

SEQ ID NO: 194938 - DNA, 640 bp, Homo Sapiens
ctttgtacaaaaaagttggatgccgttctcttcttggcgtcgggaccctacctgacccatcagcaaaaggtgttgcggctttataagcgggcgctacgccacctcgagtcgtggtgcgtccagagagacaaataccgatactttgcttgtttgatgagagcccggtttgaagaacataagaatgaaaaggatatggcgaaggccacccagctgctgaaggaggccgaggaagaattctggtaccgtcagcatccacagccatacatcttccctgactctcctgggggcacctcctatgagagatacgattgctacaaggtccctgaatggtgcttagtatgactggcatccttctgagaaggcaatgtatcctgattactttgccaagagagaacagtggaagaaactgcggagggaaagctgggaacgagaggttaagcaactgcaggaggaaacgccacctggtggtcctttaactgaagctttgccccctgcccgaaaggaaggtgatttgcccccactgtggtggtatattgtgaccataccccgggagcggcccatgtagaaagagagagacctcatctttcatgcttgcaagtgaaatatgttacagaatatgcacttgccctaataaaaaatc

SEQ ID NO: 194939 - DNA, 910 bp, Homo Sapiens; identical to SEQ ID NO: 182491

SEQ ID NO: 194940 - DNA, 629 bp, Homo Sapiens; identical to SEQ ID NO: 182498

SEQ ID NO: 194941 - DNA, 946 bp, Homo Sapiens; identical to SEQ ID NO: 189421
  misc_feature (526)..(535): n is a, c, g, or t
  misc_feature (540)..(601): n is a, c, g, or t

SEQ ID NO: 194942 - DNA, 1221 bp, Homo Sapiens; identical to SEQ ID NO: 189428

SEQ ID NO: 194943 - DNA, 926 bp, Homo Sapiens; identical to SEQ ID NO: 189434

SEQ ID NO: 194944 - DNA, 948 bp, Homo Sapiens; identical to SEQ ID NO: 189435

SEQ ID NO: 194945 - DNA, 839 bp, Homo Sapiens
actttgtacaaaaaagttggcaagttcttcatcgaggaaatgatccgggacctgtgccaggcagacaagacttggaacgcagtgctgctgcgctatttcaaccccacaggtgcccatgcctctggctgcattggtgaggatccccagggcatacccaacaacctcatgccttatgtctcccaggtggcgatcgggcgacgggaggccctgaatgtctttggcaatgactatgacacagaggatggcacaggtgtccgggattacatccatgtcgtggatctggccaagggccacattgcagccttaaggaagctgaaagaacagtgtggctgccggatctacaacctgggcacgggcacaggctattcagtgctgcagatggtccaggctatggagaaggcctctgggaagaagatcccgtacaaggtggtggcacggcgggaaggtgatgtggcagcctgttacgccaaccccagcctggcccaagaggagctggggtggacagcagccttagggctggacaggatgtgtgaggatctctggcgctggcagaagcagaatccttcaggctttggcacgcaagcctgaggaccctcccctaccaaggaccaggaaaagcagcagctgcctgctctccagcctctggcaggaactcagggccctggagctgctggggccaagccaaggcctcccctacctcaaaccccagctgggcccgcttagcccaccaggcatgaggccaagggctccactgaccaggaggccgaggtctctaactcttatcttccacagggtccaagagttcatcaggacccccaaaagtgaatgagggggcaagg

SEQ ID NO: 194946 - DNA, 680 bp, Homo Sapiens; identical to SEQ ID NO: 189448

SEQ ID NO: 194947 - DNA, 1011 bp, Homo Sapiens; identical to SEQ ID NO: 182552

SEQ ID NO: 194948 - DNA, 410 bp, Homo Sapiens
tgtacaaaaaagttggctagaaccgtaccccaaacatgggactggaggacgagcaaaagatgcttaccgaatccggagatcctgaggaggaggaagaggaagacgaggaattagtggatcccctaacaacagtgagagagcaatgcgagcagttggagaaatgtgtaaaggcccgggagcggctagagctctgtgatgagcgtgtatcctctcgatcacatacagaagaggattgcacggaggagctctttgacttcttgcatgcgagggaccattgcgtggcccacaaactctttaaaaacttgaaataaatgtgtggacttaattttttcctgtcttcatcatctgggcatcagaatatttccctatggttttggatgtaccatttgtttcttatttgtgtaactgta

SEQ ID NO: 194949 - DNA, 1206 bp, Homo Sapiens; identical to SEQ ID NO: 189451
  misc_feature (634)..(775): n is a, c, g, or t
  misc_feature (901)..(984): n is a, c, g, or t

SEQ ID NO: 194950 - DNA, 261 bp, Homo Sapiens; identical to SEQ ID NO: 189452

SEQ ID NO: 194951 - DNA, 937 bp, Homo Sapiens; identical to SEQ ID NO: 189453

SEQ ID NO: 194952 - DNA, 1350 bp, Homo Sapiens
ttggagccagcctaccccatccagccgcccctgccgccgacgctcagcagttatgagcccctggccccgctcccctcagctgctgcctctgtgcctgtgtggcaggaccgtaccattgcctcctcccggctgcggctcctggagtattcagccttcatggaggtgcagcgagaccctgacacgtacagcaaacacctgtttgtgcacatcggccagacgaaccccgccttctcagacccacccctggaggcagtagatgtgcgccagatctatgacaaattccccgagaaaaagggaggattgaaggagctctatgagaaggggccccctaatgccttcttccttgtcaagttctgggccgacctcaacagcaccatccaggagggcccgggagccttctatggggtcagctctcagtacagctctgctgatagcatgaccatcagcgtctccaccaaggtgtgctcctttggcaaacaggtggtagagaaggtggagactgagtatgccaggctggagaacgggcgctttgtgtaccgtatccaccgctcgcccatgtgcgagtacatgatcaacttcatccacaagctgaagcacctgcccgagaagtacatgatgaacagcgtgctggagaacttcaccatcctgcaggtggtcacgagccgggactcccaggagaccctgcttgtcattgcttttgtcttcgaagtctccaccagtgagcacggggcccagcaccatgtctacaagctcgtcaaagactagggtgccctctgcgcctccttaaggatgcagggtgagcatctcctctccacacctgcctggcacccctgggggggtccaggattgaggattcatctacctgccaggcctcaggcccaggacccaggaggcctccccacctaccccagcacacacactccctgccactgttctgcgctttaattgtgggagaagagaggagaggagggctcagcggtggggcagcctgtccggggcgctgacccaccatcaccctgctctgcccagcctcgcgtgacctcagagaggtggggataggggacaccttcagcctccagcatgtgtggccactgtacccccacccacccttgggggagcatgatgggcaggtgagggcaggatggagaccaagggagtcagtgagcagaggccctgggagtgtccggttggggttggactgaggacagagggggccccacacttccttgcccctttgtgtcccaggcctggtgcccagactccttgcatgggcttgtgtggtcctcaaactccgcacaccgagcgtaggtctctggggttccagatgaagtgcccaggctccaggaaatt

SEQ ID NO: 194953 - DNA, 934 bp, Homo Sapiens; identical to SEQ ID NO: 189462
  misc_feature (90)..(153): n is a, c, g, or t

SEQ ID NO: 194954 - DNA, 1633 bp, Homo Sapiens; identical to SEQ ID NO: 189465
  misc_feature (535)..(595): n is a, c, g, or t

SEQ ID NO: 194955 - DNA, 1064 bp, Homo Sapiens; identical to SEQ ID NO: 189493

SEQ ID NO: 194956 - DNA, 1159 bp, Homo Sapiens; identical to SEQ ID NO: 189505

SEQ ID NO: 194957 - DNA, 1125 bp, Homo Sapiens; identical to SEQ ID NO: 189515
  misc_feature (543)..(627): n is a, c, g, or t

SEQ ID NO: 194958 - DNA, 825 bp, Homo Sapiens
  misc_feature (183)..(243): n is a, c, g, or t
ttggtgatgaagaagaggaggaagatgaggagagctcctcggagggcttggaggctgaggactgggcccagggagtagtggaggccggtggcagcttcggggcttatggtgcccaggaggaagcccagtgccctactctgcatttcctggaaggtggggaggactctgattcagacagtgagnnnnnnnnnnnnnnnnnnnnnnnnnnnnnnnnnnnnnnnnnnnnnnnnnnnnnnnnnnnnngtgatgaggtgcctgtacccagctttggggaggccatggcttactttgccatggtcaagaggtacctgacctccttccccattgatgaccgcgtgcagagccacatcctccacttggaacacgatctggttcatgtgaccaggaagaaccacgccaggcaggcgggagttcgaggtcttggacatcaaagctgagtcactggacctagctgtgcccccaacctagattggcagcaccaccccagggcagaggactctctgggcacccgctgtgcatggagccagagtgcagagccccagatcctttagtaatgcttcccctggtcctgcaacaggcccggtcacctcggccgggcccggggctgagggtcagcctcactgcctgcttattgcctctttctcagaatcctctttcctccccatttggccctgggctcaggggaccaggtggggcgggtggggagctgtccggtgctaccacaccgtgccctcagtggactaaccacagcagcagccacggatgggccctggagggttccgggccggaagagtgcctctcccctctgccatcctcatccaggtc

SEQ ID NO: 194959 - DNA, 1451 bp, Homo Sapiens
aactttgtacaaaaaagttgggtcactgacagtttatgtaaacattaatttcaacatggctgttgcattttaattatcaaaaatgtttaaaatgctttaagatgacacatagagaacatacacatacatacaaattagtgcatttgtaatttgttaaatttgaaatgaactattaccttgaaatatagtctttaaaaatttttaatggttaaagattaaattgaatgaaactgtagtctaatggtaactgatgatctgaatccgtctctctgataacctcctttccattttgaaaatgtgtcttattatacatggaagctagtaactacgtgaatgctgttggcaggatgagggtctgggtacctcagtctcttgtcctgtttccttcccccaaatccaccattgtgaagttgccaaccccctgccgccttcccctgccaagtacatgttgtcagagtcagccctataatgttcatttcccctcttgtttgtgggattatggatctctgcagaaatctgcatgccaattaacccatttctaaagcagaatccattttgcatgtcacaatcaagatgtacttggcaatctaagacacactgggagactgtaagaggaattaatatagaaaagctcttaattataataacatttggaagaaatttttcctttgttttgtaaagtggctaaggttgtaggagtgtgtggtatttattaccttttaaatgaactgtaaatttgccttagaaatttgtttaaaaggctagcaagtgagacccttgaggatgatcatatactaataaagattaccaaaagaaacttcttgtcctgttaggtcagtgttatgatttaatggttttaattacttaaccaattttaagaattgacaatttttaaaaatatttttttctaccattctaaagtaatgtcttttgttgtgggtttatgtgtaactacaggattttggaacataaacattttgaaggatagtcaatggtatttagtcttggatataaaaatagagaaaatttatagctttatgttattaaaataatttatcacacagagtgatttgaggttttcgcagagtagatttgtttgactcatggtttattagtctggattacttaagaacaatatgttgattttaatgttaattcccactaaatatataatattgataaatacatgtgaaattaatattgtttggaaaatgtagaggacacagctgggaattatgaatgcttttttcttaataatttggtgtgtgtggctttgaatggttctgctgatgcatcatggaaagacagcaggaactgtagcctgccatcaaaactgtatcaactcttttaatgagcatgtgactgtattacgtacaatttgaagaatataagtactgatgataaagtctagtatgcataataggatttggaggcatttcagaatttccttt

SEQ ID NO: 194960 - DNA, 923 bp, Homo Sapiens
  misc_feature (303)..(318): n is a, c, g, or t
ctttgtacaaaaaagttggcaagtaataaaacaactgcttgagttttgtttgtaaaatacataattaatatttgacctacctcaaaatgtattgaggatctgtgaaatgctaagtgcccaaaataaaatattgctgattgtctttttattaaaagtaaatttcctcattaagccaacctgccttctgtaagtcacagtgcttaaatctcaggatttttcattaggagagacctgtcgttaaggatttgtaggtataattgcttagcctccattattggtgcttgggatagagaggttttagannnnnnnnnnnnnnnngttctgcctcaaagctcagtttattgaagacatttgtaagctattggatcatcacttgaatcaagattttgactagtgagcttaattgtccatttcttacaatttcaaagttacagtctcagaaatggttaattttaataactgtcctatcataaattaatgttggaataaattgaagttgttgataaatacttcatgaaaactaaagtctgaaataaattacttgttttatgtccaatagctactacatttgatagaacagttttgaggaacatttcattcttgaacgcagcatctgacatggttctcagcaagttggaatagtaaggattattggcttgtttcgatgagtggaagcggcatgtttgtagcatacaagttattcaataatcttgtgctgatgacctaaaaatatgtcttaactattcatcaaggaaagcctggtgaagcctttacttgttactacttcaacagttggaattagttgctctttttacttgatgaaacaaaactatacctctgaatatttatggatactttttactaaatcaggcttgtgttcttaatccaaattagtaaagttttatggaagctgaaatgtaata

SEQ ID NO: 194961 - DNA, 948 bp, Homo Sapiens; identical to SEQ ID NO: 189595

SEQ ID NO: 194962 - DNA, 918 bp, Homo Sapiens; identical to SEQ ID NO: 189616

SEQ ID NO: 194963 - DNA, 518 bp, Homo Sapiens
gggactttgtacaaaaaagttggggttatccaagcctgaaaactatgacggtgagtgactggtatgagcaacatcggaaatatggagcattaccggatcagggaatagccaaggcagcaccagaggaattcagaaaagcagctcagcaacaggaagaacaagaagaaaaggaggaagaggatgatgaacaaacactccacagagcccgggagtgggatgactggaaggacacccatcctaggggctatgggaaccgacagaacatgggctgatcttcccacaacaccacaggactgcagggtgcacaactcccctgccaaggaaaaccatgcagtcctctcctccctggtctcctgcttcagctctgtacaacgagggcaaagatgctaaatcttgctttgcattcagtaaagtgtcaagtgattaagtgtgtatttgtaccctagatgatatgaaccagcagtcttgttttggcatcatcctcatcatgttgtattccagcttcttaagtggaagga

SEQ ID NO: 194964 - DNA, 774 bp, Homo Sapiens; identical to SEQ ID NO: 182775

SEQ ID NO: 194965 - DNA, 996 bp, Homo Sapiens; identical to SEQ ID NO: 189683

SEQ ID NO: 194966 - DNA, 912 bp, Homo Sapiens; identical to SEQ ID NO: 189706

SEQ ID NO: 194967 - DNA, 863 bp, Homo Sapiens; identical to SEQ ID NO: 189717

SEQ ID NO: 194968 - DNA, 1024 bp, Homo Sapiens; identical to SEQ ID NO: 182809

SEQ ID NO: 194969 - DNA, 844 bp, Homo Sapiens
ctttaaaggcaactttgtacaaaaaagttgggcagtttctaggtccccactgtccccgccgtcccgccccttcgcgtcccgggaaccggctggcttccgagccgcactcgccgatcctccaggcatgccccgctacgagctggctttaatcctgaaagccatgcagcggccagagactgctgctactttgaaacgtacgatagaggccctgatggacagaggagcaatagtgagggacttggaaaacctgggtgaacgagcgcttccttataggatctctgcccacagtcagcagcacaacagaggcgggtatttcttggtggatttttatgcacccaccgcagctgttgaaagcatggtggagcacttgtctcgagatatagatgtgattagagggaatattgtcaaacaccctctgacccaggaactaaaagaatgtgaagggattgtcccagtcccactcgcagaaaaattatattccacaaagaagaggaagaagtgagaagattcgccagattttagccttatatgtaattccttcacatttgggcagcatggacgagaaggaagaatttgcaagtttggcctttatataagcatgtgttgcaggtgctgtttgatttttctaaggtatttttagcccttgatcccctttgcttgcgagaggtggggaactgctcactgacagcttctctgtaacctgcagtaccagtggatcattcttgattttgttttcattagtgtcatttctttgtcattgaggacttttccccttacaacagtaacaccattttttgaagagcaaaatttataatacctcctggggattgtgagctagtcattc

SEQ ID NO: 194970 - DNA, 1105 bp, Homo Sapiens; identical to SEQ ID NO: 189769
  misc_feature (200)..(261): n is a, c, g, or t

SEQ ID NO: 194971 - DNA, 726 bp, Homo Sapiens; identical to SEQ ID NO: 189790

SEQ ID NO: 194972 - DNA, 932 bp, Homo Sapiens; identical to SEQ ID NO: 189799

SEQ ID NO: 194973 - DNA, 1343 bp, Homo Sapiens
ttggcttttgaggagttttatgagatttggaaccaggggcttaagttttaaggctagactgtggggcatgaggagagatcttgacttccccgagaacccagcacaggacctggaacacagagcctctttgtccagtgagagcgtgacttgtctgctgcctgtctctagagccttcatcgtctggctggccaacggggacaccctccgtgtcttcaagatgaccaagcgggaggatgggggctacaccttcacagccaccccagaggacttccctaaaaagcacaaggcgcctgtcatcgacattggcattgctaacacagggaagtttatcatgactgcctccagtgacaccactgtcctcatctggagcctgaagggtcaagtgctgtctaccatcaacaccaaccagatgaacaacacacacgctgctgtatctccctgtggcagatttgtagcctcgtgtggcttcaccccagatgtgaaggtttgggaagtctgctttggaaagaagggggggttccaggaggtggtgcgagccttcgaactaaagggccactccgcggctgtgcactcgtttgctttctccaacgactcacggaggatggcttctgtctccaaggatggtacatggaaactgtgggacacagatgtggaatacaagaagaagcaggacccctacttgctgaagacaggccgctttgaagaggcggcgggtgccgcgccgtgccgcctggccctctcccccaacgcccaggtcttggccttggccagtggcagtagtattcatctctacaatacccggcggggcgagaaggaggagtgctttgagcgggtccatggcgagtgtatcgccaacttgtcctttgacatcactggccgctttctggcctcctgtggggaccgggcggtgcggctgtttcacaacactcctggccaccgagccatggtggaggagatgcagggccacctgaagcgggcctccaacgagagcacccgccagaggctgcagcagcagctgacccaggcccaagagaccctgaagagcctgggtgccctgaagaagtgactctgggagggcccggcgcagaggattgaggaggagggatctggcctcctcatggcactgctgccatctttcctcccaggtggaagcctttcagaaggagtctcctggttttcttactggtggccctgcttcttcccattgaaactactcttgtctacttaggtctctctcttcttgctggctgtgactcctccctgactagtggccaggtgctttttcttcctcccaggcccagtgggtggaatctgtccccaacctggcactgaggagaaatggt

SEQ ID NO: 194974 - DNA, 631 bp, Homo Sapiens
actttgtacaaaaaagttggcatttaagtgcacaaatgataacaagaggattattctcccgttctcaagggagtcagatcaggggaactattctagggtatgttgcggggtattaagcaggaaaccactgtgtggtggggggcactgggcttgttggggccagaaatgtccacgtcctgagctttctcctggagcatgtgcagagagtttggcaacgttcgctctcttgaccagaccccttctccctgacctggctcttccagccagggcacgagccctccttctatacctgctccccttcccccagtggggactgagttatgggagaaggggacatatttgtggccaaaatgatactaaccaaaggggcttccttgtcagggcctggtggagttggtgggtcatcggggctcactgcctcctgcccttctctcctgtctgacccccacttagcccttctctccttgcagcctagcagtttatagttctgagatggaaagttgaagggggcaagcaagacctctcctcaacccatgcccagctgtcaggagagaagtgcagggaggaaggccttgtgctgggacaacctctctcttgccttaccttcagagaggggactattccctgaccc

SEQ ID NO: 194975 - DNA, 282 bp, Homo Sapiens; identical to SEQ ID NO: 182886

SEQ ID NO: 194976 - DNA, 1185 bp, Homo Sapiens; identical to SEQ ID NO: 189844

SEQ ID NO: 194977 - DNA, 1556 bp, Homo Sapiens; identical to SEQ ID NO: 189848

SEQ ID NO: 194978 - DNA, 776 bp, Homo Sapiens
tttgtacaaaaaagttggcagcctgtgtgctgtgtggcaacagcattctggttcccactgccaagatctcccaccactctgctgggatctgcagtggcagggagtgggggttgtgtaaaggggaagtcatcttttgagatccagatagacatggtttgtgcacttacgtccagatgggaagcatccttcctgcaaccctaaaataatcatgcagcctctcagacggacgccatcggtcccaaggccttaggtggaggaagcaaagcaggccaggcctgtcctgtccgtggacctctaccttctggactccctacgggtgcagagcacttgggtttctctacagccatcgtggcccacttgacactgtgctcctccatcagctggtcacatgccaacacgttcccagcccctgaggcagctccagggtgccccacctgctcctgaggtgggtccctaccctgctgctcctcttcatcctttcccttttgtcctgaaagggaggagcaatggtccaggcattaattccacccagggaattttagctatgccctcatgtcccagggagagagccacacgcctgttttccatttatagcaagattgtttgcatacttttgtaatgaaggggagtgtccagtggaaggatttttaaaattatctttatggatagctcaagtctctgccatttgtaattttttggctcttagctccgattggagacgcttcttccttgtgcatgtgagttgactgatgtttgtgagtgtaaatgcattttgg

SEQ ID NO: 194979 - DNA, 1233 bp, Homo Sapiens; identical to SEQ ID NO: 189856

SEQ ID NO: 194980 - DNA, 489 bp, Homo Sapiens
  misc_feature (446)..(446): n is a, c, g, or t
ggcggcatgcctaacacatgcaagtcgaacgagaccttcgggtctagtggcgcacgggtgcgtaacgcgtgggaatctgccctggggtacggaataacagtgagaaattactgctaataccgtatgatgacgtaagtccaaagatttatcgccctgggatgagcccgcgtaggattagctagttggtggggtaaaggcctaccaaggcgacgatccttagctggtctgagaggatgatcagccacactgggactgagacacggcccagactcctacgggaggcagcagtggggaatattggacaatgggcgaaagcctgatccagcaatgccgcgtgagtgatgaaggccttagggttgtaaagctcttttacccgggaagataatgactgtaccgggagaataagccccggctaactccgtgccagcagccgcggtaatacgganggggctagcgttgttcggaattactgggcgtaaagcgcacgta

SEQ ID NO: 194981 - DNA, 1000 bp, Homo Sapiens
gagttcttcaaaatggttatattaaaatgatatttttattaagcttcaataatgaaaaacaatgtgatttaatatgtgtatttttatattattgtatggattaattgttaattcagcatttaatggctaacttaaatatgattggaaaagaaacttcaagttgccattgcttttacctaaagtttttaaagtctgaaagatttcagcaaatgcattaagcaggaatgtgtgacatcttcttttagattgcttgtctaatttggagagattaaaaatggtaaaatgcaactttgagtctctttacctttgcatatttaaaggtacaatagtgtggtgttggtaattgtaagtaagcttttctgtgctatgtctttggagtgaaaattcatgttttttttctgaattacataaatgcttttgttttattttgtataatgactgtcttttagatctgaataagtcactttaaaaccttggcctatgaactttgccttatcaatcatgaatctagatgaatgctatctagttcttggttcagttttacctatttttatttttggttcactgcttgcttgagcatagctgggatttgtagcccattttctaggcttattgcaatctcactgtggtattttatagaagctattacaactgataggctagcttcatggtattgatgatacatggcttaaccatactaaaagctgctttccctctctaaattgtaaaaaggtgatgaagtttcacttgatggagacatactatatatgtgtgtttatcatggaactagtgcattaggccataagctgtttttctggtctatgttttttgtatttaaaactttactgaagacaatggactccttcgggttttctttctttcaaccctgaattgtccttgtttgaatttttaagtactgtaattttttttttcaataaaatctctgacttgggcaagaaaggtaaaaaaaaaaaaaaaaaaaaaaaaaaaaaaaaaaaaa

SEQ ID NO: 194982 - DNA, 1000 bp, Homo Sapiens
agaagaagaagaagaaaagaaattgatcctcccagtcttaaagtttgaaactagtgtttgtcttatctgagttccttcctcaggaaactgacccttgggcctcccagatagtatcaaggaactgaatcttaccagatcactgcatccagacaatgagatgccagaccccaacatccaccaggattgcctaaccaaccatctcctttctgttgaccaaatcctcttccttactgctccctaattcctgttttctcacatgtagttacatttcttccctgcaatataaacccctaaatttagccaattgaggagacagatttgagactaatctcccattctcctcagctacagtacctgaataaagccttcttttctggcgatactagttatctgagtgattggttttctgtgagacaagcagcaggacctagacagaacccctcgtgttttggtaacaatggactataagagtacattatcctgcctggataattattttaaaaatttatagagattatgttgcccaggctggtcttaaactcctggcctcaagtgatccctctgcctcagcctcctaacattctaggataacaggcataagccaccacacctggcctgtccaaaatatagctactctgcctttcttctggttcatgttagcatggtttatctttctctgtcctttgaatctatttgtacctttatatttaagattggcttcttatagacaacatatgtctgggtctggttttttctccactctaacagtctttgtctttgaatttgtgtatttagacaattgatccttaaagtgattattgatatagttggatcaatatctaacatagttattactgctttctaataatttgccattgttctttgtgtgttttttgtcttcaattctttttctgccttcttttttgtttgtttgtttgttttgttttttaagagacagggtcttgctctttgacccaggctggagtgcagtggtaggatc

SEQ ID NO: 194983 - DNA, 1000 bp, Homo Sapiens
ttgggaaacctgtttttttctctactctccatctctgctgctctcatgctttaaattgataaaatatgggctcaaaaaaagaaagccgccaaagactcttatccttattggtgccccatcattggccaccccagccataggtgtgtgctgttggtgggaaatggtctccttcctcagcgttgtgtttgggttactggtgaggccagctcacagagtgacatcatggtcaccagtacatgtcgctggagtaaaatcttgcctttagaaactaggttgagctgttcagaaaggtcaattctcttctgtattccccctcaacatttatctgggtctaaagctcagcactgagtcacaatttcacacaagatcaaagtgaggcagtgttaggaaaccatgggctgggtgcagtgcctctcgcctgtaatcgtagcactttgggaggccgaggcgggcacattgcttgagctcaggagttcaagaccagcctgggcaacatgacaaaaccctgtctctacaaaaatacaaaaattagctgggtgtggtggggcatgcctgtagtcctggctactcaagaggctgaggtgggaggattgcttgagcgcaggaggcggaggttgtagagccaagatcacaccactgcactccagcctgggtgacagagcaagaccctgtctcaaaaaaaaaaaaaaaaaaaatggaagttgtggtcacaatgcccaggcttctttgttatagtggcacgctgggttacttgccacacacagatcactcctcccagggctgctggcacacactgattgtggggagttcaagaggccttttccccttgagggtgtggctgtccccctttcaggcgtgtggcgtcattcatggaggaagtgctggctctacgtagcacacgcacagtggcactaggacctgcgtgcctggccctcagtgggtagggcggtgctgcctaggcacacagcagcgcttacgggccccaggtgcctactaggct

SEQ ID NO: 194984 - DNA, 1000 bp, Homo Sapiens
catgaactcctgcttttcaatctgattacctcaaactgaaaagcaggtgaaaggaggaatatttcagtgtgtttttacatctgaatccaagggatccaagtggcccagcagaaacggaattcttgttaaaatgactgatgattctcgtgcatgtgaaaggctctggggaatgaatacctgtttggtccaaacttactgtatcataatgctgtatatgttgaaaacgtaatacctgttaatgtcctaatgaatcacgttttgcagaaaacaccgtaagaaacacttcagtctttctgtagagtttccatgcatatttcaccatggttcgcactctgatcctcatctggtttagaaagcaattcagtttctttcaaaccaccataacctaagtgctgccccatccttcacctttaccctagaaaatctgagaatccattggtgtgtactgtgtgacacaatgccaacaagcctctggtttctaatactggcaggaccaacacacatactttagtgggaatataatctgtttagacgataatagagggaaatgccataattaacaaatctcccttcactcaccactatcctcattcttgcagttgtcaaggtgtaagcctcactgtaagttacaaagctaccactcccctctttaagaacacatagcttaggattgccttggcgatgtgggctcttttttggttccatatgaacttaagtagttttttccaattctgtgaagaaagtcattggtagcttgatggggatggcattgaatctgtaaattaccttgggcagtatggccattttcacaatattgattcttcctacccaagagcatggaatgttcttccatttgtttgtatcctcttttatttccttgagcagtagcttgtagttctccttgaagaggtccttcacatcccttgtaagttggattcctaggtattttattctctttgaagcaattgtgaatgggagttcactcatgatttggctctct

SEQ ID NO: 194985 - DNA, 1000 bp, Homo Sapiens
gaccagaaggccaaattcttctctttcaatacatcagtttgcctccaagaatatactaaaaaaaggaaaattaattgctaaatacatttaaatagcctagcctcattatttactcatgatttcttgccaaatgtcatggcggtaaagaggctgtccacatctctaaaaaccctctgtaaattccacataatgcatctttcccaaaggaactatcaaagaatttggtatgaagcgcaactctcccaggggcttaaactgagcaaatcaaatatatactggtatatgtgtaaccatatacaaaaacctgttctagctgtatgatctagtctttacaaaaccaaataaaacttgttttctgtaaatttaaagagctttacaaggttccataatgtaaccatatcaaaattcattttgttagagcaggtatagaaaagagtacataagagtttaccaatcatcatcacattgtattccactaaataaatacataagccttatttgcagtgtctgtagtgattttaaaaatgtagaaaaatactatttgttctaaatacttttaagcaataactataatagtatattgatgctgcagttttatcttcatatttcttgttttgaaaaagcattttattgtttggacacagtattttggtacaaaaaaaaagactcactaaatgtgtcttactaaagtttaacctttggaaatgctggcgttctgtgattctccaacaaacttatttgtgtcaatacttaaccagcacttccagttaatctgttatttttaaaaattgctttattaagaaattttttgtataatcccataaaaggtcatatttttcccattcttcaaaaaaactgtatttcagaagaaacacatttgaggcactgtcttttggcttatagtttaaattgcatttcatcatactttgcttccaacttgctttttggcaaatgagattataaaaatgtttaatttttgtggttggaatctggatgttaa

SEQ ID NO: 194986 - DNA, 1000 bp, Homo Sapiens
acggcaggactcctatagcccccagaatcctgccgttagtcacaaggcatccctgaactccactatactccagggccccgcggacgctggtgtggttggtggccaatcgtggaaccgcgcatgggagccagccaggggtgctgcgtcctgggacacctggcgcaacaaggcggtggtgcctcccaggcggtccggggagccaatggtgtccatgcaggctgcagaggagatccgcatcctcgcagtgatcactatccaggcgggcgtccgtggctacctggcgcgtcgcaggatccggctgtggcaccggggggccatggtcatccaagctacttggcgcggctaccgtgtgcggcggaacctggcacacctctgcagagccaccacgaccatccagtctgcctggcgcggctacagcacccgccgggaccaagcccggcactggcagatgctccaccccgtcacgtgggtggagctgggcagccgggccggggtcatgtctgaccgaagctggttccaggatggcagagccaggacagtatctgaccatcgctgcttccagtcctgccaggcacacgcttgcagcgtctgccactccctgagctccaggatcgggagcccgcccagcgtggtgatgctagtgggctccagccctcgcacctgtcatacctgtggacgcacacagcccacccgtgtggtgcagggcatgggccagggcactgagggccccggggcagtgtcttgggcctccgcctaccagctggctgccctgagtcccaggcagccgcatcgccaggacaaagcggccacagccatccagtccgcctggaggggctttaagatccgccagcagatgaggcagcagcaaatggcagcgaagatagttcaagccacctggcgaggccaccatacccggagctgtctgaagaacacagaggcgctcttgggaccagcagacccctcggccagctcacggcacatgcattggcctggcatctag

SEQ ID NO: 194987 - DNA, 519 bp, Homo Sapiens
tggggccagggctggacatggcccccggtccctggcctgtgtcctgcctgcgtggtggccccttgggcctcacatatttgtcccttctgctcatccctgctgcaggtgcctcctcctgcccccgcactccactcccagccatggctccccttccccaggcaagctggaacctactgtgaatgcagccttggcctcagccgcgaggccctcatcgccctccttgtggtgctggcgggcatcagtgccagctgcttctgtgccctcgtcatcgtggcaattggtgtcttgcgggccaagggtgaaacatgcccgagacaagtggacaacaggttggtggagaattttggggtccaggaagatctcatggacctgcacccggtttacgtggagtcccagctaatggacgctgacctggaggtctccctggtgccaccactagaggatcagagccttgtggccatccccatggaggcttcttcagaggagccgccaccacccccgcccctaccacctgagtag

SEQ ID NO: 194988 - DNA, 1000 bp, Homo Sapiens
aaatatcacgtgaggcaatgtgggaagccaaaccctgatcaaacacaataccaggaggagaaaataattattaccattgcagccgaggaaatggaatgggattattctcctagtagaaaccaaacgagcatgtatgtggacagaagtggaacacttcttgggtccaaatacaagaaagtcttatatcgtcaatatgatgataacacgttcacaaatcaaacaaaaaggaatgaaggtgaaaaacatctcgatatactaggtattggtccattaatattgctcaaccctggtcaaataattcaaattatctttaaaaataaagccgcaagaccgtattctattcatgctcatggagtgaaaacaaataattccactgttgttccaactcagccaggagagattcaaatatatacttggcagatacctgatagaactggtcctacctcactggactttgaatgcataccttggttttactattcaactgtatctgtggctaaggaccttcacagtggactggtaggccctctctctgtatgccgcaaagacatcaaccccaacatagttcaccgtgttctccacttcatgatatttgatgagaatgaatcctggtacttcgaagacagtatcaacacctatgcttcaaaaccaaacaaagtggacaaggaaaatgataattttcaactcagcaaccaaatgcacgcaattaacggaagactgtttggaaataaccaaggtataacattccatgttggggatgtagtgaattggtatctgattggcatagggaatgaagctgacctgcacacagttcactttcatggccatagctttgaatacaagggagtgtatcaatctgatgtttatgaccttcctcctggggtctatcgaactgtaaaaatgtatcgaagagatgttggaacctggttattttattgccatgtttttgagcacattggtgctggaatggaaagcacttacactgtacttgaaagaaaag

SEQ ID NO: 194989 - DNA, 1000 bp, Homo Sapiens
cgatatcattgtctttaacccgcccgacatggacagccagacccgccacatggccctcagcagcctctttatggaagtcctgatgatgatgaacaacgcgactattccaacagcagagttccttcggggcagtatccggacctggattggccaaaaaatgcatgggctggtggtgctgccccttttaacagcagcctgccagagcctggcgtccgtccgccacatggctgagactacagaagcctgcatcactgcctacttcaaagaaagccctctcaatcagaattcaggatggggacccattctggtatcccttcaggttcccgagctcaccatggaagagttcctgcaggagtgcctcaccttgggcagttacttgactctttacgtctacttgcttcagtgtttaaacagcgaacagactttaaggaatgaaatgaaagtgctgctcatcttaagcaagtggctggaacaggtgtacccaagctccgtggaggaagaggcaaagctgtttttgtggtggcaccaagtccttcagctctccctcattcagacagagcagaatgactccgtcctgacagaatctgtcattcgaattctgctcttggttcagagcaggcagaacctcgtggctgaggagagactcagctctgggatcctgggggcaattgggtttggccggaagtcgcctttgtctaacaggttccgagtggttgcccgaagcatggctgccttcctttcagttcaggttcctatggaagatcagatccgtttgaggcctggctctgaattacatctgacccccaaagctcagcaggctctgaatgctcttgaatccatggcatcaagtaagcagtatgttgaataccaggatcaaatattgcaagccacccaatttataaggcatcctggccattgccttcaagatgggaaaagcttcttggctcttctcgttaactgtctgtatccagaagtgcattatttggaccacatacgatag

SEQ ID NO: 194990 - DNA, 1000 bp, Homo Sapiens
ggaggtggtcagctcccctgggagcagtccccgaagctctcccaggcctgagggtaccactcttcgacagggtccccctcagaaaccctacaccttcctggaggagaaagccaggcagggccgctttggtgttgtgcgagcgtgccgggagaatgccacggggcgaacgttcgtggccaagatcgtgccctatgctgccgagggcaagcggcgggtcctgcaggagtacgaggtgctgcggaccctgcaccacgagcggatcatgtccctgcacgaggcctacatcacccctcggtacctcgtgctcattgctgagagctgtggcaaccgggaactcctctgtgggctcagtgacaggttccggtattctgaggatgacgtggccacttacatggtgcagctgctacaaggcctggactacctccacggccaccacgtgctccacctagacatcaagccagacaacctgctgctggcccctgacaatgccctcaagattgtggactttggcagtgcccagccctacaacccccaggcccttaggccccttggccaccgcacgggcacgctggagttcatggctccggagatggtgaagggagaacccatcggctctgccacggacatctggggagcgggtgtgctcacttacattatgctcagtggacgctccccgttctatgagccagacccccaggaaacggaggctcggattgtggggggccgctttgatgccttccagctgtaccccaatacatcccagagcgccaccctcttcttgcgaaaggttctctctgtacatccctggagccggccctccctgcaggactgcctggcccacccatggttgcaggacgcctacctgatgaagctgcgccgccagacgctcaccttcaccaccaaccggctcaaggagttcctgggcgagcagcggcggcgccgggctgaggctgccacccgccacaaggtgctgctgcgctcctaccctggcggcccctag

SEQ ID NO: 194991 - DNA, 535 bp, Homo Sapiens
tggtgaaatctcggctcattgcagccccttccttccaggctcaagtgatcctcccacctcagccccgggtagctgggactacaggtgtgcacgagcacacccggctaatctttgtattttttgtagacagaaggtctcaccatgttgcccaggatggtctcgaactcctgggctcaagcgacctacctacctcggcctcacaaagtgtgcacattgtaatatcgtgatttcatatttggagaatcagcaaccaaccagccaaccatgttgcttttataagacagagctgagaaagcaaagcttggctgtcgtcttggctctggtaccacccacgagatgcgggcgattctcagctcagggcgtggaggcgtggtgtgggggagtctatttgccatttttgtttgtcagcagggggcaggggttctcaaagattgcaaaatgctgctgcaggtcaggaaggttattttgggtgcctgtgggggaggtgaaacaaggtcccatgactgttttgcagaaccttgtctgtggagggtag

SEQ ID NO: 194992 - DNA, 1000 bp, Homo Sapiens
  misc_feature (186)..(376): n is a, c, g, or t
  misc_feature (818)..(889): n is a, c, g, or t
gaaagttgaggatggagaattctggatgtcactttcagatttcgtgaggcagttctctcggttggagatctgcaacctgtccccggactctctgagtagcgaggaggtgcacaaatggaacctggtcctgttcaacggccactggacccggggctccacagctgggggctgccagaactacccagnnnnnnnnnnnnnnnnnnnnnnnnnnnnnnnnnnnnnnnnnnnnnnnnnnnnnnnnnnnnnnnnnnnnnnnnnnnnnnnnnnnnnnnnnnnnnnnnnnnnnnnnnnnnnnnnnnnnnnnnnnnnnnnnnnnnnnnnnnnnnnnnnnnnnnnnnnnnnnnnnnnnnnnnnnnnnnnnnnnnnnnnnnnnnnnctggagagtcacacggacgcacacttgggccgggatttcttcctggcctaccagccctcagcccgcaccagcacctacgtcaacctgcgggaggtctctggccgggcccggctgccccctggggagtacctggtggtgccatccacatttgaacccttcaaagacggcgagttctgcttgagagtgttctcagagaagaaggcccaggccctagaaattggggatgtggtagctggaaacccatatgagccacatcccagtgaggtggatcaggaagatgaccagttcaggaggctgtttgagaagttggcagggaaggattctgagattactgccaatgcactcaagatacttttgaatgaggcgttttccaagagaacagacataaaattcgatggattcaacatcaacacttgcagggaaatgatcagtctgttggatnnnnnnnnnnnnnnnnnnnnnnnnnnnnnnnnnnnnnnnnnnnnnnnnnnnnnnnnnnnnnnnnnnnnnnnngacacagtgagaagatggccctctatgaaccaggaagggggccctcacagacaccagatctgccagtgctttgatcttggacttctcagccttcgaaactatgagaaataa

SEQ ID NO: 194993 - DNA, 1000 bp, Homo Sapiens
ttcagtcaaggcctctggaccaccaccctgccacaggcgaaaaatgggatatttaataaataaaaaattttgattcaccagactggctgaaaggacagtaatccaaatgagagttaacggctccatagtagttttctagaatgaaagctgaactgagaaatagtaactgatgacatgttgagcaggttaataatttggtacccttccacaccagtattttattgtttgtttgtttgttttgagatggagtctcgctctgtcgcccaggctggagtgcagtggcgtgatctcggctcactgcaagctccgcctcccgggttcacgccattctcctgcctcagcctccccaggaagctgggactacaggcacccaccaccacgcccggctgattttctgtaattttggtagagacggggtttcaccatgttagccaggatggtctcgatctcctgaccttgtgatccgcctgccttggcctcccaaagtgctgggattgcaagcgtgagccaccgcacctggccccacaccagtatttttaaaaatagtttgttttacctctagcgtcttccctcagctgacctaaatagtccagccacaatagctgagagaaatatacctacaattatttccatctccttatatttctagtgatgttggctgactaacccactaatctagtttatgggagagggaaagactgaaagagccacaaagtggatggccaacccacgtgattactaacctttattgtggcaaagtaactgatacaatgtttcaaatgtaagcacatctccttggaataagtggaataacttaattcatccttgcggaagtcctgaggatcaagcaaggaggagcccagctttctttagacaccaccttttttatctttaataacaaaaaggaacaaagtgattgtcagaccagcacaaagatacctcttaatgtgcaatttctattctctttagtgtgtgtgagtgcacgcatgcacgtgtgtac

SEQ ID NO: 194994 - DNA, 1000 bp, Homo Sapiens
ggataaagtaatacagcacacggtaagcgagtagggcggcgataattgtacctttggaggtatgctccccagccagtagtgcgataaacaccgcttccagcacaccgatccccgccggaatatgcacgatgacgccagcaatactactaaccagtaacacgcccagtacaaagaaatagttcacgctttgaccaagtaacagccagataatcgcccccattaccatccagttaacgctggaaatcagcatctgagcgagggcgaatttccatgaaggcagcaccagcttttgccctttgatggtcatatggcggtgcttcgcgaaagcgcaaaaccacaaataaaccgcgataatcatcagtaagccaatgccgagaatacgcagcgtagtttgatcgacataccagtgatccggcaactccaccacgcctgcggtaaagataatccctgccagtaaaatgtagcccagccagttggtggtaatactgagcgagaaaatccgcgtaatagtgctaccgggcaaccccagacgagagtacaaacgatagcgcataccaatgccgccgacccaggtactgagcgtcaggttgaaggcgtagcagataaacgacaccagcatcacctggcgcttcgccagtttgtgaccgcagtaaaagcgggcgagcaggtcatagcagccgtaaatcagatagctgacgaccaccagcccgaccgcactaagcagcgcaacgcgattgtagtcgcggatgaccttccagacctcttcccagtccacttttttggcgtagaccaccagcaacacaatcaccgcgataaaaaacagccaggtgaggatcttctttgctaagcgccagcgcgggtgtgatttactcatcagggttttacccccgtgttttcagtttctacccgatcctgcgtttccattgtcggttgtgcgggcggatccacctgcgccagacgtggcgtgtgtgccggaagccagccaaccagcgccgggaag

SEQ ID NO: 194995 - DNA, 1000 bp, Homo Sapiens
tgtgaaaaaagcaccttgtatgtagtaatgtattttatatctttgttttttcttttactgactgtttataacactcaattgacaatagatatgaactgtattttaaatcatactgttaaatattttccctcttttgttgggaagctcattttagtttaaccatgtttgttttgttggtagcttacctggaaggcagtgaccacttttttatattctcttaatgaaaccattcagcaggtatatgctgttgaggctggttatagaggttttctataataaatgttcaagtatttttgtatataactggttaattttaataagagataccattatgtgtaaaaaaaagtaaaaataaacgcaaacagttgttgatgcagtatgattgttataattatgccaaatactttacgtatggaaaaagaatatttgtacatatgtgcttttaacaattctgccatattgactttacaattttgaatgtcggaaaaattaatatatgttaaatatttatgtttagtgaaagtgttcataattgagaaaaggaacatatgcattttagctttgtatcttgcaagttttgcagacagaaattttttgaactagcttttgcttttgataacacttcgtgtttgtaaccacattcatatatatatgcatatatatgtgaagctccatatttctgttgctttaaagaagtaaaaccttccatttaaataagatgacatgcataagataacaaagcttccttgatttccttttcctgtgtaatttaatagatttgttgactagtgcttgggcacattataaatcagtgttatttgctcttggagccattttttaaaaaaaattttggcagtgagcagttgaatttatcttgaatttatcatgtgtgtgtatttctgaagcagctacatagcagaacattttaagagattctgttagcccacatgttcatgttggttgctgctgaatggtaaatattaaataaaattaccagatt

SEQ ID NO: 194996 - DNA, 1000 bp, Homo Sapiens
gccccagtcctcgagagccagacttgtgcacgggcctggaaatgaaggtctcaggcaggggctgcgcacaccgatggtcagcattgccgttcggggcctgcagtcgcccataatgggccctgccccttaggcctggcctcttttgctttcctcctggatggttcctctacccctggtccagcagggactcagcagtgcctgccagctgcagacccccatgctcctgcagcctggaaccctcctgccctccaaaggtcatggggtgacccagggtgggaacaccagaccccctcaccccgtgtccaccgcccatggccgggctcacagtgtctcagagccgtggtgagccatcctaggaccagtgtacctcacaacctttcagaccagtgaaggccagtgggctgggtggtccaggcatgtccccaacgcaggtccagccatctctgcacagaactggaatctcggttcatttcggtttcagcaggtcccatgtagttagcaggacagcacttgagttaggtctgagaaagaacgcctgtttgtcatggcatttcctgtaaggagcccagagccgtggccccaggttgggacggcggcgccagagctgggcctgagtctgacccaacctgtgctgagtggtcctgctggaatgggaaccccaagaggaccacccctctccaaaagaagggaaaacagtaagagagagggaggctgcaggggcccagaccttggctgaccttcctagccatggtctccaccctccgagacccaggggccccgcagtgacagcagggtgttgggccacacagagcccgagtaggtaaaggaaggttctggaaaccacttttcagaacccaaaaggtgtctgggaaatggcgttacctgccactgttgttaagtgtttactttgtatcaatactgaattgttaaaaattttaatcataaaaaccaatggaacatgaaaaaaaaaaaaaaaagggcgaccgctcgcgatctagaa

SEQ ID NO: 194997 - DNA, 1000 bp, Homo Sapiens
ttggaccaggtgaggaagcgcctcggaacaggactctcccccacttcggtggtgctcctgcaggaactggaacgcttcaacaagcttgtggtccggatgacgaagtctctggctgaacttcaaagggccttggctggagaagttggaatgagcaatgagttagatgatgtggccaggtctctttttatcgggcatatccctaatatctggagaaggcttgctcctgacaccttaaagtcccttggaaactggatggtctacttcctgcggcggttcagccagtacatgttgtgggtgaccgagagcgagcccagcgtgatgtggctctcggggctgcacatccctgagtcctacctcacggcgctggtgcaggccacctgccggaagaacggctggccactggaccgctccaccttgttcacacaagtgaccaagttccaggatgcagatgaagtgaatgagcgggcgggacaaggatgctttgtctcaggactgtacctggaaggtgctgactgggatatagaaaaaggatgtcttatcaagagcaaacccaaggtgctggttgtggacctgccgatcctgaagatcatccccattgaagcccatcgcctcaagctgcagaatactttccggacccccgtctacaccacctccatgagaaggaacgccatgggagtcggcttggtttttgaagctgatctctttaccacgaggcacatttctcactgggtgctgcaaggagtatgcctcaccctgaattctgattaacctttgggtgaagaaaactgcttaatgaattcggagcctggggttgtcagagtgatcgggtctgctgtcatttcttggggcctctcaagaggcaggagggggactgacactgatttttcatttgaaatcagccacttaaatctctttccatacaaattaacctgaatggttttgtttttaatactactttttaaaaggaatttatataatcaaaaagtaaatattggagagt

SEQ ID NO: 194998 - DNA, 1000 bp, Homo Sapiens
agattcatctacatctttcatagaggagaattcatctcaagacaccaacacatcattgaaatgcagcaatcaaaatgagaggtcaaacttgggaaattcaaaaactgcaaaggaaccactgtttcaaaaagtcaccattaggaaaaaacttataaaggaacgatatcaaggacccaagaagttttattctgttgataaaaatgaaagactcgatgtcttcccttcatcaagcataaaaggcagtcattcatgttctgagataacatccacagtttcagaagacaaaatgtggatcccactgagcagcttaagtgggtatgctggtagtgccgatgccttgtgtgatcagcaaagtgatgaaaatccacttccaaatatgcaacagcaaaagtcaggccagaaatcacagagaccatcaacagcaaatattcctatttccaatcccgatcaaaaagacaccagctgccttttgttctcttacacccgatcaaaaagtgcagctgctcagatgccatccagagctgcttctgaaatttcagaaattgaatacattgatgttactgaccagagtgagctttttggaggtaacactgctgatcgacaagccttagacactttggagaaagaattaaatatactgagaaaacctgcagatccttcagaagaccctcacagcctaccctcagaagagttacaggcattcaatgacaattttctgactttaagtcagatgtccaaagacctccttgagatgtcacgtgaaagtgacccccatggagctgagtccagctcttctggaagaaatcctgaaatacagcctttgctgtcacttggagattacagcacggatgaggaagaggatgaatttcttgacaagcaacatgtcattaaactgccgtgggaaaagagggcttaaccgttcactactcttccattctgtactcagaataaatcaaacaactgaatgattaaaaaaaaaaaaaaaaaaaaaaaaaaaaaa

SEQ ID NO: 194999 - DNA, 1000 bp, Homo Sapiens
tattcgcctacacaattctccgatccgtccctaacaaactagggggcgtccttgccctattactatccatcctcatcctagcaataatccccatcctccatatatccaaacaacaaagcataatatttcgcccactaagccaatcactttattgactcctagccgcagacctcctcattctaacctgaatcggaggacaaccagtaagctacccttttaccatcattggacaagtagcatccgtactatacttcacaacaatcctaatcctaataccaactatctccctaattgaaaacaaaatactcaaatgggcctgtccttgtagtataaactaatacaccagtcttgtaaaccggagatgaaaacctttttccaaggacaaatcagagaaaaagtctttaactccaccattagcacccaaagctaagattctaatttaaactattctctgttctttcatggggaagcagatttgggtaccacccaagtattgactcacccatcaacaaccgctatgtatttcgtacattactgccagccaccatgaatattgtacggtaccataaatacttgaccacctgtagtacataaaaactcaatccacatcaaaaccccctccccatgcttacaagcaagtacagcaatcaaccctcaactatcacacatcaactgcaactccaaagccacccctcacccactaggataccaacaaacctacccactcttaacagcacatagtacataaagccatttaccgtacatagcacattacagtcaaatcccttctcgtccccatggatgacccccctcagataggggtcccttgaccaccatcctccgtgaaatcaatatcccgcacaagagtgctactctcctcgctccgggcccataacacttgggggtagctaaagtgaactgtatccgacatctggttcctacttcagggtcataaagcctaaatagcccacacgttccccttaaataagacatcacgatg

SEQ ID NO: 195000 - DNA, 1000 bp, Homo Sapiens
ggacacctcactctcagccttgagtcacctggtgccacctccatcacatcccatgggccacagccttctggcagcgcaggctcacagggggcagggtcggcagggctcccgtggcagggcagcctggggtcatggcgagggtaatttctgttctgcaggccatgcagcctgcctgacccgtgttcttttcgcctttcagcttgtgctgcattgcacctgtcctcgcggccaaggtgctcagaggcgtcgaggtgactgtgggccacgagcaggaggaaggtggcaagtggccttatgccgggaccgcagaggccatcaaggccctgggtgccaagcactgcgtgaaggaagtggtcatatccttcctggtagccaggcccggcccgctgtcgtgcttgtccctgagacgtgcatagggacgcccctccctccgggctgtcttggtgggtggcctcttcaccgggagctgcacctgctgctctccctgtggggcctcccccagtgggcaccgcagccatgtgtctaagggcagagagcagatggctgtgacagcccagctggtgtgaggtgggtcacagacacgtcagaagcgcagctctggtgcgtggttggcagatctggcagatccaggtcccttgcctgactgtttagtctgctcagcaacacccaggcagccacactccgggcccagcggggggagggtgaggaaagagtgtgtgcgaggtgtggagggagagcagccgggcgtgcaggaggcgggggcttcctgagatgctgggggaaagcggccgggtgtgcaggagaaggggcttcctggcttcatttgggcggaagttctcaggccagtttgggtggccaggtgattcagccagccttgcggcccccagcccctcctgttgaggtgtgtaccctgagttctgagatgatggaccaagaacaccagcggggctgttgcccagggagatttggagggaggctcctggaaggccctgcctggatc

SEQ ID NO: 195001 - DNA, 1000 bp, Homo Sapiens
ccctcctgttcgcagggatcatgaggaacaagccctcctgagctgctacagttcctgcctgacctcagtctttcgcagtcatcatttgtcctttcttggcacatgggtgctgacctcactcatccttggggtccgggatccagcatcagggtctctataccccaggatcctccatgccacatggtcactgctctcctcagggaccaggacaaggtgctgctgcttgcccaaatgttttcccatgggatatgtaccggaaggtttatcaccaccctgggaaacataatgctgccccttgggcccagaaaggggtttccagctgggggcacgtggactggttctgctgtttttggcagtcgcttttctgaattctcccctccggcagccttccagagactgatcctggagattgagttgattgtcttggctagacctgtcattttaagctctagtcatagcactttttcagagcatcttaggcaccattgcaacccaaccagggaagctgcatccctgtggtggtccttaggcaccagtctttgttaaacaaaaccctttggcactattgtggttttctattctctgtctgaactctattcaaaagtatctttgctctcttgggccttttcttttactgttttgttttttttttctaatcctgctttcatactagccagtgtggggaaaaggtacaatatgtcaaagagatgagagagtgttatttcttgggcaattttctattagtgtttcttattttggccagttcttttatttatgtccttgtgacccaggtacttggggggccagctacccttctggccttttagcgtctttgaaggagaccagacatgagtgaatacctaggagagtgtcagcatgtttctggaaaattggcagagaccaagccctgctgcagattcgtcaggccaggtgaaagggccaggcagttgcagctgatgatgtaaatattttgtacagtagataaataaatgtttaaaag

SEQ ID NO: 195002 - DNA, 1000 bp, Homo Sapiens
ctctaagagatacagggtgggtgagagacaagccagggaggatcttaattcaagagaagaattcataccaagagctgaccaagaaggcagtaaattctgtgtacttgtagcagaagaaattggactaggaacttgcccaaagctttatcaaagaaaagcattgtgttcaatcttggtagaaacatgccagcaataagtgcttatgttccatagccatatcatgggcttctcacttttaaacctcctccaggggatgttctcagacatttcacaatccctctggggacattacagtagaagagaaacacatggaactgtaccagtgctttttgcccatgttcatcctaagctccggctttaggcagtgctttctgacctgggcggagtgaagacgctgctggtggctgaggccagtaacatggggcccctgcccagccaccctgaaggctgggtaggtccctcttttcaccaccagttttccacacctgtgtactctagattaacaaactctggataaacagatatttacattttaaactcaggcctacacagagtagttttccttataaggagcatgtatcacttagcaagaaactaaaaatggcaaatgagtttttcatcctttaagaaaaaaatcagctttagaattctctgcggtcagttgtgtgcaatgcaacaaaactacctttcagtaaattacttagttatttatttcagtgttttgtttcttttgatactaagtttccctttcaataatgaatgatgtgaccaaccaaggagaatttgtttgttctgtactaaaattatattttacagttaggaattataaaaagcaagggagcatctttaaatgttttttgtttaagcgatgtcttccatccaaagtaagaataatactctcggaaggtccttttggtgtcatgtcacttgctgtatgtggcagccttacagtgccacacttgggtactgaaaaatcaataaaacgaaagttcatcatccc

SEQ ID NO: 195003 - DNA, 1000 bp, Homo Sapiens
agtttggtcagacagaaggtagtctgaatcttaaaggtttcagatgaatgtttgaagtagaacctgggaaatctgcttcctagggctgttagaaggaaattggtctccttaaattacgtcagcatctgaggcagtttcctaagggaatttcttttaaattcaaaagttcaactgcaggaataaatagctgtacaggactagatcttcccatccctcatcttttccccttccccgagtaacgactcaaaaaggcttctgaaattctactcagaatcggagccgtttgcattccaacaaggatcccttaagccaaatgctggtgtgtttgtgtagaatgtccctggggtaggggcggtagctgtggggagggaatgtggtgcaggggacacctgccctctgcccttgaaattgcaccataagatgctgcctatgtcactcacagtggtgctgatactatccgccaaagacaaattgtgaacacggaaaaatggtcgttccctactgtacatcctcaggacagacttaactaaacttggagacaggagattgttcagaccatattgtagtgggtggtgatcattgttttattttgggggagtctggtctattgagcagatttaatgtttccttattgtgcagggcttaattgactatgtctgaaagtttttactgagagctctaagaaaactattgaggaaaatgaaatgttattttgtagtacaaggattatttttgtctatttaggatatacatagctgtagctttgtaaaaaaaaagatctttataaacaatatatgaatgtgccgtcttatttattgattactgtaaattaagatataaatggctatttgcataatttatacctgtgggaattaactggagtatttgttatttgactgttttctattaaggaatattaggcttggtgctatgatgaatgatcttgtaaaatcatgtgtattcttaagaaaatttttgaatataaatttcttgaactgac

SEQ ID NO: 195004 - DNA, 1000 bp, Homo Sapiens
ctggatcagcagtttcaagatctgggttcttggagatccataggtaagctcagcaaatggaagacgacgtcaacacagggctattttgaagcttaggtgggaatggaacacaaagaaggtttgaggtaagatatgctggaaaggcaagatgtaggctaagggaaattcaatccaaggtcgaagaataggaaattactgctcagaccacaatgactatcattctgaaaggatttcacagagtgtgcagctgcttagatttaagaacactcttcttcactatgtaaactaatttatggcagcaccttatatttagaacaagtggtaattccctttactaagtgaacagattattaaaacctgtagtagctttgaaccgtttgtacttgaaaatgggggtataaaggggtatatattttttccagaaccacatttattggcgtatacatagaagcaaatcttaaggcatgctgaaatttgttgtaaatcccaatctttactgccatggggaaaagaacgctggaattttccaaacttaagtctgtaaatatgctcatcttaagttcatgtaatgtttccgctaactcaccaagaataagctgacaatttaaacaacttttactgtgtaaaaatgaagtgcacggcatggcatcacagtatcttgacatttgttttgtgtcatttagctactttagaaaatagtttctgaactctttccccctttatactgtattaaggcaaaaacaaaacttctgaagcattaaagatcttcaccaaaataactattggtaacttcaggaatttgtcagttgccttatgtgaggatgaatagatccaccaagcacgcctataatacaaagtaaactatgatttttattgtgaaattttcatagatggaaaattgaatattctgtccatttcattttacaattatcttaccacttatttttgtaccatgtatttcaattgcctgtttagtgaaaaataaaaattaaaaaaacct

SEQ ID NO: 195005 - DNA, 1000 bp, Homo Sapiens
gaaattctttatacattctagatgcaagtctcttgtcggatatatgtattgagatattacacctagtctgtggcttgactgttttctttatgtcttttgatgaatagaagttttaaattttgacaaggtcaaatttatttttttcttttgtttgatattttttctctccaatttaaccccaagatttcagatattctgctctattatataaactttatatttttatatttgtgatctaccttgaattgatatgtatgttgtgaattatggatcagggttctttttttcccccatacaagtatccagtcattgtaacactgtttattgaaagaattatcctttcctcattaaattaccttgccaattagtaaaaaatcaattaaccataatggtggatctgtttctggactttctgtttggttacactgaaatgtttgtccatccttgcactcactcataccatactgccttgaattactgtagctgcatagatgctccttaagttgggattacattgtaataaacgcaatgtaagttgaaaatactgtatttaagtcaaaagtgcatttaatacaccttaacctacgtcatagcttagcctagcctaccttaaatgtactcatgacacagtagcctatagttgggcaaaatcatctaacacaaaagctattttattgtaaagtactgaatatttcatctaatttattgaatagtaaactgaaagcaaaaaacagaatgattgtgtagctactcactataaacatacacagctgaaagcgcactgggcctgaagaatgtttgaagcattgaactaaaattgcggcatgatggggaatactacagcaacaggattatcaatttccctactgattaggcttgagtagaagcattggttgaaggcactaagggcatcaatacttgatggtttagcaggaatagtgttcttcacaaagagcaagaatcagtttttaccctcttgatgctgtggctgacgggaagc

SEQ ID NO: 195006 - DNA, 1000 bp, Homo Sapiens; identical to SEQ ID NO: 114908
  misc_feature (681)..(681): n is a, c, g, or t
  misc_feature (845)..(845): n is a, c, g, or t

SEQ ID NO: 195007 - DNA, 1000 bp, Homo Sapiens
gacctcaagtgatccgcccaccttggcctcccaaaatgctgggattacaggtgtgagccactgcacccagccacctttctctttagagctcactctagtcattaagaatctcagtctcaatgtttgatttgtaagaaggcctcttgctccttgccaggtgcttcatcagtccactcttagatacaaaaaaaagatcctgctgtttctttatggtttccactgcccttttctcttaaacatcatactaaagtcaggcacatcttagaaatgcaactcatatttcatggttttctgattactaactgggaactaaatttgtagtccagggacaggactttgaagggagtaagtatcaaatatggggctaggaatcagagctctgttcccatctccactttcccttgctcccctgacctgggcttctggagtgccagctcccagagctgagcttgttgacatcattaaggatcagtggcaagcttcaactcagtaaccatctgttgtgggtcttgggggagtatacagatggtaagaaattccactttgggccagacaagcatcctatctagcccagtgttctgtctctgaagtagaaggtagagttcttccatgaaattggcctcataggttaagagctccaaacatctctgaattccttttcatagagtgatcaactgtgagttcgcatttgtcagttttttttttttacccatgtgggtgtctaggttagagttgcaatgtttactctcccttttcatcaataaggacatattttcttctgtctgtaagcaatttccttgaagcttcaagaagaatcctcttgtgaaaatgttcatatgattttatgattctgcttccttccctgtccttgggaaagagtatattcaccctcagagaaggcgtgaggaatcaccaaaccagatcttttctcccaaatcagtcaagaaatgttcactggaatgttgctatggtaaaaataaaagtggttttatgatgtcca

SEQ ID NO: 195008 - DNA, 1000 bp, Homo Sapiens
cggttccagggggaaacaaggctttggtattccgctggctccagcgctttttctgaaacccgaggctggccagggtgctgtcaccatgcggtctttgatcgcagccattcaatgcccacatgcttttccttcttgtttcagaacagcacatggtcacaacaagatattttctttccctccaaagccttttgtctccttgtgcctctttttatccttaggaaaagatccaggtgcttgtgaaaagaatcatgaatgcaacaagggaggctggtcctgttgctgtcgccgattaagttttaaacttttatttattatttatgtctgccgtattttaaataaacattctcgttccttccagttccagtcatagtgtgtctgtggcattccagtccaaccatgtgacttatttattctaatttgagggctgcactgtacaccatggtgtcctgtgacaccgtgttccagacatttatggaaggaaaacatcccatataaatgaaactgtcatgctgtgtcctccccggcagcagaagatgtgtccttccattgagtgagggtaaccttatgtccacaaaggatactttgagaaagcccctaaggaacaagcctcagtcccacggtttcagactatttattctctgaacacaagagtattggttaattatgttctcagctctccctgctgttgtatgtgtgcattcactgcaagtaacttatatctttttatttgaatgtattttaaagcagtagatagaataacaaaggaatatgaaaaccatggactgaatggaccattttatgtattcagagagagaagccactcatcattgccagaaataccatgtaaaaattggcagttcagaggttgcaatacttagtatagtaaataaataaacggtcaacattgtgcaaccactaccaaaaagtgtgttgtaatgcatcaaaaatcaacacaattttattcactaatgagtatcaataaaataagttcaaatgatgg

SEQ ID NO: 195009 - DNA, 1000 bp, Homo Sapiens
acaagttcctgtctccaggaagatttttcccttcttccaaatgctaaagcatcttttatacccactgactctgagcagcctgcagatgggggcctggcgtttgcttcagcccttccctgagtgcagtccccccatagccaccagcaccctcatgatgctgtgctctgcaggcgaggggcaccaccacgtccaaaggctgccacacacactggtggcttttctgggccacattcaccaaaagccaggacttctgtggggctggtacaggaggctcatggaatttcctacacacttcaccaaatgtttgtttacctttgaactccctgcttctcatctttgatatgattcttcaccaggattttgtacaaaaatgatcatggttctggggtggggagaggaaagggagcacatattttgctaagaggtatatatgcagtaccttttatacacagaaatacaaatagagctttttctaaggctttcggttgctggttgggggtgggatatatgaaatttcagttgaattctacaggaaagtgttatattagccaaaaacagaaaaatggtttttaaaatgccaatgatttgtaattaaattgtagcaattttggtctcatgatagtgtaatatctcagcaacaatgcaataattcacattgaaacagcgcttccattctgaactctgctctgcaaatgtcttttgggtcccgctgtcaaccaaacttgaattttcttaaaaaaaaaattatgtaactcttatccaggcattttagaactatgcaattgtgatttaaaatgcaactttgtgcttttaaaacattattgaccttttttgtatatggataaacaacttggttttattatcaatagtactttgcatttatagctattatttttaaaagctcaaaaagttttttaaaatgtcaaattttgaatagtcatcaataagtaattatcaagtttggaaggaaaggttgaaatgactccgtttccttataagc

SEQ ID NO: 195010 - DNA, 1000 bp, Homo Sapiens
tccacactagacattaaccggcttcagaaaagatggacaccttttcccacgctgtttcgcttcttaactttggtccagctttagccaccacacagcgtgtgagggactgctgctgcggagtcagcctcgtttgtccctccgcctcccaccagcacgcgccgcttctgagagacaccagctccctgcctccaagcctggtgccacaggcctgtcgtgagggacccctgcttccgagagctcctgggggggttctgcccttcaccacctgggagaggtgtcagttcagttccgagttgaacaaggcccgtgcacacagcatgttgggggcccagcccaaagttcttgtcacctcctcatgcaaagccagccatcaccctccggccagagctcaaggtggccccttggccagcccctccttgggtcctccaggaggactgagcacccctcctagcggcatcccttgccctccacagtgctgccaggggcacgtcgctctgtgccgtggactgagaccatcccctggtgacagaatgacccgtttgttggaaatgcctcgttgccagagaaactccccaggcatctcggaacgaaactatttagttccattgtgaactggccacgggacagctttttatcaacttattaagttggagcactgtaatcgcgcttgctgagttagcagtggtggtaagcgtgtgttaaacacataatgttacgttttaggagagagaggtcgtaaggaagtgtcgtgtcgctcatgactctcttctattagttgggtaacagtggcctcatgtttgtgtctgtgtgtacacagagcccttaggttctgctctgtttctttgccaggtgaatgtttgtggcatgcgctgctgtccacgcccctctgtcctgcgcagggttcagctgtgcggcgccctgatttcctccatgcacacagaacctccttgtgtctgtttctctgttcctctgtggctgactcaataaacttttccctctg

SEQ ID NO: 195011 - DNA, 1000 bp, Homo Sapiens
tagaccgaaccgtacgttcccttttcagtgttcattcaaaggtgctgcttatgaactgaaatgtgtttactctggcagatgattcagttttttgcacaaaggttccaagcaaaataaaacactctgtgcttaaaagtcatttctgaattacagttctcaaatcctgagggggattttgctcccagtctcgttttgctcaggggcaccagaagttaaaggctaaggggaacagtggcactgagggagcaggtgtgccctcgggagccgggggtgctggggagctgggttccggctcacacttctgcccatcaggtgctcccagggagctttcggctacacgacatgcctgctaccccttccaacctgggtggtgacggagcactgcctcctcccttgggctgtcccacacctgcctctggcttaggaaacagtgcctctgccagctctgcccacaggagcctaacgtgagagtgcccccgccctcctgccacaaccgggctgctgtgggttctgcatcacagggttgcagccctaacggcgagccccgtcccacacagggcctgtctgctgggtgagattgcagccacctgcagggagctgagtcctgaagaaatgaggcatgaaggcttgtgaaccaggggaaagtcccagccagggtgggcagacggggtcagggggctggaggacagggtgtgacgaagggagggggccatgcagaaagggcccccgctggcccactgtctgcccagtcggtgtgtgcctgtgccgcctgcggatgagcatggcaggggctcaacaggagcgggacacatcttgagtgggtctgtgtttctgttctattggtggccaagcgtggcctggcagcttgagtgcctggagccaaccacctgaatcttagccgctttctttttagatgtggttggggttttttgtttctgtttcttgagaaagggtcttgctctttcgcccaggctggagtacagtggcgtgatccgaattc

SEQ ID NO: 195012 - DNA, 1000 bp, Homo Sapiens
cttaccgtgctgacttctgcaggtctgccctgtgacctgtcaggaactcctgagttacgctactggggtcacctgttgctcccctagcaagttaggcatgtcatatatttttaacagctttattgagatataattcacatattatacaattcacctttaaaacatacgattcaatggttttcagcaaactcacagagttgtccgcccacttgagagcaaacacatgttcaattttcttttcctttttttttttgagacagagtcagctttgtcgcccaggctggagtgcagtgccatgatcttggctcactgcagcctccccatcctgggttcaagtgatccttctgcttcagcctccccagtagctgggattacaggcatgcgccaccacgcctagctaatttttgtgtttttagtagagatggggtttcaccgtgttggccaggctggtctcaaactcctggactcaagtgatccacccacctcggcctcccaaagtgctgggattgcaggtgtgagccaccgtgcctggcctacgtgttcaattttctatgaacaaaggctttagtccttgacccagggctaaagtggtctgtccaagctgttgttggtagagggagtatgataaaatgtttaaatctcatttggttaccttgagtcctggaacacgcagtaactgtcatgctatagtcatcatctgtatttggctgggaatacaaatgaagattgtggtgtattcaagcagtagggtttttgcttttgtttttgttttagtgccaacaaaacttttttttgtctgactacattaaagataagactgactatatttatacaacagaaactttgtaatagattttttcagctttgtgaaatcgaattttttttcatcagggctggttggatttcctttttaccctgtaatccaagcgttaatagtttgttagaagatgggttattgcatgtcacttttttttttttgtaaaataaaaacataccttac

SEQ ID NO: 195013 - DNA, 1000 bp, Homo Sapiens; identical to SEQ ID NO: 114994

SEQ ID NO: 195014 - DNA, 1000 bp, Homo Sapiens
tactttttggcaaaagtgacataataaaataatcaaaaaaagatggatctttttttcttttttgagatggagtcacgctctgtcacccaggctggagtgcagtggcgcgatctcggctcactgcaacatccgcctcccaggttcaagcgattctcctgtctcaggctcccgagtagctgggactacaggcacccaccaccacgcccggctaatattttgtatttttagtagagacggggtttcactgtgttagccaggatggtctcgatctcctgaccttgtgatccgcctgcttcggcctcccaaagtgctgggattacaaacatgagccactgcaccaggcgaaaagatggattttttaaaaaaggtgttaggataatcaggtccccacctgcaagaaagtaaagttagaagcccacctcagaccatgcataccagcacaaaaatgtcaaatggcttaaagataaaatgttaaaacaagtctagaaaggtattaaaagaaaatatagaaaatacagcaccagcaaaaatttccctacacaagatgtaaaagccagaagtcataaaggaaaaggttgataaattagaatagataaaaatgtaaaacttttgtataatataagacacaaagaatgaatttaaagacatacaatgaaggttaggaagatgaagatgttttggcgatgagtggtggttacacatcagtattaatgtacttaatgttactgaactgtacacttaaaatgatgaaaatggtaatttttatgttatgtgtatttcatcacataaaaaaagacatgaaatgaatcggggaaaatatttgctacataactaagaatgaaggcccttaataaaatctgtaaaactatacacacttttaggaatgaatcaacaaataatttctatgaattagaaaaaagtgacaatccaactaaaaaatgaataagggatataagcaatgtgtttcacagaaaaaataaaaattgacaatgaagttatg

SEQ ID NO: 195015 - DNA, 1000 bp, Homo Sapiens
cttttttcaaaaacattttttaatagaataaaatataatttgatcttattgctccttggagattttttgtgtttggttttggtttctgccaatgacatctcacaggtggaaaacatctggactacagacatgttctacttgagtctcccatgatcggcacacacagttgtatttttaaaatttgttgtcaatgtttaaaaattaggagatatcacataaaaaccagaataacttcttttaaaaaatcatactatctgacaatattgacctcatgcttttgcatggcaaaggtctgagaagcaccttcttcagatgggacagtgctctgtgggtcactcttccccatccgctgtgccccagccctgcccaagcccctctactgaggctgctgttggttgccacttatcactgtacttgggcaattgttttccttatgtctagcccacttcacttatttatgttgcctgcactgtgggtgtctgaattctggtgatggtccagaggaggtggtaagaatcatcagaaacccttcctaagtcataggttagggaacatgattgagaggtagggaagtagggggcatgggtgtgagagaaaaatattttagagtaaaatcaacacatcatctttttttgctacctaaatgccccaggggacaaaggtacacctcccaaatatagtaaaagttcaataggaagaaggccttcaaatcagtttctttctaacgaaatacgtcaaggtagaagaaaaatagtacaaaactcagagaaagctcagctcccagtatggagagcatcatttttcagtgaagagtccgtgataagctgtgaaattcagatgagaattcaaacattttcagacattcagcgagtcagagcaacccaagaactaaactcattatatgcattttctcaagaaaaccctcccaggagtttcctgggcctacagaaatggtgtgccaaccatcttcaacaatgcagagcaactttttgtttatgat

SEQ ID NO: 195016 - DNA, 1000 bp, Homo Sapiens
aacatcatttcttcacagggaaatttcaagttggagtgcttcgtttgctcacattcatgtcttgtttttgttactggtttgaagactaaaaggcacgggttcaaataagattggtctctttggttggagactatttctgggttcattcagttgttcaagaaacattagttaagcacctactgttgctagacactatgctagatactgaggataatgaaggtaagattgatatagtccctgcccttatggagcttatagtctcatgtggtcttagtgaaacaaagtctcaatttgcttttatactagaaataataaagaaagctgccttgctgtattcgatcagttaaaatcagcaactttgtgcttttgtatcagtaaaacatttagttctcaccttttgaaaatgcaaaccactgaagtgatttacagtctcctccatttttggctggagaggtgttctgtttctgtgagacatttttctaatttttgtggaacttcactttcctccttctttgcttatacgtgtttgttagattatattgcaaagaagtcaagttactgatatccagtattttacagaggaagatgactttcaaaactagtcatatttctgtagaggaggaagatttttaaaacctttatcattcagcatttgtattttatggatccccaggagaactaaaaaggagatgactctctaccatagtttggtttaaaaaaaaattactctgtcagttatttatttattatttaatactaaactccaaactgaagtggctctgaggtaaatcagatatgattttaatttaagtttctttattagcagatctataaatggaaggtgaccaatgtcactgcttctaaaatactgtcctaaacaacccagaagattttatttcagctcatgaatagctgttctaaatctgttgtatgttagacatactatgaactacctcttcacttattatggggaagtttccttaataaaagtgtgacgatt

SEQ ID NO: 195017 - DNA, 1000 bp, Homo Sapiens
tcccattgttttcagctgttgagccaccagtaatttggctcttttttttttttttttaaaatacccaagctccttcctgtctaggagagtttgactctagcacagccaatgctaagaaccacttcaccaatccaaattcacaaatatcagccaggtacaatattttgatactaaaacctgcctatgcctactatatagagcatatataggcagcagctccaggccctggggtacaagccagtgtcatgctggctggagacccgcagaaactgtccagagtctgccagccctcagatttttagggaccaaagaccatgcaactcctgggaacacagtgtctgtggtcttggggtgatttaatctgcactgctaagctccagtgaccagcccgagtgaatctcccccctctgttgaaaattctgtatcttcccagcctgaggcaggtttggttgaaagagttttaggtgtggtaggggaacagactgaacctcctacacagctctgctgccaggaaaccaaaccgtctcatgcccatggtgggtggtagcagcagaaaaaacaaaaatcataaaaacctcttgctcagcttttatagttcttcccccagtccagctggagagttgggataaggccaggaggattcttcccatcttacagagagaataactgaggcaacaaaaggcagagagctggctgggtgcggtggctcatgcctgtaatcccagtgatttgggaggctgaggcgggaggattgcttgatcccaggagttcaagatcaacctgggcaacatggtgagctcccgtctctgccaaagataaaaatttaggtgggtgtgctggctgtggtcccagctgctcaggagactgaggtgggatggtcatttgagcccgggagattgaggctccagtgagccgtgatcacgccactgtactccagcctgagcaacagcaaggctccctcaaaaaagaaaaaagaatgcttttgtggggacctaaattt

SEQ ID NO: 195018 - DNA, 1000 bp, Homo Sapiens
aaatgctcggcagagtagtttagaagaaagctagagatttacttgccattttctagaaagggagatgtgcctggcttatgtttcaaaggagaaggccatgtgggcaaagagagcagtgaaggacttagagtcactggcctgggttggagttcaagctttcacacttttgggctatgtgacctctcttgaggggcttcacctctctaaggcttatttttccttatctgcaaaaggggtataataatattgaccttctagaactgtaaacagtgactgacgggaagtatataaagtgcttagcctagtgcctttgacacaaagtttttaacttcaagtaaattggagccaagagagggaaatgagggtggcctggtatacaggatgaagggcactgcttagatagataactgtggccagacagctgtagccatgagccccatgcctgatgctgcagaggtaggggggcttgctgtagaggcactggcagagtgggagggggccacacctgactcttccaccttcctaggtgtagttttcaggcaagaaaggaagcacaaacaggcatgcaggaaaaactcagcacccaagaagaggttcaagagaaggtataaatgctctcttatggcagggagaagatggtgccaggaattggctgtgagactcttgttctactgtaggatccagagaggagtagctgggagcttcagatatgttgattaaaggtcatgggagtcccaggtgggatctgtacagtgctcagtggtggagtcatggtagaggccagaagcggctctccaggagtgtagggcaggaatccaagcagcaggtgatcctctgggccaggtgcatatggggagaaagcactgttttgggaaggaagctagggctgggaaagataagattctacaatgaaaatggcatcacaaagaagtgtgatgaatcacacttgcaaatgaacaattacaaatgaattctgtataagagagatgcaagaaatgtt

SEQ ID NO: 195019 - DNA, 1000 bp, Homo Sapiens
ggccccctgactcctcaggagcgcaggcagaggaggtaaacaggaggccaggttacccatgagatgaccagaagctcatccagggccgggaccctggttcatctcgtgaattcttggcagcggctccaggctgggcacattagatgctgtcatgtgactggcctggtggccacctcttggttctctggaaatgtgtccactctgtgctcagggaagaaggctgccgtcctgacctgtcagccaccaggccctctctgaactcctcacttgacccggaggcattgggagcaaacacaaagctcgcccctggtgtcagtggtgcagacagaggaaaagcagagggtccgcaaaatgcaactcctccgtggtgagactttgaaaaggtgtagagtggttgcagacaaacagcaaaggagtggaatggaaaaatctctcttgctccccacaagaagtccactcccctacggattcctcagatgccactggctggcacagcctttcccgcccttggtgtgggagcagcagaagtccagcgggggtgggagaatcatcggggtcaggtcagtgtctccctcgtctgaagtcaaccactacttttccctcaagcctaccaaagagctaaagtctgatctgtagatgtctgatggtttgaggagaagaaaagatagtcttttagagaagtggggagtatccaacttagggtcaaaatacactgagattaggccgggcacagtggctcacacctgtaatcccagtgctttgggaggccgaggcggatggatcacttgaggcctccaggagttcgagaccagcctggccaacatggcgaaaccccgtctctactaaaatacaaaaaattagctggatgtggtggtgggtgcctgtaatctcagctactcaaggaggctgaggcacaagaatagcttgaaccgggagatggaagatgcagtgagccaagatcacgcccctgcactccagcctgggcgacagagactccgtc

SEQ ID NO: 195020 - DNA, 1000 bp, Homo Sapiens
attagagacaggcaggcagcttgccacctggaaatgatcaagtggtcagcctgaccaaattcaggacagctgaagggtctgactgggcactgtgtgactggtgggttggaggctgtcgtgtggctgagcagagatggccagctgatgggtcacacagttggggatggtgtcaggaggtcaacctgaccagcagagacggctggcaggaaggtcacggaaggccagccaggcatggtgccactgggtgcaggcaggtggcggatctgagtggcctgacacattggatggtcgcttatttgggcagcgtgattgtcagaacagtgtggcaggggctgctgcagggagccatttggacatctgcagggcccccccgaaggcctcggatggccacgtagggtctgcctatcaggagaacccccagatgatcacagtccccagagacagccagacccccggggacccagcctctcacagtcagtcctcccacccgagtgaccccgatggcggcctcccagctggcggcgctggaaggagtggactccggtcccagggtgcccggggccagccccggcttcctatattccgagggccagcggctggcactggaggctctgttgagcaagggcgcggaggcgttccagacctgcgtgcagcgcgaggagctgtggcccttcctcagtgcggatgaggtccagggcttggcagcggcagctgaagactggacagtggccaagcaggagcccagcgggatggcagagggagccaccaccgccgatgtggacgcgggcagcctgagctactggcctgggcagtcggagcagccggcgcccgtcctgcggctgggctggccagtggactctgcgtggaaaggcatcacccgggcgcagctgtacacccagcctcctggagagggtcagccgcccctcaaggagctggtgcggctggagatccaggctgcccacaaggtgggtgtcgcgggggccctgtgtccattccccag

SEQ ID NO: 195021 - DNA, 1000 bp, Homo Sapiens
ttgctttgaccatgcatggaacaggactcaaaataatagtggtaatagcatttgtctcaggccgttgtcttgctgtaacaatataccacagacctgggtaagcagtagaagcttatgtggtggttctggaggctctgatgtcccaaggtaaaggtgctggcaggttcggtgtcttatgaaggtttggccttaacttacctcttgataactgccacaatgggagttcctttttttttttaattgaatgttttattttgagataattgcagatttacatggagttacaaataatagagatcccttgtacactgtatactgtttgtcgatgataacatcttacaaagctgtagtgcagtttcacaatcaagatattgataataggcggccatggtggctcatgcctgtaatcccagcactttgcgaggccgaggtgggtggatcacttgaggtcaggagtttgagaccagcctggccaacatggtgaaacccgtctgtatttaaatacaaaaatgagcctgccatcgtgagcacctgtaatcccagctgctctggaggctgaggcaagagaatcatttgaacctgggaggcagatattgcagtgagccgagattatgccactgcactccagcttggggaacagagtgactccatcttaagaaaaaagtgataagcataaagtcaatatgtagaacagttctaacgccacaagatacctcatgttgccttacgtagtcagaccacctctatctcccctcatccccactgatccctagcaagcaccaagctagccttcatttctttgtcatttcaagaatgggaatgaccaggaatcatgtaagttagatgtgaccctttgccttttttgacttttttgcctttttcggatgcatctttctctgaaggtgcatccaagttgtttcgtgtattgtgtgtatttctattgctcagtacaattcacggtatgaacgtatcacagtttgtttagtcattgacctgctaa

SEQ ID NO: 195022 - DNA, 1000 bp, Homo Sapiens
caccatgcccaactaatttttgtatttttagtggagatggggtttcagcttgttggcaggcttgtcgcaaactcctgacctcaggtgatccgcccaccttggcctcccaaagtgctgggattacaggtgtgagccactgagcccggcctggggcacataatcctgatgtcaccttcacccacattttagtggcactgcaggcatctgcaccatctcggtctacactctgagcggcagttaggtctcggtgcaatgggaatacatgtcctgcagctaaacctctgttcccaccttccaccttctgcctggggttggtccagcgagcaaacaggagtcagtctgcgtcctggggagctggcggtatctccgcagaggacatctgcttgcctgccaccaggagaaggtgaaaggccattcctttctgttgaactagcatgtacagggcaggtccctactgtgtgtcgtgtccttgggagtaggcacatcacagcttcaccccattttacaggtgaagaaactgaggcctggagggtttgtgttctttgccctgggttggtgagtggcatttctgtccccaagcccacaaatttccaccatagttttccccacttccaaaactggcatgggaaaatagccaataggccgtttgtctcaaatattcacttctggttggagtggaaaggaatcttgcaaaagaaatgcagctggggtgttctcagcacatgggagctggttttgaaaatcactgtccccctttggttggtgaatgtggccaggatttacgtgaaggccagatactcggttttcctttgccctttatactgtcactagtgtccccgaggcaggcagactgccatttctcactctcgaggagcacctgcattgagagcaagaaagcacagcaagccctacttagaagcagaaagagggcaagtttgcccaaagcgtgagggttctgtctccatctgccacccaccgccatggctgcttcggctcccgg

SEQ ID NO: 195023 - DNA, 351 bp, Homo Sapiens
caggtgcagctgttgcagtctgcagctgaggtgaagaagcctggggcctcagtgaaggtctcctgcaaggcttctggttacaccttttccagctatggtatcacctgggtgcgacaggcccctggacaagggcttgagtggatgggatggatcagcacttacaatggtaacacacactatgcacagaaactccagggcagagtcaccatgaccacagacacatccacgagcacagcctacatggagctgaggagcctgagatctgacgacacggccatatattactgtgcgagggactactactacggtatggacgtctggggccaagggaccacggtcaccgtctcgagt

SEQ ID NO: 195024 - DNA, 1000 bp, Homo Sapiens
ccccagagcctggctggtcctacagagcacttctcccctgggccaccaggaccaaagcgacctaaacacttgaagctaaaagcaagtgctgatgatgggatgggctggcacgtggctgggagggctcctgggcaccacagagccctcagcccagcagagagtggaggctcagtccgcggggagtgggggttgtgaaggagacatggccaagcccctggtcggggagataagctcccccatgcccaggccagccccaggggcaacaagccaacatggagagaggtggcaggtgaggctgacaggtgggtgcctgtggcctgggcccatgagggcaatggtcctcagtaaccaatggaaaggacacaagggcgccgtggtcaccaccacccaggcaaagaaatgggaggtggccagcacccccacccttcacttttcattattattattattattattattattattattattttttttttttttttttttggagagtagaaaggcaacttcattggagcttttggggaaaaaagccttcaaagtcaccttctggcagctctggggagggtcatttggggtggactgagagtgtagggcaggtagggtgtgtgccgggcagcagctgtgtccgtgcagccagcacccagcagggcagtctcacaggagccgttgtgagcactttggacttgaagcagctatgaaccaccccccgcccccaccgtctctccctctcacacacacacacacacacacacacacacccgttttaccattttctcagtgctttttctgctttcattcctttgattttagttagaagcacaagccatgatggatgtgggactcttctcaattgctctttaaattgtcactttttaaatcctattaaatgaagtgtcgattcctgacaaatacattaaaagtgttttattcctagaagagttgggaaaagaaattattttcagcaagagtaggatgtttgttaaactgattccttggc

SEQ ID NO: 195025 - DNA, 1000 bp, Homo Sapiens
tacatccaacaagacttctagcaaaaatgttcttattaacctcctttttatactaaggaaaaactgggtacaacacaaatcttcatcaacagaagaataccaactgttatacagtcataaaacgatcccagaagttcactccataccatcaaaaccaggaacccacactgatgcccctgatggcagaaaatcatgatacaaaaatgagagaaacgagagagagaaaatgtactagagtcatggtagtgggtaaaagccaaagagctcagtttctactcatgatattcattagaagaaccaaaggaacatgagccaacagctgtaagggtccaggtctgcacaaggtgcctgttgggtgcagggttctgttggctccagtgatatatctcaggtgggctaatttttacggacatagccgctgcaaaaatctatcaaacaataataaagggatagctacttgcatgctaatttaccattgtatagaagggagaacaggcatcagattgttttcgtcaaataaaagcaaaaccaagatttatgaagaaaagaggaaagaggaaaaaaaatcgcctgggacctttgtgattttgctccccttggataagagacttgacagaaagctttcaaagaggtcactgtggcctgtcttcttgagacacacgacacttgttcaccacggaaaacaattacagatgttggaggactttaaaatatcctagtttagcagttcatcctatgccacagaatctgtgtgtgatgtccaccatgtccttctgtggtacaccccttcagttaagccaggagggtgcctctccgctcagtggaatatcatacatcaatgtgtagaaagtttgttgtgctggcaagtaaatgacaaaagggacattgatagaattaggaaacaaattggaatatgatctgttaccgttcccatggaagataaatttgcagaatatactcaaattagaagcattaaataaacgctgtaatttaaaatggc

SEQ ID NO: 195026 - DNA, 1000 bp, Homo Sapiens
cgagcagtccccgtggcgggagcctgtcctgtctgtctcactctcgaggatctccgggtccctgctcttctggcttctgctaggagggtggagatttctggccctctagtgggtggagatgctgagttgtggctgggtctctggggcttgaagaccctggctgggcccgggctgagaggcctgggttctggccctttcacctgacaggtaacttcaagccacatccataggtgtctggcctcagtgctgcaccagctggtggcctgccaggacctgagactggacacaaggcagctgtcccagagcagttcctgagatgcaggcccaggaaagtggctgtcaggggagctgggaggcagccctgttccctgcacctccctcagattggaaagcccctcctgcaggtggggtatggcagggagcagcccctgcccagcgccgcttcaccaggaaggtcagtaggtgccgtggccttgcttctctcacacactaacccccctttggttatgtcccagctctcagaggtaacagcagacaccacgtgagagaacccagtggcctctggctcgcagcttagaaggtgaggcttgtgccaggccagccgagccgcctgtatgagcagagttccggtgtcctcggattcagggcagacttgggcagtgcctgtcctgcagttgggggcaggaactccctcccctgcccccaggcgtgcccctgaggcctggccccaacttgtcgctgaaataagtggagaacaccagccttgagcctcacagttttattttctcctcgttatccatccttcctttcagcaccagtaaggaaaaagaacacctctcttcgcaaaatattttatcaggtgtaaagacttgtttttcttctagggaagaaccgtctggatatatatttgataatgtttttaccaaaaccataggtgtgcttaccatagaaaacccctaatgtcccatgaagatacaatacagaaaaaaatacagaaatt

SEQ ID NO: 195027 - DNA, 1000 bp, Homo Sapiens
gcctgtggcgtcagcacggcttcaccgtgttgctggttacccacgatgtcagcgaggcagtcgccgtggctgaccgggtgatcctgatcgaggacggcgaggtcgggctcgacctcacagtcgacctggcacgtccccgggcgcgcggttcgcaccgcctggccgcgctggaaagcgaagtgctcaaccgtgttctgtcggccccgggcgctgcgcccgagccggatcctgtagcccctttgcccacgcagttgcgttgggcgcactgaatgactcactcaccaaactgaagccatagagaaggaatcaaatcatgaccatcaaagccatcaacgttcgcaaccagttcaaaggcaccgtgaaggaaatcctcgaaggcccggtactgtcggaaatcgacgtgcagactgcctcgggcatcgtcacttcggtcatcactacccgctccgtacgtgagctggagctgcaggtggggagtgaagtgattgctttcgtgaaatcgactgaagtgtccattgccaagctgtgatgggtgtgggccatggggctgttttgcagcccttcgcgggcacgcccgctcccacaggtactgcgcaggtttcaggttttgcgcggaccctgtgggagcgggcgtgcccgcgaagggccgcacagcggccccgatgatctcagccggaacgcttggccagaaacggcggtagatacaaccccaggtacgcctcgaacacccgcttgccttcctcggccatgcgcggggtgatcgcctcatgcagctgcaccgaccgcgcatacacccggtcgctcaattccatggccagggcaaacacatccacatccaccggcactaccggcagatgaaagtgctggtcaaacaacttgtgcatcaagtcgcccagctccatgtcgtgctgccgatcggcctgcaccacttcgctcaggccatgctgggccaggatcagctgccgcgctgcggcatcctcgttgtagatatccagcatgc

SEQ ID NO: 195028 - DNA, 1000 bp, Homo Sapiens
gaactcaggcgtaaacgtacgacgttgtttggtcatcagacacctctctatggcgactattcttgccttaaatgggtgtccgggtttagtggaccactacacttcaacaccgccagaaccagcagcgctgcataccggcctcatcgcgttacttcgtcgcatccggacttgcctcggaattcggcctgtttcacgtactcacgggatatcgcctccagtcctcctatggcgaagtggtacaggtggttcgcaatcgcctgagaaggcatctggaagatctcctgcagggggccaggaaaattgcgtccaccgaccagcagcatcaggcaaggagtaatcacgttgagcaggcatcgggccagggcggggtctcccgggggtatctgggtgatctcgccgagcatgtgcttgaggagcgttatcttcggctgtgcttggtcctggaaaaggatctgcaggtgcgaggtcggggacagcacttccctggctaggacacgcaacggccatgtttgaggctcctgagtcgcgcgctcgaccaactgctcgatcagcacgcgcaacttcgacgccggagacaattcgctgctggtgagttgctgcagggcggccatgtccagcagccggccatgagccaccgccagcacggcttgatacaggccactgcggttgccgaagtggtagttgatcgacgccagatccacctcggcctgggaggcgatggccttgttggaggtctcggcataccccgtggtggcgaacaactcgcccgcagcctcaagtatccgggttcgagtgacctcgccatccgagcgaagtccacgtgtaggtttgttcattcctcgatcatccaaagcggcaggatatgggttgcattctccttcaggctaaaactaaaatcaatttagtgtttacgtggcgcagcgcatcgttctgcctctattctgactttctggatcgtttgacatgaagaagcctctcattgccctgggtctccttgtag

SEQ ID NO: 195029 - DNA, 1000 bp, Homo Sapiens
ggaagaagttgtttcttcacaatcatgacaatgaacgtgtcattccacaagttacctcattgtcctttaataattatctgcctataggcaactattgatttactttccattataatacattagttttcatttgctagaattttatatgattgaaaccataatgtatttactcttttttaatccctgggtatagtcacgtatttattttgagattcatcattatacctctatgagtagtttcttttttttgtattgctgagaagtatgatgttctgtggatataccagtattcgtttattcattcattcatttgttatggatattttgagtagttttttaaagtagtttgaggtataatggaacttaaagtgcttatatttaaaatgcatattttgatattttcatacatgcttacaccctggaacgcagtttccttctgtctttttagttcattctcaacatataaaattaattttcattgtgtaaaattactggtacaatgacatattttgtctcctgttacagctgtgttcaattacaaaaaaagatggaaaagactgttatgaagccagatgaacctttctccagtcttccttcactatttttttttccttcaccatttatcatttcatagtcatttatgtttcatcggtcctcatgtgtactagtgcgttattttacttatactcccggatatcatattatttaatgcatagcctcttcagaatgcaattttaaaatgtaaaggctcttttataaccccccaaaaaatcacacaaatatattttaaaatgtaaatattttatcgcttctgttttctcagttgtctaaaacaatgtgtttcttaaggaagatcatttttattcaggatccaaatgtatatttaatagctttcagtagttgtatctcataagtctgtaacctacaggttccatttacctttgttttcttatttcttgaagttgctgagtcattttttaattagaatttgctgtattct

SEQ ID NO: 195030 - DNA, 1000 bp, Homo Sapiens
gcctgggtgcagacctgtgtccccatgcacacagtgtctcctgtcaggctgaaatgtggcaccctggcagacagagctgtggctcgtgaggcagaaggcaggcaccacaacgggagaggcagcactcacccctgcctgttgcagctaaatcaagtcaaaaagacaggcgaggctgaacttgctaaatgtctggtgccttagaaaaagaaggaaaggccatgaaataaggaaaacatacaaaatatgtaccccctagttcaccagcctcccctcccactaggagggcccctcgagccatcaggagtgaccaacttcctgggtggaggtcaggggagctccaggaggctgcccaggctcctcctcctcctccccagcggccgagcatctcttaccaggaacctggagccaccgccggagccagcgtcatctctagggtcactggccaggggactgcattctggtttgggactttgcctatggaaatgggaaaaatgaaattcctgctaaggtgcttctatctctttcagattcatgcattgaaggagagattttttatactttatgttttatctttctcagttatttgcaagtgagtgtccttttaaaaacacacttcttcatgcttttctttgtaaatgacagatcgaagtataggttacatcaaaaccctaccatcctgagaagagttatggttctattatagcagacgtcagccacacagcctatgtgacaataaccttagagtcctgtgttttgtttttgtgtgttgtgagattttaatcttttttttttcggtgagtctggccatttctataatgccaggtgggaagccaggctgcgggtgttagggtgggaatctgcccggcgtctctggcaccctccctgccatcctcagtgcggctgctgttctcctgtccggtgctgtggctccattccaaaggggcacctggatatttatatttgctgaagttttataataaagtttatatggtacagtgtg

SEQ ID NO: 195031 - DNA, 557 bp, Homo Sapiens
  misc_feature (363)..(363): n is a, c, g, or t
caggtggggagtttgacttggggcggtacacctgtcaaacggtaacgcagtgtgtcctaagtgcgagctcagtggagtgacagaaacctcccgtggagcagaagtggcaaaagctcgcttgatcttgattttcagtacgaatacatgaccgtgaaagcggggcctcacgatccttctgacctttgggtgttttaagcaggaggtgtcagaaaagttaccacagggataacttggcttgtggcggccaagcgttcatagcgacgtcgctttttgatccttcgatgtcggctcttcctatcattgtgaagcagaattcaccaagcgttggatttgttcacccactaatagggaacgtgagctggngtttagaccgtcgtgagacaggttagttttaccctactgatgatgtgtgttgccatggtaatcctgctcagtacgagaggaacctgcaggttcagacatttggtgtatgtgcttggctgacggagccaatggggcgaagctaccatcttgtgggattattgacctgaacgcctctaaagtcagaatccctgacc

SEQ ID NO: 195032 - DNA, 1000 bp, Homo Sapiens
gtggcgggggcgggcgggcgtcccgcgcgtgtggggggaacctccgcgtcggtgttcccccgccgggtccgccccccgggccgcggttttccgcgcggcgcctcgcctcggccggcgcctagcagccgacttagaactggtgcggaccaggggaatccgactgtttaattaaaacaaagcatcgcgaaggcccgcggcgggtgttgacgcgatgtgatttctgcccagtgctctgaatgtcaaagtgaagaaattcaatgaagcgcgggtaaacggcgggagtaactatgactctcttaaggtagccaaatgcctcgtcatctaattagtgacgcgcatgaatggatgaacgagattcccactgtccctacctactatccagcgaaaccacagccaagggaacgggcttggcggaatcagcggggaaagaagaccctgttgagcttgactctagtctggcacggtgaagagacatgagaggtgtagaataagtgggaggcccccggcgcccggccccgtcctcgcgtcggggtcggggcacgccggcctcgcgggccgccggtgaaataccactactctcatcgttttttcactgacccggtgaggcgggggggcgagccccgaggggctctcgcttctggcgccaagcgtccgtcccgcgcgtgcgggcgggcgcgacccgctccggggacagtgccaggtggggagtttgactggggcggtacacctgtcaaacggtaacgcaggtgtcctaaggcgagctcagggaggacagaaacctcccgtggagcagaagggcaaaagctcgcttgatcttgattttcagtacgaatacagaccgtgaaagcggggcctcacgatccttctgaccttttgggttttaagcaggaggtgtcagaaaagttaccacagggataactggcttgtggcggccaagcgttcatagcgacgtcgctttttgatccttcgatgtcggctcttcctatcattgtgaagcaga

SEQ ID NO: 195033 - DNA, 380 bp, Homo Sapiens
cggccgggcgcgacccgctccggggacagtgccaggtggggagtttgactggggcggtacacctgtcaaacggtaacgcaggtgtcctaaggcgagctcagggaggacagaaacctcccgtggagcagaagggcaaaagctcgcttgatcttgattttcagtacgaatacagaccgtgaaagcggggcctcacgatccttctgacctttggggttttaagcaggaggtgtcagaaaagttaccacagggataactggcttgtggcggccaagcgttcatagcgacgtcgctttttgatccttcgatgtcggctcttcctatcattgtgaagcagaattcaccaagcgttggattgttcacccactaatagggaacgtgag

SEQ ID NO: 195034 - DNA, 1000 bp, Homo Sapiens
cagggcagatagaagcaggtgggtggggctgagagagggtgtcagggacaggggtgaagaaccccaaactccccccccaaatcaactgaaaaagctttaaaaaaagaaagacaggaaaaaagggagtaagaaagcaaaaagaacagatgaaggaaaacttaactttccggtggtttgattcctcctttgatttctttttcggttctcttttgtctgtcctctctcctctccttcctctcttctccctccttcctctctcctccgtctccctttgctctcctctctcctctctcaatcttgttctttctgtgtctctcctcaaaccaaagtgttgcagtgaaggacacgagccattgaaatcagggtggggcctgacagccacagtgtggcccccgcccctcgctgggcaggagcagagagaggggagagccctgagaccacagggctttggcctgggcagcttccacgttctgccggacactttgaggagaggcagatggagccccaggcctcagcgttctcttttttcttgtctcccttctcccacccgggaaatgaaactgttgggctgggccacggaggcagcagagactcggccattgcaggggcctctgggtgccttgtccgggcagtggtggagtagccgcccctcccacccctggcacgatggggcctggcaccttgttgacccatcctcgccggaatgtaagcatctccgctgaatgactccctgcccttaccctacctctgagtttgtccatgtttatttcctgaagagagaagggactggcaagagggcctgggccccggcccaagggtggagagggggccaagggctcctgaccaaataggaaggacatttgagcagagcaaaatgaaaggaattacaaccaaaaaccccctccgagaagacaggcagcatggaaggcatggtggagatgactcaaacaaaaactatgattctagaccaaaaaggaaaaaaaaaaaaaaaaaaaaaaaa

SEQ ID NO: 195035 - DNA, 1000 bp, Homo Sapiens
acagtaggacaagccacatcaaaatagtgccttcaacaagcctcaaagactgcagcaatgtcagtgtggaccacacaaggaatccaggcgtggcaattcccccgcttatgcacaatctttctgcagttgctcccggtattaattctggaatgggaactgcgactctaccaattcagagttacagagtggatgagaaaactaagaagtgttctattccatttgttaaaccgaacagacattccccatcaggcatttataacattaatgtgaccacattagtctctagtgaaaaaagcctctttcgggcaagtaagaaaagaagggagtactccaggacagatgtccatttgcctgaactaaactataatcatctccctgaactaagagcattggaaggcacagctcgaaattccaggctaacaaagaaagagagcaaaattctttcagaatctcgaattccttctctggccgctattgacctgcacacccccagtattacattacatcaggtatcaggacctcccctgtcagatgattcaggggctgatttgcctcaaatggaacaccagcactgagaaccattttggttctgaactggatgctgctcttgcacttgagatgacatcttcttgcagcaagagtgctgatatcccaagaggagagattcatggttttgatcatttccttctgaactgcctgcattttctaaggaaggccttctagaataaggaaagacaaagacttccaaatgtttcaaaggaagattgaacaaatggccctcctcaaatgttatcccattacctttcacgtccaccgatgctatttcaagatatatccagtggaagaacagtgatacggttcttgttacatgaatgtgtatttactgttagaagattgtatattttaagttacccatgattaaaagtgagtaaaaaagggggacagagagaaatattataaaaggccatgttactcatgcattgaaaaaaaaaaaaaaaaa

SEQ ID NO: 195036 - DNA, 1000 bp, Homo Sapiens
cctgggcgacggagcgagactctgtctcaaaacaaacaaacaaacaaaagacccaatctgagtcttatcgttgtactgatagaagggtcagatatccccacatggagttgagtgggagaaagagattcactagagaataactccttagagaccaatgtctgtagcaggtgtacagcatcttgtgaaagttatggagcatgaaaagactgaagggccaggacagtttgcatgggctgagttataccagctagaccaggaatagaacaaagaattctatacctcaggatttcaaaaagttagcaacttgagaggccagtgctgagcaacccagtacccaggaaatgaaaaaaagaaagaaaattccctccgagaatgaacaaatcattggcttcattgcctcatgagcttgagagaaaggagaagagagccagagtgtggcaagtgaggccaaaatcagaagcatggcagaaatgagtgtaagtgattgagccacagacagaagtgtggcgagggacaatgccatattgggagaaggtaaagttgagtaacaagaaaccaaccgtgtgtgagagggggattggaaaaaaatttgagggagaagaatgttagaatggaagggaatgatggtggaagggaggtgtgagggtgtgtgctgagtgttgaaagaacggttggtgtctgtgtgattttccttgagtctgttcttcagtgtgtcttctgcagcttgccatgactgcctgggaaagagtagggaaatacccagagccaaaacctcctttcagtcccaccccatccctcaaaaccccagctattgcttcttttcagcttcaggtcctgatctccaatcttagtatggactcccttctcaccaagaccaccaccagctacgtttgctgtgtaatctggaaagtgataatttcctttgcttgttgggtgtgagtcacaatactttggtttgtgcacaagaataaatttatgccccataaaaaaaaaaaaaaaa

SEQ ID NO: 195037 - DNA, 1000 bp, Homo Sapiens
tttaaagtctgaggcacatctagatgcaggggtttccatatcatctgggttttgtctgtctctctgtttcttggctcttcctccctctctacctaggctgaattctgcagcctatttctcccatgacttttgtttggcagcatctggaactcctctgggtcctgggacctgctcccctcctgagtcccccctgcccccccgcagaggctgacaatgtcagatgcttcttttcccaaacgcctttccagctggggcctcaggggtgtaacccgggcgccgtcctagatctggaacccgcagtagatgcagcaaagaaaaagaaaaggaggaagagcaggaacgtggagggacctctcccttggggagcttgcgttcctggtggtgtctagggtcctggggcctgggcgcagggtccgctctgcaggtcaaggcctccatgtgcagctgcagtccccaccagacttgacctgggtgtactggggccacactccccactgtggaccatgtaccctgggctctggctctcccagggattccttctgatacccagtaacctttccacaaatttcttctctacttgaatcaaccagagtggttttctacagcttgcaaataagaatctgattgcaaacagctgccctgaggtcccaatgacccagcttaacccaacatgaaaggaacttctctcttccgtgtctgtcaatctgggcagggatctaattgatctttgagcagggctgtcacatgccacccatcccccaatcatgtcactagaggaacgtgtctttacaattgtcccagcttgggggagacgttctttccatggccccggagcgtggagcccgtgaaagatgcctgataaggtcttgtggatgtaggacgtgacatttcccaaaggaagaagctgtgtgtgataaaagctttccttttctatagaattttccctaatcattcaccagtcttttttttttttttttctttaatggcatacccacagcat

SEQ ID NO: 195038 - DNA, 704 bp, Homo Sapiens
cacaccatgggagtgggttgcaaaagaagtaggtagcttaaccttcgggagggcgcttaccactttgtgattcatgactggggtgaagtcgtaacaaggtaaccgtaggggaacctgcggttggatcacctccttacctaatgatattgattgcgtgaagtgctcacacagattgtctgatgaaaaagtaatgagcaaaagcgctacctgttgatgtaatgagtctctgactcatgctgatacgaaccgattaagacgttcagtttaatcggattttcgtgtccccatcgtctagaggcctaggacactgccctttcacggctgtaacaggggttcgaatccccttggggacgccaatccgataatgagtgaaagacattatcaccggttagtcataaccgaaaaaatcttaaagatgactcttgcgagtcgtgtttaagatattgctctttaacaatctggaacaagctgaaaattgaaacatgacagctgaaacttactcctccgtagaagtactggagtaaggagtaccctgtcatagagtctctcaaatgtagcagcacgaaagtggaaacaccttcgggttgtgaggttaagtgactaagcgtacacggtggatgcctaggcagtcagaggcgatgaagggcgtgctaatctgcgataagcgtcggtaaggtgatatgaaccgttataaccggcgatac

SEQ ID NO: 195039 - DNA, 1000 bp, Homo Sapiens
ctcagtaataaatcatattttaatgaaatatcttgaaaaagcaaaattaatgcaaagatacatgattgacaaaatatcaaaagaggattattcaacgaaaatggagaagaagcagagaggcagaataattaggagaatatgttgtcacataagccaaggaattaaagaattccaggaaggaggaagtactgctgtcagatgttcaacagaggtcattttagaaaatttaccttggttttgaaatcctttcaaagagcagtttacacaatgtgaacaagtatccttccttcattgccatcattgatatggtttggatatttgtcccttccaattctcattccagggttaagcttcttctctgccctcagtaatgtggcccttccccttgtcaggatattttggagacatgaagcatgtgggatgccctcaaagtcagctggggtttgagggtgaaattcaatgactttagtgaactccttggctcctatgtgctgttcacctggaggaccagggtttgtgcagggatgaccaccttctccctgggagctgaacagggcagagaaatgggaagctcgggtacaaagggagtgggaaagatgggtttgggcttgcagtactgaacccaggaatgacagtaactgtgtgtgttgctgcaggtgacaaaatatctgaacagaagaggacttaggagagatctgaactccagctgccctacaaactccgtcacagcttttcttctcacttcatgtgaaaactaccccagtggctgactgaattgctgacccttcaagctctgtccttatccgttaccttaaagcagtcattccttagtaaagtttccaacaaatagaaattaatgaataaatgttgacactttgatagcactgatatggagattatcctttcattgagccttttatcctctggtcttctttgaaaaacccctcactgtcaccttcctgagaatactctaagaccaataaatacttcagtatttcag

SEQ ID NO: 195040 - DNA, 1000 bp, Homo Sapiens
aatatattcagaaagaaacagaatgtctgagaatagcaaaaccaaatgtatcagcctcaacacaagcctccaggcagaaaaagatgcaggaaatcagtagtttggtcaaatacttcatcaaatgtgcaaacagaagagcacctaggctaaaatgtcaagaactcttaaattatatcatggatacagtgaaagattcatctaatggtgctatttacggagctgattgtagcaacatactactcaaagacattctttctgtgagaaaatactggtgtgaaatatctcagcaacagtggttaggtatgttttgaaggttgttgtttgtgaatttttcctcatgaaatgaaacttcaccaaagaaagcactctgtctgtatctgtctatatcccccaagtgacctgacagtttaacagtactttagtaaaattatatggttatcgaactgacccttaatttttatttattatgtagcttttgaataaagtcatgaataatatatcaggtgcctgatatcagagctggaattacagttgaaaaataccatctccatcgtcaaggagttgacagtggcagaagaaaacccaagtaaaccagagttcataatgtgctgtgatacagacatatttgggttcagtaggtatacaaaacaatgacacctaaactcaaccatgatttaagtagaaagggagaaaaccaagagagggaagtaccataaaagtgaaagcaggcagggtgcagtggctcacacctgtaatcctagcactttgggaggccaaggccggtggattgcttgagctcaggagttcaagaccagcctgggcaacatggtgaaactctgtctttaaaaaaatagcggaggtaatggctcttgcttgtagtcccagttacttgggaggctgaggcaggaggatcacctgagccctggaggttaaggctgcagtgagctgtgatcacactgcactccggcctccatgacagagtgagaccctgtttccattt

SEQ ID NO: 195041 - DNA, 1000 bp, Homo Sapiens
aagatttatgtctgggaactaaaatatataatgccaaatgtgtttttgtcaattactagagaattctgtgcaaacatatcatctcttcaaatgctgcacactttgcttttgttaaacagcaggtagtagacagaacaataacagtttcgcgttaagacttttaaaggaaatagaatcgtgattaagaaatcagaatttatagatatattgggataaatgaagaaataaaaatgtttgtctagaatgtagcatctagtgactttttaaagccctaacgtttacataaagaagctctagttcttatagaaataacaaagcaaataaaagttcttaacaatcccctctttcgaagtgcatttttttaaagcagggcaggagacatttggactctagctatatgacatactgggaaaggcagagggtggagggaagatttcacttcattgtctagcccagaatcttgagcaagctaaagaaaccatcataatctaaaattgcttcatttaacactaacaatttagactttttaaaccaagcattgaataatggctggataactgccgaagtaagcgccgctccatgaagtctgcttacttatttaaaaattgtgtatcagttttaaatactgttcattgtgtgcagatataaggggaatagggcattctgtagaattatacatgtctagtttgtaaagtgtgtcctgtgtactgcagatgtgtgttctctgggctttatgtatctgtacagtagctttcacattaaaaaaattgtggacaaacttgtccggggggtttgaggggagaatggtggtttatatcaataacgatgctgtactatagtccatgtaacaaaagatctggaagtcaccctcctctggcccacggaaaattttggtaatcttctaggttctaaaatgaagatgtatgggtactctggcagactgcatgttgtataatttgaaaaatactaaaagtggaaaataaaattgaattaaactttg

SEQ ID NO: 195042 - DNA, 1000 bp, Homo Sapiens
gagctaatttcactggagccaggctaagcattagggtaagtatttgtcctgtcttgggcagtttcctcactgaaaaatgagggcagagttctaagccctcctctaattctaaaattctaattaaaacgtcgcgagactagtggtgcatgcctgtagtcccagctactcgggaggctgaggcgggagaatcgcttgagcctgggaggtggaggttgccgtgagccgagatcgtgtcattgcactccagcctggcaacaagagggaaactccgtctcaaaagagaagaaaaaaaaaatcaccagactaatatttaccttgagaatccttcttcatcttcttgtaatgaccttcggtgacaacatatctgttttagaagaaaacgcaattaagattatctatgacaacaaccaccgtctccaaatctgtattgattccttttattcattataagtctcatctacctgatgaggtaacttttttgaagacaggaattgcatactgtgtaacactgctttgattcttccatagttcagtcatccttgctatcttgcgggggattggttctaggataccgcccccacaccataccagaatctgtggatgctcaatcccttacatataatggtgtaatatttgcttataaccaacacgcatcccccctatactttatttacttagcgacgggattgccctctgttgcttacgctggagtgcagtgtcatcctctgttactcaggatggagtgcggtgtcacgatcacggctcactgtagcctcaacctcctgggctccagtgatccgcccgcctcagcctcttgagtagctgagactacaggtgcatactaccacacctggctatttttttttttaatttttaataaagacaaggtctcactatgctgcccaggttggcctcccaatgtgttgggattacaagtgtgagccaccatgcctggccccatgtaatttaagtcatcactaataaaatgtatacatattgt

SEQ ID NO: 195043 - DNA, 1000 bp, Homo Sapiens
cacggcagagaaaaggccttgaagagacttagcctcttataggcacttgggactcccccaccctccccaatcatatgagctgtgatcccatcctccccggacccctcccttccccctcggtgatgtggggtgtatgtgtgcgttcctctgcgtgaatgtgtgagtgagtacacatggtaggggaggagccagggcgactcaggagtgccacgcacctgctctagagcggcagctgtcccagtccctgctgtggaagtgggggacagggccctctcctgggggccattggtgctaatgagggggatggccttgatgtgggtgctcagcatgcctcccccagtattggcccggggcactagggcaggcagggtggagcagcaggtgcagtatcggtgggaggacgggttgctgggaataggacgagggggccaggccaggacaaggggttgccagagccatgaccactaccccgcccccaccacccgcctctccatctcagtattgcccctcccatcactcataacacacatacctcatccagcctcctccctgctcagacttggggagggtgggggaggagcccctaccccttctcctggtggcgggtctgcagggctgggagagggcagggcgttgtgagagagagaccgtccataaggaggacagtaactcctgccctgggaactcctgggcgggggggagggggacactgcccagaggcgctactgaatgtatgagaagctggtgctgggctggggggaggggggttgtggccagaaacagggaaggaggtaggtctcttccccagggaggggtgggaccggcaggggtgacttgaggggctcctactcctgccccacgttgacaatcagtatgtctgttatgtgcgatttttcaccccgttgtgttttgggtcaggattttaaagaaagatatttttatggtaattgttgctcgtctattttactatatatttatgtaataaatatatgatgaaaat

SEQ ID NO: 195044 - DNA, 1000 bp, Homo Sapiens
gcaaaattcacttactttttgggcacatttacccagcatttcaaataagtgtataggcatgtgccttgtttaagtacaatttataagacttcatgtttgcaagttacatattagggtagtgattgtttatattaccagggattctacactttaccaaaaaaaattgccataagattttcctgttccattttaaattgtcttgatatttaaaaaaataacttctacattctcaggaagaaatacatgaagtaaatcatatctccatgtctgtttccagatttctctcatctttttactatcccaatacattcctaattcctataaacgtagtggcttaaatactgaatacctggcagctcttaaagatcccttaggcagatgatgataattttcagtgtttcgtcatgtttaatagaaatcaaactgacttgtgttttaaaatacaagttgtctgctagtaaagttacatgatttaggtgtgttttaggttttctgcaacaattagctgtgaacccctaatgtagctaagtttatacaaattttataatcaaaattatttatttttatttttttagagtatgtcaaaaacatatagtgtttgctttgtgaaatacatttgcttagagttataaaatatactgtgactcagaaattgtaaagtcagtttgcgttgtaaaaatgaatactaccagcatgtcaaaagaaaaataatttacatttgtaatataaagtaaaattgtatttaatatatttattgaattttaaatttgcactaacttgaaaactttaaaggttatactaatttaatgattaatgtggacccaaatacataatttggccaaaaaagtcattagaatgggtaatggttttgtgtggttttccttcaaaatgataatattgaagcaagaaccagcattttatattgataatttttttaatatttctacccagttgaggacagtggaatataagtagatatatttaaaatatctagatattt

SEQ ID NO: 195045 - DNA, 1000 bp, Homo Sapiens
ggatgccaggaggtatgcgtctccatgaagcctgacggtcctgtctgtctttgcagtatgaacggtgccttagcgtttgtggacacttcggactgcacggtcatgaacatcgcagagcactacatggcttccgacgtcgaatgggatcctactgggcgctacgtcgtcacctctgtgtcctggtggagccataaggtgcaggcctgtggggcatagttttgactgtggatagaagcagggagtgctggctagctgctgactctggtgctgtcctgggacctcagggaaggggcaccaagcctctgtgttgaacagaagccttggctggtgttagtggcaggaggaggaggattctgggttgtagaagaggtggcgccgagtgcaggagcagcccctgctcatggttgcggggaggtggggggtcttaccctgggcccagggacccctgaaaaggagtgagaatgtctgcagagaggagtcgtttcctttgaagtctgaacagagttccataaccgcagacattaagatctgttttggggtcagtggttgagtccagctgccgcgttacccacaactcgtattccaaaactgctggttaagtttgtcaaggactttcagtatttagtgacttgtaaaaacattgatggaggcactgatacttgaactagtccatgccaatagagcctgtgaaaccaaacgcgggtaattttgtttaatgagatacagaatttgtaggaatatcaacttcccaaatgttactgcaagtgtctagagttagaaatcttcgcattcgaatcaggatatgttgatcacagcctgtgtccaggtacgttcagatgtcactgcggtggggcctgccttgacacttgaaatcactttaggccaggcacagtggctcacacctgtaatcccagcacttcaggaggcagaggtagaaaaatcacttgaacccaggagtttgagactagcctgagcaacatagcgaaaccctagccccatt

SEQ ID NO: 195046 - DNA, 1000 bp, Homo Sapiens; identical to SEQ ID NO: 114987

SEQ ID NO: 195047 - DNA, 1000 bp, Homo Sapiens
gtggtgtgtgatgcaggagtaacaaaggcgttgaaggcaccacgtgtgtaacaggcacgcgggagtctgggttagtcagaaaggggaaagcagtgctcaggttgactggaaacataggccggtgaccggagacagcctgaggctccagaacacacaagtgacctgtgaggaaggaaactgagagaccctggagagacaccggtggtgccctctcaggtcctcttgagtgttacgaggacggggaagaaatagagcctcccagccagggtcagccagcacagcctctgtatgtgaagcgtcaggacagcgacggccgggaggaggggatgctaggaagtgagtaccagaagcactagacagggttttgggaagctatatttagctggggacgaagaaggaacaaggaaggaacaggcagatggcatagcacgaacgccgggtggaaagtggaactgctcgctcctgtcgtgtgtgtctcttctccatcaaaaaagaggctcttaaaaatcgaaagcatgccacagatacgatcagaggctctttggaagctgcatttttgtaactggttctcgatgatcctctcccatggtaaagatttggcaccatatgaagtccttgggaggacaaatcttcaacagtagcccatagatgaaacccagatagctgtggaaactaatgtgctctttgaatgttaagtcaggaaagcttgagtggcctggcacggtggctcacgcctgtaatcccagcactttgggaggccgaggtgggcggatcacgaggtcaggagatcgagaccatcctggctaacacgttgaaacctcgtctctactaaaaatacaaaaaattagccgggcgtggtggcgggcacctgtggtcccagctactcgggaggctgaggcagggagaatggtgtgaacctgggaggcggagcttgcagtgagccaagatcgtgccactgcactccagcctgggcgacagagcgagactccctctcaaaaac

SEQ ID NO: 195048 - DNA, 1000 bp, Homo Sapiens
ttctgaaaactaaagaccaagaaaaataagatcagccagagaaaaacgatacatttcattcaggtgaacaattctttgaaagactggatcttcaccagaaactatagaggccagaaagaagtggaacatttttagttttgaaataactgtcacccaagaattctatatccagtaaaaatttctattttactggaataaaagaatgaaataaaataaagacattctcaaatgaaggcaagctgaggaaattcataaccaaagaatctgctttaaaaaaatgttaaaccaagttcttcagacagaagagattactgggggcaattcaaaactttgggaatgcaggaagaacatcataaatggcaaaagtccacataaatatgaaactattctttacttctttaagtgttatgtgatggttgaattaagtcatgatactgtctgatggaggcttcagtgtatacagatgtaagacaactagaacatgaggggagaagggtgaagggacctagatggtagtgaggtttctacatgctacttgaaatggcaaaacattaatctaaattgactgtaagagtatgtgtagttggccaggctggtctcgaactcctgacctcaggtgatccacccaccttggcatcccagagtgctgggattacaggtgtgagtcaccatgcctggccaacaattccatttttaaaaatgagacttgaacagccacttcaccagtgaggacatagaagccagtgaacagatgttcaacgttatcaggcattagggaaatgaaaataaaaccacagtgagctactgttatgtacctactactagaaaagctaaagttaacaaatactgcaactatcaagtgctgacagggatacagagcaactgcctactgtggtgtttaacttacaggggtgctcacaacgctggtggactgcaaaatgacagacgcactcgggacaacaacttggctcttatgaaataaacatatacttaccaaatg

SEQ ID NO: 195049 - DNA, 1000 bp, Homo Sapiens
ttgggtataagtaacagacttttctttttttctatttttctatgtggctctttgcattgtgctcacctggagccctttacacacttaactaatttataaattttttacaaatgtattttggtcagtatgtttttgttacagttatatatccaggaagaaattacagcttgtggtattttgctgtgtcatcttgcttacgtagtttgtataattttataggttagatttgtgaagtatatttatctgagtctagcaattgaagtcatgtgtttttattgtttctttcagttatgtattctcattttgcccaagacctttggtcagagcagagcataaaagattctttccaaaaagtgatactaagaagatatgaaaaatgtagacatgacaatttacagttaaaaaaaggctgtgaaagtgtagatgagtgtccagtgcacaaaagaggttataatggacttaaacaatgtttggcaactacccagagaaaaatatttcaatgtgatgaatatgtgaaattcttgcataaattttcaaattcaaacaaacataagataagagatactggaaaaaaatcttttaaatgtatagaatatgggaaaacttttaaccagtcttcaacccgtactacatataagaaaattgatgctggagagaaacgctataaatgtgaagaatgtggtaaagcctataagcagtcctcacaccttactacacataagaaaattcatactggagagaaaccctacaaatgtgaagaatgtggcaaagcctataagcagtcctgtaaccttactacacataagataattcatactggagagaaaccctacagatgtagagaatgtggcaaagcttttaaccaccctgcaacccttttttcacataagaaaattcatactggagagaaaccatacaagtgtgataaatgtggcaaagcctttatttcatcctcaacccttactaaacatgagataattcatactggagaaaaaccctc

SEQ ID NO: 195050 - DNA, 1000 bp, Homo Sapiens
cggcagcccaaatacggagacagaaaagttcatcacatgcacatgcggaagaaagggattaacaccttgataaatatcatgtcacgccttggccaagatgacccaactccctcgaggattaaccacaatgaacggttggaattcctgggtgatgctgttgttgaatttctgaccaggtaattaggcttttttgttttttacaattcctcaataattacattttataggtaacatacttattacattgctttctttgtaattagccaaataaggcattgatacaccgtgtattttatctcttttgtagagcttagaagccacatgtctgtggcccttgccctgataactggcactcactgatgctgtaatgagtgagattacaagatgaaaggctggtgtctctgtcctgtcaagtatatgttaaagttgcttacagccacaagagatcagcttgccttggtctagatgcttcagagcttatattcaatttgtaaagaaagggatgatattttaaaatgtcatttcatcttctaggatttgtctttgatccctttcttactctttctgatctcaagggaagtaaagcttacaagtaattttaatgaccagattttctagtgtgtgtgtgtgtgtgtgtgtgtgtgtgtgtgtgtgtgtgtgtgtgtgtgtttctctccagaagtgttttaggatccttaatttgaaagtacgggtaggacgctaggcgcggtggctcacgcatggaatcccagcactttgggaggccaaggcgggtggatcacctgaggtcaggagttcaagaccagcctggccaacatggcgaaaccacatctctactaaaaattcaaaaattagccaggtgtgatggtgcatgcctgtagtcccagctacctgggagtctgaggcaggagaatcacttgaacctgggaggtggaggttgcattgagctgagattatgccacaacactttagcctgggtgacagagtgagactctgtctc

SEQ ID NO: 195051 - DNA, 1000 bp, Homo Sapiens
aaaatactatgtaaaatatcttccaaaatgctttttatactttttttatttgtaatttggtctatctaaaatgttcgttagcttaacttaatgggcgttattggattcatatgactaacgtttcctcagtattgtaatgcttgaaatatttgaaagaaaaaatgttgttttttagttgaaactggtatatataattcagtgcttggcaggttagtatatttttatgcatttttcagagtcagcagtttcaaatcttattgttatcatgttataaaattttagcccacatttcaggctccgtaaatcatttgagccattattttttcccaacaaatggtgaattttttctttaaatgtggatatatatgttgtaatttatgattcctggttatgtatttttgtgggatcctgcagtaaaattgacttttttgtgtctttgggagatttaaattgcgctaacagtgttgcgcaaaaatgagttcatgccatttaacatattgtattttaattattaactgtattaatttactatgaaatggacatccttttaactaaaatggaattgaacattgcagttttcaaatatttttccttgttgggtctggaaaaggaattctactttgatctgcatagaaaattttgatacaattttttgaaagttcttaggtgaaacatttacccattaaaaaggaagcagaaatactgagacatgaaaggcattatcaactaactctagactctagaacccattctagcatatctcacgtgcaatttttaaaaataagttaataattcatctcatatcaacaaaagcctttgaaacatgggttttcactagatatcacctagtgctaagataaaaaccaaaacaatatcagaattacatttatgctctaaatttgtagttgtccattgttgtgcttagtaaatgtgtgtcattaaattaatgctgtattctcctagctattatggaaacttgtttaaataaagatatggatat

SEQ ID NO: 195052 - DNA, 1000 bp, Homo Sapiens
gcacagcagtcctgtgaggctggtctggtgtcttgctggttccgtctggtcagaattaaagcagccccccgggaaagttggcctagaatgtagaacttaaaatggcagtcctcttttttctttttggttcacatatatttaatgtaatttaggtacacttttttacatctgtcagatttgaatgaaataactgatgtttttattgaacattgtgttcatgcttttgaagaattaaactgctttttctaaaggtgacgtgggattgtgtgtatgtgaacatgaatgtctgttttcagtttctgcattatttagatgcctagcgtgtgcaagatattttatgtagcatattaattttgaatgtttttaaattattgaggttatgtccttaagtaaatataatgattaaaatgttttactctggaagaaaacaaagttaggcattttagtgaaaagaagtttataattttccctttcgacatcttctgaagaatgcattgcataaaatattgtgttcttattttcaaacaggattttagtcaatgaaataagttcagcattcccttgaacttactttactttttcctctcgtgtttcaggaaactcttatcactactattgattctagttccagttggtggaccaactgggtgatccctgccatctctgcagtggccgtcgccttgatgtatcgcctatacatggcagaggactgaacacctcctcagaagtcagcgcaggaagagcctgctttggacacgggagaaaagaagccattgctaactacttcaactgacagaaaccttcacttgaaaacaatgattttaatatatctctttctttttcttccgacattagaaacaaaacaaaaagaactgtcctttctgcgctcaaatttttcgagtgtgcctttttattcatctactttattttgatgtttccttaatgtgtaatttacttattataagcatgatcttttaaaaatatatttggcttttaaagt

SEQ ID NO: 195053 - DNA, 1000 bp, Homo Sapiens
tgtgccctggtgcacaacttcttccctgaggccttcgactatgggcagcttagccctcagaaccgacgccagaacttcgaggtggccttctcatctgcggagacccatgcggactgcccgcagctcctggatacagaggacatggtgcggcttcgagagcctgactggaagtgcgtgtacacgtacatccaggaattctaccgctgtctggtccagaaggggctggtaaaaaccaaaaagtcctaacccctgctcggggccccacggtgagaaacgccgcctctcccacctgccccgtttcaccagaatctgctcagcaaggccagagagggtccagggaggcgggtgggggaagtaaggggggcatttagtcaagccagaggagccagacatagccctgtcttctggcagttcagggcccagcaggtgagaccattctaaatgggcagtgatgacccaggtgggcagcactgtgatgggggaagcccaggggagatgcctgacccaggctgcaggtctgggccccccatctgaaaaaagtgcaaactaagctgggatctgaacaagttcaggctaaaggagggagagggagttccaggcagaggaatcagcctaggcttagcagggcaagagagctggagagcacagcacatcaggaagggaagaaacttgagtctggatatgagggaggagggggccacagttagaagtttgaccttctggccgagcacggtggctcatgcctgtaatcccagcactttgggaggccaaggtgggcagatcacgaggtcatgagttcgagaccagcctgaccaacatggtgaaaccccatctctactaaaaatacaaaaattagccaggcgtgtggcgcacacctgtaatcctagcgactcgggaggctgaggtaggagaatcacttgaacccaggaggcgaaggttgcaatgagctgaaatcatgccactgcactccagcctgggtgacagagcgagactccatctc

SEQ ID NO: 195054 - DNA, 1000 bp, Homo Sapiens
aaatctcataaatgtggaataacatttgttcaaaaatgatagcttagaaaacactagagttcatactaaaagatattttgcaaatacactaaatggaaaaataagcaaaatccaatttaagtaaacaatggaggatttgaaggagaaaggaatagagcacggacacgttcagaaatgacactgaatccctgtgttgagtctacagagacatctagacttaaaatagatcatttatatttaagtttaaaaggaggatgagactgagtttttgtagagttataattacattcaaaatatacttttttgcattgaaaaaatgttaaatttttgaaaagcgaatattgatgtcattctattctcaaatcagtagatgctgtgtcttcatttctagtgctgatgtgaaaacacatggtcagttgttgctgcgtcagagatatgagaaattcttttctcttaggtgtgcatcactgatatacttgtccgtgaaaggtgaaagacactgaaatgtaagatgcgtgagtaaaatcttggtagagaggctctttgtggttgttttatatacttgtaagtgatttatgagataggtgtttagaataatactcttctgttagggtcaccctgatcagaccgttcccttcccctcccacaggacttacaatacggtcccttgtgctctccgcacagctaccccagggcaaaaaacaaaccccccttcactgatccctccagtaactgtgcagacagttacaggatgcggttaacatgtctgttcacctcgcataacaaagctggcaaaaaacatctccaggatgcagacaagacacctgcaccctcgactaagctcccccaccccaacccagttctcctgcacccccaactcagctcccacaccccgacctagttctggccctataaaaacctgctatagtctgtaagcagggctgcctcctctaactgtggtggagcagccaagcagctcaataaagcttgcttgcctgac

SEQ ID NO: 195055 - DNA, 1000 bp, Homo Sapiens
ctttactggccacaaatgcccagctgaagagcatgactgtggatcactggtttttccctcctgctggaaatgctggggtggtagcggtcgattaggattttcagtggagaagcacaggacagttctgtaatttatgggactccttagccaacataaagaactgcaggaaataactgcacagccaggaggatccgttggtgggaatttaccgtcattcctgcccttttatttaacatcatccacagagagatgttatacaaatggaggaaaccattataccttttgatatggaatatattacagagttacagttcacaaagtagaatgctgagctgaaaacccgagtttctgctgtgactgtcatctcactgagcacttcgcttttctttgcttttattttttccttctataaaaaggcaataatgataatttataatagtttccctacccagagatattagaagtatgctacagtgaatgttaaagtaccttgagatccttaaatcaaaggtgctatatacataagtaagactctactttcagaaaaaggtaatattatttcctgcactgatccctactaattctatattgatccaaaggcaactcaatgctaaaaaatgtatagaaaatataagtctgtgtctgtgtactgtagagatgtatgtgacaagtgtaaacaaaatgaactgaagcagtaatgaacagttattagggggaacatgataaagagattatattaagcttatgtttcaccataaaatcctttttatggcttactaaaaccgagctcactgtaaaatcatgatccaacttattgctaatctttatgatatgcttattcctaatctttatggtatggtgtcaaccgttcatttgtatcttattgctcattccctggaccacagactagggacagaaaatacttgctttaataatatatatgctgttgatttcacaaaaatttattaaaatacagcctgggtacccagtgaaagagctg

SEQ ID NO: 195056 - DNA, 1000 bp, Homo Sapiens; identical to SEQ ID NO: 114990

SEQ ID NO: 195057 - DNA, 1000 bp, Homo Sapiens
gtacttaataaattataggctcattttgttctctgctagtttaaagtaattcgtttaataatagatgtgtttttagaggaaatgctgttacttggaattaattttccagttatacagtcttctataacttactaataatattctatatgtactttatgtaatttccctaaaaagaatgaactaccactacactatggtgttaaaccaaaatatagggaaaataaacactaactgctgcttatggataatgttgcaactacttgttatgcatataaatattttactttttcacatgtatagattgcatttcttaggtgttttaattttttaaatatatttatgttttaaaaatttagttttgttttctgttttataactatagtgagaatgatgttttgaagcaaaatttttggttataaaatagttttcaggattatatatatatatactggatcctatcgccttttagtagaatatgaaatattcttttagaaatccaatataaataggttataatagccatattctttattactttattgagatataatttacatgccataaagtttacccttaaaatatataattcagtggtttttagtgatatttacaaagtggtacaatcatcatcactttctaattccagaatattttcatcaccccaaaaagaaatcctaaatccattagcagttacttcccattcttcccttcctccagcccctgaaaacactaccatctacttttcatctgtatggatttgtctgttctggacatatcacataaatagactcaaacaatatatggcttttttttttttttggtctggcctctttcatttagcttaatgttttcaaggttcatctatgttgtatcacgtatcagtactttattttttgtgtggcacgtcatatggatataccacaatttgtttatcttttcattaattatgggcatttggcttatttctacttttttggctattataaataatgctgctgtg

SEQ ID NO: 195058 - DNA, 1000 bp, Homo Sapiens
gatgactgactgggaaattccggttggataaaatggcttttccacattgcaactttgcatctctattaggaaaatttagattgaacctttcctctacttgatgcttagtttgagaacagttttcacaactttagagggtctctctcagagtatgttatactgtaaccttgaagtttgagatgaaacaaggtgtcagaggttttgaatctttcaaaggaattgccttttacagattttttttttattccctaagaagggaaaaagagagggaagaactacactaatgttagagataaggtatgttttggctcaaaatgtgtcatgaacctaaaggtaacttgatgggcagaaatgtctcagccatgtgaaccaagaagtgggaccacagtgcaaggctgtgggtggcagcactagatatggtggtggcaggagtgtgacatgtaggcactccatgggggacagctggacggtgtctatcaaaagtgcaaatgcgtaagctctttgaactagcaatgctactcctaagaattgtacctgtgtacaaggtacttgtgtacaagagtttttgttgaaacattgtaatagcaaaaagttggagagtgccaccaatacaggggaatggttaaatacattatggccagcttaaacaatggaatagtttgtagaaatttaaaacaatggatcctgtgtgtgtgtactaccatagaatgggccccaagatgcatgattaagtgaggaaaaaagcccatggtatcctaatgtttggaatggagaaagtgtgtagatgtatgtgtgtgcatatgttttcacacagacgtatacacgtgtatatcatatgtccacctgcatatgcctaggatgtctctgggaggatatctagcagcccggcagcctgaattgcctctgggaagaggggtgggaatgacttttcaatgtacaccttttgtaccttttgaattttgtaccatgtacatgtattatctattaaaaaatagttctt

SEQ ID NO: 195059 - DNA, 1000 bp, Homo Sapiens
ttgtaaaccttcctaggagcttagctacatgtcttgttagccattcaatgagaagtccaaatcaaacgttggcaggattttcttattgttttttaaaaatatgcagttcctaggtccctgtcaacattttattttttgtttagtcaaaaacaacaatgcctaagtataatgctttaattcagatgtactgaaaatacagtaaatcctgccccccccaattgataatttacaggtgaaaaaaagaagaccctggagggaaaatcgcaggaatagacactctgaaggcctttacaaataaaaaggcagttaatggcgattttacatgtttaaattagtaatgcggggtgatgggcatctcagattcattcccacctactatccctttttctagaaaccttaaaggactgccattccttggcatttcaatgagatagtcagaatttatattgcctgctttgccgcacagaatataaatgctaatgttatttttcctacatctgaattgtcatccaaatatccaaggtcttttttttttttttggtcttttgtctttttagggccacacccgcagcatatgggggttcccaggctaggggtccgatgggagctacagctgccagccacagccacagcaatgccagatgcgagccatgtcttcgacctacaccacacccgatccttaacctgctgagtgaggccaaggatcgaaccctcaacctcctggtttctagccgggttcgttaaccactgagccacgacaggaactccccaaggtctttttaatcttaggctggcctttgctgacacctgcctctctggtccccattcataccgcagggggcggggtgcttttgggaacctatttggcaccgcccattgggtggtcctctaaaggcgaggctggctgtcaccctcagcacctccgtggtaacaccagaggaaaccaaagcacagttgtgtgcaggctgaattcccccagcttcctccccaagaagcattg

SEQ ID NO: 195060 - DNA, 1000 bp, Homo Sapiens
ttccagagactgagtaggacaggctttccagggtcccttctgcctcaggaatcttgtcttgtgcttcctttccaaagaaggttaggcccaggctcagggagccagttctcgggtgggtgggagcaggccacacatttgcagcccttggaaggggttcacagatcccgtggaagctggcatccagctgcacccaccagtgtaagaggtcctggctaaaaggatgtgtggtatggagcagacgtgctgattggtactttagtctaaggtgggtggtattcaattcgttagaaccagggaaccccctcttcaaacgactgcttataaaggcccccgacagttacaatcaggggttgcacactggtagccggtgtgcaaaatcaaatacagaatcatggggggtttttagtggttgttttgtttttggttgcccatggtttcacttaaaaatgtttcagttggttgccaacatcttaaaatctgcaggttttccattaaaaatccagatttccagcttctcttgcaaaaacgagatgctctagcaacaccaagcctgccgccctgcttggcaacaatatgctgatgataagtagtgggtttccaatttgcgcagtctccacccatctctgctgttaccagcgctaaggccaatagtggaacagttgccattattcatttcatttggattccttttcttatggttagggaaagcaggaaatattccccgcacccatgtctatgaaaagaaggaaagtaagagggccatgcttttcaaaaaaaaaaaagttaaaagagtctctttctttctgaaagtgaatttatgtttcctaaagattaatcttctaggtccagaggtcgatttagaacagaccgtctttgtttttctcttgaaactagtgattctcaaagtggagtgcctacgtgtgcaacagctgcatcagttgggggcttgtgagaaattcagatagttggatggtacccaaacctacggatccagaagctt

SEQ ID NO: 195061 - DNA, 1000 bp, Homo Sapiens
acagagaagccttttgttttgttctttaaaaccagactggagaacccagctgagggtggagatcatgacacagtagggacacctgattactttctttaaactaaagaaagccctgcagtggtgctactacttcagcaaccctacaaatcaaagactagtcataatagatgtgaatattaattcaacatattaccataaagagacagaaagatacttgagaaggtagtgttccagagttgggttctggttctgatgcggcattgtaggattggcaatatgcacgtatttcatgggataagcaagatgattttgttaggaaaataaagggagttgaggcaatagctctacactgagaccaagtgacagttctcatgtatctaatgaactattttttgactgcgaaatcttttgagattatttctagattcattgtccataattttcaaaatgggctctctcttgttctattgtttacgcttgaggtgagataatacacacatatttctttaccagtttcaatattaacattattattaaagataattgttttaaatatagcttggtgttaaaaacaaaatatacatagaatatctctggggagatacaggaaaagctgttacctgtgaggtaaggaaatgaagaactgggatgggcatgtgacttacttttcacattccatgatttatattgtttgaattttgtactatgtccatggcctttctaatgaattaaataaacataataaaactagtagacaaataagttacttttattagaatcatcattcataactttagttgaaaaagagtaactgagtacctaatatatgtcaggcactcggcttaaagttgtcaatattaattaagaaagaaggtttcttagtcaagagcatgtattggtaacaaccatcaatatatttgcttctctgccaggcgcggtggctcacgcctgtaatcccagcactttgggaggccgaggcgggcggatcacgaggtcagga

SEQ ID NO: 195062 - DNA, 1000 bp, Homo Sapiens
agcagagggtgggctggtatgacagggagtctggttccctaggctctccggcctcctctctcgccatgtggtctctatgcacacacacactccccttccaccttctgccatgagtggaagcagcctgaggccctcaccagatgcagctgtccaatcttgaactttccagccatgagaatcatgagccaaataaacctcttttctccatgaattacccagcctcgggtattctgttatagcaacactaaatggacgacaccactcaatgaaactgaataaacgagtccaagattacccaggtagtaagtggcagaatcaggaatctaacccaactctgacagcatatcttatgagtttatataccttttccatttacagagcattttcacatgtactatctcatctttttttcttcactgcatgaaacaaaaaagcaaaaagcaatgatcctattttacatatgatgaattcagtctccaggtcccatagtagcaaaaggccaagataggactcaaatctaggtcttacattcctaagtgtgataatcagctaacttcaaaatgtgtccaaggcaccaggcatggtggctcacgcctgtaatcccagcactttgggaggccgagcgggcggatcacgaggtcaggagatcgagaccatcctggctaacacggtgaaaccccatctctactaaaaatacaaaaaaattagctgggcgtggtggcaggcgcctgtagtcccagctactcaggaggctaaggcaggaaaatcgcttgaacctgggaggcagaggttgcagtgagccaagatcatgccactgtactccagcctgggtgacagagtgagactgcctgtcttaaaaaaaaaaaaaaaagtgtccaagggactttcttcaatgttagtcagtagtgtggctaggtggcctcagacaggccagtgaaatcgagaaaatgacactggctctccccttgtcaggagtttctactgcctaccccagctacac

SEQ ID NO: 195063 - DNA, 1000 bp, Homo Sapiens
aagcagtggttgagaatagttaaattattaaaaacagtacgtaattatgtgcatatcatcacatttcttttaaaatattgctttaattcatttaaacatgataattactctttgtgcttgtaataaggtattgttttattttaaaatatggttaagtactgatgaatactcatctcgtagttctttgtcatgtgccacaatccaaacattgctctcttttcgtattgcagtcaagacccatgggaatcagtagacagctgctacaatgtcagctttaaaccaaaattttagtgagggcatatatcatggggactatgtgggaatttcttaagacagatggtcagcaacttcttccaaacatttctgaacagagtgttcttttcaccattaatcccataattatcttcctttttattatgaagtatcacttttatttgttaagaattgtagtaattttcagatcaggaagagtaaaggaaccaatatttatgaagtgatccctgaatgctaagatttgctgaagtggcatcgttgtctagggtaaatacccaaggtctgtagtctagtgccaagaagattaaggacacagacacacacgaggagtgagtttaggagtggaggtttaataggcaaaagaaagagaaaggagaacagctctcccccttgccagagagagatgggctcctaaaagggaaaaactgaccatactacaccatattttataggcaggcttgaggaggcggtgactgatatatgtagggtccacagattggttcgaccaagtgtgacatctacatagtgcatggggaagactggtcaccccaccataatcttattatgcaaatggagtctttgcctggcctgcgccatactgtcttctccttacagtacgcacggtttagcaaagagaagggaagacggagctgccattttgaacatgcctagtcccaggtagccttttcctattggcacaactgccggcattcatccgtgcaagctt

SEQ ID NO: 195064 - DNA, 1000 bp, Homo Sapiens
caggtctgggaggcacaaagctagtgctgactgaatggcaggctctgagaagtgggggcaggtgggagaaatggctgtgcagccaccgtcaccctcaaggtgcacctgggaggcccctgataacagctgtggatatgcacacgttcacacttgcaggcccacacacgtccttacaagcatgagtttgctcaagaacttgacctgctagtggggtggggctcaggggagctgggagatactgtcctggcgcaagatgccgtctgagtccctcagagagcttcgatactatgtaacgggggctcctgtcaacctgcctcccgcctcccccctccccatgacctcattttttccttcatccatgttcatggtgacaaagtcagtgtcaccaaggacagggttggagtcacccaatgtgtccagagaggtggggagtctttctactgggtccctacagggacttcccatccaaatgctttggccttttaaagaggtgaatggggaggggctcaagtttgctggggcctcagtctcaagtccaggtcccctcttggacagcctggcaggtgggggaaagaaggagagggaaggaagaaaaggagaagaaggacagagagggaaagaaagggcaaacccacagtgccttcccctctgccagtcccgagatgcctgtcacccagccccagccccagaaaagcccccaagtcacaccaagcccaggtcagtggacagaggaagaacagccaccgccacctgggagcccaccaggaagaaagcagagaaggagggaaggaaggctggtgggagggagcaagggagggaggcaggcgggagggaggaggagagagggaggagagagggagggacggaggagagacgcttgaacaaagaaacgaggagccggggctggcaaggggtgcagggaagaggcggccagaggaaggagtccggaggcacctgggatgggacagggggccaggtggtcaaactgtacagccggatc

SEQ ID NO: 195065 - DNA, 1000 bp, Homo Sapiens
agaaatgtatgagagttacagtttctccgcatcttggccaacagttgatattcccaaccattcgaattagtgtgtagtggtactttctatacttttgactgaataatttgtattctaaaaggataatataatctggatttattaaagcactaactggactttcttggtaatgacagaataaatagtgtctgtcatttgtgactaacattttaaattgtcttaaactactgtgtgactcagtagttcaagacaactgtaaaatattaggctttttttctgacttttgtcccttctatgtcggacttagcaaactcccaactctttaagcatctgtttgtcctcctcttgaggtgtatagactacatatacatcacacacacacacacacacacacacacacacacacacacacacacacacacagagttcttagacaatttaggcattgaaaaagaactgaacttagtattctgaaatgtttgtttgaacattaataatgtaaacattttagaagctgttggatagtagtttttactagatttcttctatggacataattctgaaacatcattatacactaaacatagaaccatatttgtcagtttatagccctgtagcttagttaaggggcaaaccacattccctctaaagaggtcacgcagtcacatttccatttgttgtgagtcttcccattcacccacgcacagaatttaaaaatggggaaccacagcaactattttggcggagggaggctgaaggacaataatcagtgtacacatgctgccattttttccttgtagtttagaaactctgaattagtgtaggaattattttttttaagtcaacaaacatttgcagagtgctacttggtggccaacactcagtgccagtgaattctagggtatggttcttgcccttacaaggctcataggctttacaggtaaacgtgcgtcacaggggttcattgtactgattatttcatcactcaggtgttaagctt

SEQ ID NO: 195066 - DNA, 1000 bp, Homo Sapiens
attcctccattctttcctactgggattgcaatgggcatgtttgactttctcagtgtcttcaacatctcaagctctcatatgttccatccccttgctcctctgtgtgaaattctgttatttcttcagattcatctttcattaactcttttatagctgttgtttaacattgtttttcaaatctttctggttatttttgatagccttttgttgctcgctattataattccattttaaaaaatatctttgaacattttatatctaattattttacatttgtatctagaaattctaatgctgatttccttagggatctaatttttattgtctctgctttggtgtagtttaattatgtgttctttgcttgttcaattgacagcaatcccaaagacgtaactaaactggagtgctttttccagagaggatctgtttatttctcctgagacaatgacaacacccacctctgtgtatattttactgcttttaagggttcccgttcaatcctgatctctgactcagatctcccactagagcactgatatggccatctgccctcagggcaacccagcttagagtgtttaaaattctctataagcacaacagtacattaatcagaagggcccattagaggatctagttttccctacttctaaaagtggaagttcaaacctgtgtttcaattttacatacactcttatataatgtaccctcccttagagtgcaaagtatcagtactatcctttatcatcagtttaggagttatatgtagtattactaccttaacattaaaaacaataacattaaactgcctgtaattaattataaaagcttagagtattcagttaaggtaaacgatacctaaaatgttctccacaaagctaaagggaacaagattatttcttagtttattaaaaggaaaaaagaaagtgtgattcgaaacccaaggaactgaaaaataaggtcagatgcctcaaatatgaggaaactgccagagaataagctg

SEQ ID NO: 195067 - DNA, 1000 bp, Homo Sapiens
caaggtgacccacccagctgaggcttaccatgcacacagggccttcaagctctaagtacagaaaggtgggctaaagaaggcaggatgggcccactggcctcacctggacagacagagacacaggcatgagacgagagtccttccgaggccgccctttcttcttcttctctactgtctctacctcaagctcaagttttcgcttggacagtgaggaagccttagccaaagggactttctcatcgctgtcactgctgctctccaggaggtctcggggcctcagctctttcacaaggttctgctcttttaacctgcacaaaaacattacatcacacttcccttcagaaaccattcatgcaagaaagagtgaagtgaaatatttaaagtgcttaaacaaacctcttgccaacctagaattctgtgtccagtgaaattatgcctcaaaagtaaaggagaaataatgactttgtcagacaaaaataaacaaagagacaccggaatctgttgccagaagacctgccttgcaagaaatgttaaaagtctttcagagagaagataaatgatgcaggccagaaactcacatctgcatgaagaaaggaagagtgatgttagagaaaaaaaacaatgaacataaaatagaatcttttgtatttcatattcccaactgatctgagagacaactttctgttcaaacaaataacagccaccatgtcttgaattactatagtttatgaatgagtgaaataagtggtaccaatgtcatagggcatggaaggaaagagtggggaactctttctactacccatgaagtggtataatattatttgaaagtagagttaggttataaatgtttattgtaaactctagagcaatcactaaaaaaaattttttaaagcataattaataatgctgagaggagaggaaatttatttttattttattatcattttttttttggagatggattttcactcttctcgcccagcctggaatgcaatggtgt

SEQ ID NO: 195068 - DNA, 1000 bp, Homo Sapiens
tgagaaccttagccctcccacgcctatcagtctgttggtccccctacttttctccccacactgcctggcatagaagactttcggcccttctagactggacagcactatcctaaaggggcaggtaccacggcgcatgtgtgtttgcccccacaaggccaaaggcagcacctggaacgctggagccgttctctgctctggggagacccaggagccccaagaacaaaacctgcccaaagccttaaagcaagctgagtgcagacgactgcaccgcccgccccccagcaaccgccatgcaggaaatacgagctcacaaggcccacggcaacaagaagcccacccacctgaggctacgcgaatcgcccgcgaagagggtcctgggatccgtagccacagaccgtgggacgggcctccctctgagggcgagagtccaggcgccacctagaaagtggagaacgagatcggccgccgtgaggccaggcaaggagcgggcgcggcttcccgagactgcgagaacggcccaaatgtctccaggtgcccccacaaacccccggcgcggaccgagaaactgaggcccgcagaccgaaggcactgcgacccaggctggggctccgagtgcccctctgcggatcagaagtcgggaaaagacgcaggggcgcagctccaggcccgcgtgcacggagttcaagccggccgcccgggctcccgcctccacactgaccctcttgccggagtcgggaacgcctgctcctaggagcgccgcgcagcgtccagagaccgattacatcgcgcagccacgcccccagcgtgcgcgcggccgccgtgtacgacccggcgcatgctcccggcacgctccacgcgctcctcccatccaggccgcgcctgcgctgtatgccgtgtggccgctacctcgcaggctctcccggtccctgctggcgcggcagtgccgcgcggtgggtgatgggagagcgcgcccattcccacgccgcgccaagtgccacgg

SEQ ID NO: 195069 - DNA, 1000 bp, Homo Sapiens
accaggctggtctcgaactcctgaccttgggcaatctgcccgcctttgcctcccaaagtgctgggattacaggcctgagccactgcacccggctgcttttgtactatttcttgtaattgatggcacctacacagttctcacaagtactgtggggtggagtacctcctcaccacgctgagctcatgagttagtcatgcacagctccttcccccagtggagaggtcagtatggggtacttaccatcttgtctctcagtaggttcatgagaccaaagaggaaaatgtttaatatttgctttatctattagatcagaacctcttcgaaaaaagaagaaggtagatcctaaaaaagaccaagaagcaaaggagcgcttgaaaaggaagatccgaaaactggaaaaggctactcaagagctaattcctattgaagattttattacccctctaaagttcttggataaagcaaggtaaggatccttctctagggatgaagtcctcaggacaaaggagtaatatcaacttcaggtagttgtgtctgtagttcacacctgtgatagtcattggtcagtaggcttgagctgacttggccctaatgagtccttgctccttttggaagcaggagaaagcatccttgggtggtactcttgaatggctctgggtgggaaagaacctaagacatctaataatccagatgcttaagcactgctctggagttcatgttgttgctgtcatgcatgaggagtcttggctgtttctgatcccttgggcctggagtctgaagccctcgcctcatcctaacagtagaaaacccttggcctcctgttttatcatgcagatatctttggttggtatttgttgggattctactgtgtgcagggttaacagctcctgctgccgttttgtaagcagtgtgcaccatctataaaggggcaggtgttaaaagtcttctctcacccaagggagtatttgcttgggcagaggaagtgctaccagtctcctca

SEQ ID NO: 195070 - DNA, 1000 bp, Homo Sapiens
gctcttttgcccaggccggactgtggtggtgctatctcggtcactgcaagctccgcctcccgggttcatgccattctcctgcctcagcctcccgagtagctgggactacaggcgcccgccaccgtgcccggctaattttttgtatttttagtagagacggggtttcaccgtgttagccaggatggtctcaatctcctgacctcgtgatccgcccgccttggcctcccaaagtgctgggattacaggcgtgagccaccgtgcccagcctaaatctagatgccttttatgtttttctcacctaattgccctggctagaatctctagtccaaagctgaacagaagtagcaagagaagacatccttgtcttgtttctgatccttgggggaaagctttcagtttttcaacatgaagtaagatgttagttgtatttgttgtagatgccctttatcagggtgagtaagccaaagtcttaggtcttgtctcccctgtatatctgcaatgccactgccttcatctagtcacacatgcttcatatcttctgggggttgcagaaatggaacagagcgttccagaaatggaagtactccttccctgtttgcgtattcttaacctttctcatacatgtctctattccagaacagactacatggttttgttcctgtatctgcctttcaactagtctcctggcctccagtcttcatggtggtccatcttcaacatcaatgatagcattttttcaattccactatgctgctaagaaggaaaattaattacatcactctcactcaaaacctgctacataattcccattgcctgcagtctggcccccaatcatctctctaagtcttgcccctctagctacctaatatgcttacctataggtatcatccacggtgggtgaccccagactcccagaaagagccattctcctccattctgtgcctttgcatacactgtgtccttccaaagtgcactttaatagctagcaaaatgcatctta

SEQ ID NO: 195071 - DNA, 1000 bp, Homo Sapiens
ctccgcctccccagttcaagcgattctcctaccttagcctcccgagtagctgggattacaggcacatgctaccacgcctggctaatttttgtatttttggtagagatggggtttcaatatgttggccaggctggtactgtgactgaattctatctgcccatctctggtggtcagagcctggctcaagccagcccactgcaaagaaagccatcatttttgggctgtaacactggggaacaggtctgcaggctgggcctgaactgggcaggactaagcaggaggagaggtcccacgtggtccagcaggcttgccccacagctgccatgtcactgtgggagaggctgtgccgacaccccttagccctcagctgggcaagccacctgccttgaggggagggacagagagtgggagcctgtggaagcatctgatacacaggtgcctgggactgggaatttaaatggctcatctggagggggaatttgagggaggaacagaacaaacagtggggtcccctaggcctaaaaacacaaaactcactcagggcccacgagaattgtggtctaagacctaaggccatgtgctttgacacaagtaaaagcatttacatgggacctcatggcagatgattaagggtgtaattatgatgactgtatctggtcctgactgggatgctacatcagacaggaacctgaggagaaacattggttccccttccacattgaacacaggtagggacagggctcacgtacagttctaggaacccaggggaagatactgggtgactaatcactgaatcaaggtccccctcacagtgcagaatctggcatgggctgggatggggacttcagggacagtcagaaatccatcctgaccaacttggatggaaatctgggatccaaaaaaggaaccagcccaggtcaaggtgagccaggcacacctcagtgtggaattcgagactttggggatctggctggacaagggaatcaggccatcaggttca

SEQ ID NO: 195072 - DNA, 1000 bp, Homo Sapiens
cactggcaggacattccccagagtgctgagcttgggcccgttccatcatctcactccatcccccaggcctcattgagcccaggtgggctataggccggctccactgccttctcttcttccaggtgggccatcgttggactaacagaccagtgggtgcaagacaagatcactcagtaaggacacactcccttgccttgcagggtcagccctgtgctgtggccaggtgcacagcctgaccatagccactaagtttttagcagggtccctgtagggtcctattgagaagtgaggactggccctcctccttgggcccaagcatttgtcactgaggaagggctaactgagtaccagccgagtgaccgtggccttgtgtggcgtcttcatctggcaggtagagccagcctccccagttctctcccagtgccctgcttgtgctgggtgctaccagcagggccaggcttagaggcaggtgctgaggtgtggcccttgcagtaggtggggggatgggggaagacaacacaggagcaggttgggggcgggatgagagcccctagtgaggaccctgagtatcttgccaagcagtaggggtttgaccccaaaggtaaggggaaggctccaaaggtaaggggtctggtgtgaagcagaaccccttttgccctcagtggtgggctccccatctgatagactgacggtgagctgcaaggctgcctcagaatgcagatgctgcagggcgaagtgggggttggcttcttctttcatccctgctaatgcacgaagtggcccaaccttctctagtggccatcaggcagaatctcttagggattggcatggacctagaccccaacatgctggtcctctcctaggggacccatgtagatgtccccaggctgtcacctggcacagccctaggcgcagcctccaattgggtgctggtctcctcatgcagtttgaataggccccatgccactatttcctgcctccccagccctgcccctgtctg

SEQ ID NO: 195073 - DNA, 1000 bp, Homo Sapiens
cataaatggaactggagaacaatatgttaagtgaaacgagccaggaacagaaaggttatttatttatttatttttcacttatttatttatttattgagacagagtcttgctctgttgcccgggctggagtgcaatggcatgatcttggctcactgcaacttctgcctcctgggttcaagcaattctcccacctcagcctctcaagaagctgggattacaggagcgtgccaccatgcctggctaatttttgcattttgagtagtgacggggtttcaccgtgttagccaggttggtctcaaactccttacctcatgatctgcccgcctcagcctcccaaagtgctgggattataggcatgagccactgtgcccggctgatgttttattttttagagatggggtctcacaatgttgcccaggctggtctcaaacttctgggttcaagtgatcctcctgcctcaccctcccaaagtgctgggatttcagggaggagccaccacacacagctaagacagagttaaacaccacatattcttattcatatgtagcagcttaaaaaagttgatcttggctgggtgcagtggctcatgcctgtaatcccagcactttgggaggccgaggcgggtggatcacgaggtcaggagatcgagaccatcctggctaacacggtgaaactccatctctactaaaaatacaaaaaataataataataataattagccaggtgtggtggcgggcacctgtagtcccagctactcgggaggctgaggcaggagaatggtgtgaacctgggaggcggagcttgcagtgagccaagattgcgccactgcactccagcctgggcaacagagcgagactccgtctcaaaaaacaaaccaaaaaaaagataaataaaaaataaaaataagtaataaaaataaaaaacaataaaaattaaaaattaaaaagtatatttaaaaagaggtagagctatatgcactgacctggacatatctctaaca

SEQ ID NO: 195074 - DNA, 1000 bp, Homo Sapiens
aagaggtggcaggggacagatgtgctgctgttcccaggccacctgcacagctggatggtggaagcagttcacttaaaggccatgagttactcgggaggctgaggcaggaggatcacttgagcctattagttggaggctgcagtaagctatgatcatgccactgcactccagcctgggtgacagagtgagacccccactgtccctggtctcttaaaagaaaaaacaaacaaacaaaccaaaaaacaaaacagcttatgagcacctcctactaatttcctcagcttagcacaccctgtggccgttgtccccatcgtccgtggcttcatccctcaactgatgctttcctatgtggacttcccggccagtgctgtgggacctcccctgtagggctggccagcctcatgggctgggctacccgtcccactcagcagtggctgcctggcctcccctctgtccctcctgcccagctcctaatgggcctcccataaaagctgatgcgtgggagccaagccacagctcgctgacctggggaagctgacagagtgacagagggtctcaaggactctccacccacaaggcgggaatggggatgctggcaaatctggtatgaaggttgagaccccgaggagaggcaggcctgggggaccgtgcagcagctgtgcccacctaggaccacagggctggtggggctggcagcttggtagagggcaggtgcacagcaaagttttcaccggtgccggcttgttgtcttccacgctgggatttcacatgaagttctagctaattgagtataagcatttctaaagaacccccggagggttgtttttctttgtgcaaacactccttttgtgcagagggtgttctgtggcttcttggcagagacacaggtgggaaacacctgattgaacatcattgcctggggagtggagacacgcacagcacgtcaacatggagcgcccagcagcggcggcgggtcctgggctgtgctccggagcccttc

SEQ ID NO: 195075 - DNA, 1000 bp, Homo Sapiens
cctgagtgagaaacaaaagacaaaatggaccaaatgtgcttgtgtggccgggtgtgtgaattgtgtgcaggtgagtgtggaaagatgtgtgagcacaagcctgtcagcatacacgtgtgggcgtgggcatgtgggtgagcatgcaagtgtgtatacataagtgagtgagcacgtgtgtgtggacgtgcatgttatgtggatgtgcatgtgtgcatatgagtgtgtgagtgcatgtttgatgagcatgtatgtgtgggcacacgtgtgtgtgtcagcgtgtgctgactgccatggacgtgcacctggctgagtgtggaaatgtgtgtgtgagtgtactggcagtccaggttttacacccacacggctttgcctccccaggaatccgttttaatagcagagtgggctggaagggctggccaggccctgaggcagttttcaggccagcagtccctggctcctcatatgcggtgacagcccaggaggccggggccctcagagtgcagtctttggacatgcctggttgatggatccgtcattaccagcctgggagctgggcatgggctccggggctggaggacacccctttccatccctggccctggcgagcccggccctcctctcgccccgtgataacctgcagcctcatggggaaaggcacgcggaggtggtgccgcacccccagccctcacccctgctttgccaatcctggatcctggcctccgcccgccaaagtccaccattggccacaggatgtgggtgctgtgctgtgtccttgaaaatctgaagatgaggacagctcagtgggcgggggcgtttcacacattcgacacatgccctcacgcctgtgggtgtgtggcgggctggtttacagttacgtgaggatttcagacccaaagtgcagagcctgcagctgagcagtgcccagggagggctggggaggaaggtcccagccaggaaagtagggtgactctcatcagtggctgcggtgtccagctgggat

SEQ ID NO: 195076 - DNA, 1000 bp, Homo Sapiens
gaaaagagtaggggacatttaaaatagcagctgtagaaagagtaagcttgtgatcaatgttgggatggatgctacgggaaaaacagaagagagaatagttacattgtcagagagtgggagcgagtgccatcggcacatacctcaacgacctttgggaccacctgtgtgtgctcattggcacagtcagtacagctctcccatctggagtgtgccatcactgccctacagcaccacgggaggaagccgcattttctccctgtgacccatgccctccacacctgcatctgtagctgtagctgcacagagggcagagtacacactttgtaattataagggagaaccaaactcatatcaagatgaaatggcatatagtttttctctgttgaagaaggcatggaagtatatagtacatgtcttaaaggtttctaagtttaaaaacatttaatatagaccctcaataagaaaaacagaacagaaacacataaagtccgtgatgcaactgggtgacatctgtaactccaagctatgaaaaaatgatcatggaaagcaaatggatgtgagaggatggtgatatcaaatacagatgaattcatatatttacaaatggttagcccagcccacgagtattttgcctctactttaatacctagcatttcatccccaggccgattggaacatcattttcccccacgtatgattttccacatcattacatcaaatctgcccctaaaataagaataaataattggctttttctcaatatcaattaaagttgtagttctgttggaagaacctatcgatctaatcttctgtgatctgatcttgctgaagaaacatgaaatgtagtttttgacctgagacttccggagtgtttcccctcgggtgtcagcctcaagttttccattttaatttaattcttttacaccagtaagatgctcctaccatttagttcccctctagagcctttttgtttgtttcagaatggtaaaaaattaagctt

SEQ ID NO: 195077 - DNA, 1000 bp, Homo Sapiens
tggtgtgatctcggctcactgcaacgtcttccttcccgggttcaagcgattctcattgcctctgccttcccagtaagctgggactataggcacacaccaccacgctctgctaatttttgtgtttttagtagagatggggttttgccatgttggtcaatctggtctcgaactcctgacctcaagtgatccacccacctcagtcccccaacgtgtctggtttgattttgagtacatttctttatctgttttccaaattggagtaagaggcaagatttcatttggagggggaaaaaaatactgctttttaagtcagaatatctggttgttccttttaagacatagactagattctactcagagtctacttagataggatcagatcagtatagctgttacaggtatactaattgacaaaggtcagagctcacaatccaaagctatccttaacgcagttgtggaggcagaaaatacttcccaggtacaactttatcttagttgttaactgtacttaattaggaagtactacctgagctctaccaagttagctgttggtcttggtgtgtatatgaaaattgagtcccccaggggattttcttgaatttttttgagcttcattgaccttcctcacctgacttgtatcacaggaactatctcccaaactcatcacaaactagccataagaaatgtatggtaagatttaaatttgaaagatctaattattggtttccttagtaccttctagcctacctaggattctcctttccaccccttccaattttgtcaaatcaagcaccaataaaagaagttccatgttgggtgattcatgtgttgatgaaatcattttttaattatcacagtgtttttataggcacatagaaaaagaaactcctaaaaccaaggaagcatttttaaaggtcctcagatagtttgaaagcccctcaatctatcttattcttcccaaactttttattagtacagctagatgctttagtgcaagctt

SEQ ID NO: 195078 - DNA, 1000 bp, Homo Sapiens
catctccccctgagaatcctcttcttcagattcagcatcccaagatcattttgttgttctttacataactggattccagattctctaccatcctagaggtgcacttttggaagcccaacaaaatttaatttcatttctaagacataaatttagaaggacccatacttcactgcggttgtcaataagataaaggcaaatagaatgctctctgagacagtgacagtgataaaaaagcaaaaaaaaaaaccaaaaaaaaaaaaaaaaaccacaaaaaccagaaaaactggtaagaaataaataataaaaaagaaagaattgaaaaaaaataccaaataatagagtggcaagatttaacatatatcgtatgatttgggcaccacttttagcaagtgaattctctatttcgtcattttagatctgacaataaaataaaaactagctaagggaattttcagataatgcacaattaaatatatattaaatattatatatacataaaatcaaatgtacaatttgttttccatttacaaaagaaaattcataccatttacagttacagataaagaaagagtctcagagaaactaaaatatttgccatagtcagtaagtcctagaattgagagtagacaggtttttttctgactgcaagttcaactttttttctgttaatctgtggtcaaagattggtttttccaattagtaggtaggctcttacatatcagtttttcctctaactttttctgacatacgacttcatgtgcttcaaatctttcacttcttaatagccagactgccatcaccaaaattctataacccctgaagactcctcaaaaaagaattcaatgctaatttattctattcaagtttttgcaatgtgctttaccatcagcaaaactgctgaaaaacacttgagtagtctcggctgttttttccctcttaaacttgaacatatgctaataattactatttccaagcagttcccgttctaatagtgaagctt

SEQ ID NO: 195079 - DNA, 1000 bp, Homo Sapiens
agtgcctaatttgtgccagtcaccatgctaagtgctttacatacgttatctcatttaatccttagaacagtcccaaaatatattttatctccatttaaagatctccccccccacacgcgaataaactaaactaaattattttaataataaaaagccatacagaatcttgtgtatagtattactggatttttttttcttgtaatattctcgaaaagatttgacttacagtccttaaaggggagaagctgtcgtacagtcattaacagtttttaattctctaatattgctttgaatagaaaaatcctaatttcataaggtactagtatatcttgtgttctaaagcagataatttggctgggtgcagtggctcacacctgtaatcccagaactttgggaggctgaggcaggcggatcacctgaggtcaggagttcgagaccagcctgaccaacatagagaaaccccatctctactaaaaatgcaaaattagccgagcgtggtggcacatgcctgtaatcccagctactcgggaggctgaggcaggagaatcgcctgaacccaggaggcagaggttgcagtgagccgagatcacgccattgcactctagcctgggcaacaagagcaaaactccgcctaaaaataaataaatcaataaagcagataattatatactatcaaaaataattttcagtcattgtttaaacttttgaaaagacataattctaaagttcattatggttaactgtaacagatcttcaggcatgtttacctttttttccctctagttctacaacgggaccacaagcttttaaaatgtgctaaaaatgtgtgtattctccaggaagggtagagtattgagccatgtgaaatctattcagcttttaaaatttttgagtttgattttggcaactaagggccttggagagttttagtttctgcaatgaaaatgtattctttcagatttgaaaattatcatgctcattattggtaggatatatactt

SEQ ID NO: 195080 - DNA, 1000 bp, Homo Sapiens
aatgtaaaatgcatgcttgctagactggtcctcatttgtcaactgtccaagtgcttacccaatgacatatctccaagtctacctttcctgttcctctgccattgaactagctctagattgaatcattgaatttttctagattgctcgtatgtttttatctcaacattttattggtctgttactgattttctgtctctcccaggatcctagaatgccccaccccaccttgcatcttgcccagtttctcaactcttttgaatttaaaattgcacgattaaaacctagcaacgacataaaattgtcaaatggcttaaactagggagttttggtttctgagaatgagaaaaaacagaaatgttcttaaagaagtgggttttggttttggagaaagaatgggatggaatacacctttaacagaagtgtaaaaagatatcgtagtttcttccaggtatttctgtggtagtgataagaagatcaggtcagatgaccaaaggtgtgcacagagggagatgcactagggatgggaaccctgctacttgtcagaggatactgaattgaagagagaggaagataggctggagttgttctgtacccagagagatcactgtggggaaccttcataatatggtcctaatttagtttcattggtgagacccatgaaactgtacatagaggctggaagtaacttatggaaagataaatgatttaataaggaatcaagtgtttgtataaatcaaactgaatttctacattttttcagaagtgaatattttttctgtaaggtaggatgttcaactaggaatgaatgttcggataggatgaatctaggaatatccaattctgttaagagttccctgttagaaagtgcatgtgaatgtatttgtgtttcgatgaactttaaatctcattcagaataaccatacatctctgtaatctttatccagaaataatgccattgaaattcacaaacattacagaaactatatcctttgtaaagctt

SEQ ID NO: 195081 - DNA, 1000 bp, Homo Sapiens
agagggtataacagagagatttgaccctgccagggaggtaagggaagccttgcttaaggaaataaggaattgcccaattaaagtgtagtagaaagaatgttttaggcagagggtctggcaagttcaaaagtcttcatgaaagaatgagagctagtgtgactgctgcacggtgggcatggtaagggatgagatcaagaagacccttataggccatgtacaggggtgatttatcttaacagcaaagtaaaaacatcagagtatgtagcaaatatatagatttgctcactaaactcaaatgtgcacacaaaatgtggagttgttatgtgtgtgtgcactttttgattgagatatcattggcatataataaaagttgcccttttaaaatgaacaattcagtggggtttagtactcttatagagctgtgcaaccatccccactatctgatttcagaaccttttaattaccccaaaaggaaatcctgtactcattagcagttgctttctattaccctcttcctccagtctctagcaaacattaatctgatttctagctctatgagttcacctattctggacatttcatataaatggaatcatagaatatgtggccttttctgtctggcttctttcacttagcctaatgctttcaaggttcacccatgttgtagcatgcatcagtacttcatttcttttgaatgccaaataattctgtatggtactaacatatcacattttttaatctcttcatccattgataaacatttgggttgtttccactttttggctattacgaataatgttggcatgaacattgtgtgtcagtttttacgtggatgtatatattaatttctcttgggtgtatacctaggagtggaatttctgggtcatgtggatcttttgctagtgttcactattaacatctatgttagatgaatttctggcctgtttttcactctgcttagagcccattactgccccatggtccaggctcagcctctcct

SEQ ID NO: 195082 - DNA, 1000 bp, Homo Sapiens
ttctaaggagaagaaatgtttatttaaaaaaaattttttttaaatagagacagtgtctcactgtgttgcccaggctggagtacagtgatgccatcatagctcactgcagcctcaaactcccaggctcaagtgaaccttccacctcagcctctcaagtagctgggactacccacagacacccatcaccactcttggctaatttttgttttggtagagatggtgtgggggcgggggggggggggcgggtctcactatgttgcccaggctggtcttgaactcccggcctcacacgaccccacctcacccccaaccttggtctcccaaagtgctgggattataggtgtgaaccaaacccagccagaaatgtttattctgaatgagatcttacaaggaactgcaacatagaaaacagctgtgcatggccagaggcagtgggcgggccctttgcctcttgggtcctgggctgtgaggtgctgcgtgggcgacagattgccctgaaggcctcagtccacgggctctggtagctgggtggcaatgcccctcctttgccccaggccagcctctgaagaggaggcttcttccccagggtcatggccagctatggatctagggaggaggcgagggctgggactagccctctaggtgggcggccacatctctgaccacatcctctggtcctccctgaaccccggtcggagcccaaagatgatccccaacctgtagaaccgaaaccagggctatgaactctggggcagacacctgccctcagcccctttcaagcctcagatcagcaggcgcttcctggggcagccccagggggttcacagcccctctgtggccacacagagccctgcaggtggagtgctccgggaaggagagcgggcggccaggcagcacttcccttcctcctagttcaggggcactgctaagttctgtgccttctctaatgtgctcacagcttgaacaaaaatgctccacctcccttgggtgacccctgccc

SEQ ID NO: 195083 - DNA, 1000 bp, Homo Sapiens
aaagtgggggagggggcaaaggcagttggcccaacacattccccacccctttgagaggtctgaggcctgcagacctggctcggagcccacctggtagtcctcagactgtgtgtgtgtgtgtgtgtgtgtgtgtgtgtgtgtgtgtgtgtgtgtgtgtgtgtgtaaaagagagaagttgtggagaaatggggggctgattctgctcagattcatcaggatgagtagaaggcacccagctctcaccctggcctgacatgtgtgtccctgagcaggttacagtcctctctgagcctctgcttcccatctggaccctgctgggcagggcttctgagctccttagcactagcaggaggggctccaggggccctccctccatggcagccaggacaggactctcaaatgaggacagcagagctcgtggggggctcccacggacccgccgtgggcccaggggaggcagagcctgagccaacagcagtggtgctgtggaccgtggatcctgagggtggcctggggcaagtaccggctgagggtccaggtgggctttgtgtacctttgggtcctggggccctggtgacttggactccaggttagagtcaagtgacaggagaaaggctggtggggccctgtgcttccgacttcatttcgagtgatggcagttcccaggaaggaatccacagctgacggtggctgacagatcagagaatggaaggcgaggcaggcgggcgtctgcgtgacctcaggtgcttggggcccagcagacccagagaaccatttccactaggccagggtgccggaagtgtccacaggtcttagattccctgttcagatgaaaagatttgtgcctttaatgataaaagtgatctgcatagagtcaaaaattcaagccatgggtataaaatgcaagtaaaatccctgccctcacctatcccaccctactacacagagatgtcctctcgagtttcctagactcactctggaaatttctgtatacacacag

SEQ ID NO: 195084 - DNA, 1000 bp, Homo Sapiens
gggggaaaaatgactgttttacttaccgagcccaagcaccagtactacaggaccaacacagggaggaaaagcacacaggaggaatattcaagaaccgatttgatttagggcagggttgcaaggaaacactcttccgttcaccacggagtgaaaatcacgttctaaagacttagtaaagaatgccaatttaatttatttgaccctagggcgaaggacaggcaggaacaaaaaatcttgatttacaatgtagatttaatcatatgctgctgttgatcatcctttcgtagtcattgaaggtatattttccttcctcctttctcatctctgtctcttccatctccagcaccttagctttcagttaaacatttttatgattaactcagaaagtaatcttagccgtaaaccttcaagttcagatacaggctaagaaagagagaaatattctaaaatgaatccacctagcaccaggatgactatcaggactgtaattctggttcggttgtgatgccaattataaaacactctagctgtggtgttgctgtttttgacaccaggaggaaatcttgacagaattatagcctagaaatcaatctgggaatacgatacagaaatctataattcagatatgaaaatctacaaaggctctttttttaaggaaggttcaatgaaattagattaaaataaatttacatatatatcaattttattattaaaatatattcacactagtaaatagagttatcggggaagggtaagctactcagtgtattggacacaaaaatagacctctttggcttatcagaaaacaaagctattgtctccttgtcaaatataaatctcttcttagagctaataaatgggtagtgttcaaatgcaatgttttgtctgactcctacctcataaacccatggcacataatactaaattatattccactgagcagtatcaatctcttgattccaacatcatacagtaagggaaacaaaccaagtaattgatc

SEQ ID NO: 195085 - DNA, 1000 bp, Homo Sapiens
tagtagccaaacagcagaaacaacccaaatatccatcaaaaaatgaaaggataaacaaattacggtaaatccatataatggaacacttctcagcaaccaaaagaatgaaccatggctacatgctacaacatggataaatctcaaaagcattacactaaagtgaaagaaacaagacaaaaaggctacattctgagtggttccatttatatgacatccaggaaaaggcaacacaacactggcagaatatagttcagtagttgctaggctctaagtgtgaggttgggggattgcctgcaaaggaacatgagagaaatttggggagtgatgtgttttaaaacttggttgtgggctgggcatggtggctcatatctgtaatctcagcactttgggaggccaatgctggcagactgcttgagcccaggagtctgagaccagcctgggcaacatggcaaaaccacatctctgcagatatattaaaatcagctgggcacggtgacgtgcacctgtagttccagctacttgggaggctgagacaggaggatccattgagcccgggaggttgaggttgcagtgagccgtgatcataccactgcactctatcctggatgacagagagagacccggtctcaagcaaaacaaaacaaaacaaacttgattgtgataatgatttcactagtgtacacaagtaaaaattcattgaatgatacagtttaaaatgaggaatttctgtatgtaaattgtgcttcaataatctaacttaaaaaaagattctcttaaaaatcatgttatttcatgggcacacacatgacagtataacctttcctactcaaccttaactcctcagcatacactctcccacccttaggccagtctctctgatcagtccttgctcccattctctctactaatctcatttgaatcccttcattctctttcagatctaactccagtccaatatcccctaagaagccttctctgaccactccagggcacaatgatc

SEQ ID NO: 195086 - DNA, 1000 bp, Homo Sapiens
agtggctcgatctccactcactgcaaactcccaaaaggcacttcttacatggcggcggcaagagaaaatgatgaggtgttaaagcagaaacccctgctaaaactgtcagatcttgtgagacttattcctaccacaagaacagtacgggggaaactgcctccatgattcaaattatctccccactgggtcccttcatacaacatgtgggaattatgagagtacaattcaagacgagatttgggtagggacacagccaaatcatatcagatgttgagcatttcttcatgtttgttggctgcttgtatgtcttcttttgagaaatgtttgttcatgtattttgcccactttttttttttgagctggagtcttgctctgtcgccaggctggagtgcagtggcgtgatctcggctcactgcaacctccgcctctggggttcaagcaattctcccgcctcagctcctgagtagctgggactgcaggcacacaccaccatgcttggttaattttacatttttagtagagctggggtttcaccatgttggtcaggatggtctcaacctcttgacctcgtgatccacccacctcagcctctcaaagtgctaggattacaggtgtgaaccaccacacctggccttttgcccactttttaatgggattatttgtgtgttgcttgttgaattgtttaagttccctatggagtctggatattagaccttggtcggacagatagtttgcaaatactttttcccattctgtaggttttctgtttactctgctgctagtttctttttctgtgcagaagctctttagtctaattaggtcccacttgtcaatttttgtttttgttgcaatcgcctttgaggacttagtcataaattccttcccaagactaatgtccaaaatgatgtttcctaaggttttcttctatcattcttatagtttgaggtcttaaatttaactctttaatccatctgaacttaatttttgtggtatctaatag

SEQ ID NO: 195087 - DNA, 1000 bp, Homo Sapiens
ccagaggggaccaaaatagatactgcacattgtagagggatcagctgaggtaatataggtgaaagctctcaggaagcctaaagctctctgcaatcacaaagctacacaaatagaaattattatcatcattatttataaccattgaaaggacaggagacaaagaagtcagtccccaccgtacccctcccaaccccaagcccacaagggtatttgtgccattatgatggcattgatcattgacattgacagttattattaaacgatgtcaacttccaaatgcaaaatgtttaccagatgaactcaaatgggctggcagaaataatgtccaagtgccatctaccttcaactcctcttctcatgaatttctgtggcatttctccagggcccagagtcaataagggagagagaaatgactcctctggtttactgaaggtgtgacttgtgattccagccaatgtcctgttggttcccattgtctcccctgccactacccatgtggagtcttagatcttggagactgtactatgtgggccaactctctcctcaagacacatttattaaaaggtgggtgaagtatcttctcctttgcctgtgtcttttgcccaaagggaagttgattgacgacaatgctcctttttcaagctctgattgccggtggaggttggataaagcatcttgctgtgatctctaagtgggctgtgccttgaaaacatgattgttgtgtctaatcatgtgtgtctgtggctcccttgccactcctggttgccgtgtcactgtgactctatttaacatactttcaggacccactgtatctgtcccacctctctctggatcttcccaactctgtggttgcctccctgctatattcatggcccctaggggatgccacgtgtgttcggttcttcatgctgttcctctgtctaaaatgttctcttctgtggcagcttcctgcaaacatcttcttctctttccagactttctttgatgattaagaagcttc

SEQ ID NO: 195088 - DNA, 1000 bp, Homo Sapiens
ccaccaaccgcactcatataagatggtgaacttaattgataaatgctctgtgtgctttgactcctccacccactgttccttggtctgtctccctcttctcagaccttcctattccccgagacacaacaatattgaaattaggtcagttaataaccatacaatggcctctaaatgttcaagtgaaaggaggaatctcatgtctcttactttagatcaaaaactagaaatgagccaggcatggtggcacacacctgtagttccagctacgtgggaggctgaggtgagaggatcacttgagcccgggagttttaggctgcggtgagctatgattgtaccactgtgctccagcctgggcgatagtgagaccctgtctctaaaaataattaaaaaaaaaaaaaaaacaagcaacaacaacaacaaaacgcgaaatgagtaagcctagtgagggaggcatgtagaaagctgagatagacagactgaaagctaggccacttgcaccaaacaatcagccaacttcaggatgcaagggaaaagttcttgaaggaaattaaaattgcaactccagtgagcacacaaatgataagaaagagaaacagccttattgctgatatggagaaagatctggatagaagatcacaccagccacaatattcccttaagccaaaacataatccggagcaaggccctaactctcttcaattttgtgaaggctgaaaggggtgaagaagctacagaaaaaagtttgaaactagcaggggtcacaaggcgcaaggaaggaagccatttccataacataaaagtgcaaggtgaagcagcaagtgctgatggagaagctacagcaagttatccagaagatctagctaagatcattttgggaaggtggctacactgaacaacaaattatcattgtagatgaaacagccttttattggaggaagatgctgtctatctaagacttttagaggtagagagaagaagtcaaagcctggcttcaaagctt

SEQ ID NO: 195089 - DNA, 1000 bp, Homo Sapiens
aagaatttgatctcactattagatattgtaacaacaacaacaacagaaaaacctacacagtgccttaacacctttgttctcttggtggccccagcgctgcgagtccagaggtcattatccgattcttgagggctgatgacctacttctgatttccatatctagctggccttggacagacaggcctgatcgaattctgcagccatttgattccctgcggacctgtgcccagaccctgggcggatctgaagacttcctcagaacacataagaccggggagatttgtgccataccgggctgttttctctgagctttgctttaatcaggaatgtagactattttttggttttggtagatggcgtgcaggggcagggcatccagtcattcctgtaaggcattattacagggctaattgggaaatagtgattctttttcaataactattttggaatcacccccctttctcccccgccaagtctctgttccccttgggattgtcaggctcacgttgaaagacccccagagggaaggatgttggcatatatcatagatatctggaaagaatgtttcaaccacacctggctgccgtgtgtgaggacaaatttaatttattttaaaaatctggccacaggcggctttttctgtttgtttctttaggggggaaaaaaattgaaaagcagcagcaagctatggttcacatttgttttcttccagattggaccagccaggagaagagagattatctctaaaggatatgaaaggtttaatcattttaattttgtttttattaaagtatatcataactttttttttttccaacatgcctgggtagaacaggagagaagaggaggtaatataaatatacagaaaccctcaagcatttggttaataaaactttccaacgggcgatgcctcgtggggaggaagtggttggatggctggggatggtgggccgactggggaaggcggtgactgcgctgaatcgtagccagcatcttgcaa

SEQ ID NO: 195090 - DNA, 1000 bp, Homo Sapiens
agatcaccatcaagctgatgaaggggtggggcaagggcaagtgaaaatgccacaccacttttctgtcactttgaagttgccctttcctcatttcagggctttcctgattgatataagtcttttactgttttccagagttctggtaaagtttctgctgctttttctccatgtttctgtagagggacaggagtttggagctgtctactctgccattttcctgatgtcactccacttctgagtctttcctatctttgtggatagcagagatgtcgatctcggatatgataccctttaaggatggggtccttcatgatgtgatatacaacttaatattcattatatggttttatgtccccaacatgtctagtaaccaaggagtggacataggagcgccccgctcgctagcactctcagtgacacacttggggaatctgtgtttgtgtctacagctttaggctctgtgagctgaagtcttggactctgtgagtggcagtgtggggagtgggggaggcatttccaccaagtgatacagtaagagtttcactaaacacaaagctatggctgcttcctagacagtccatgcgcttgtaactggcaagcagagttagcattctggaaagaggtgattacctgtaatcgtcattaggaagaaaggatgttgccagataataataggaaggagcaatgtatttggtactcagatgattcatgctgtctcttggtacttgcatgtttagatataactatgtaagtgttaacaaccaccgcctcataaaggcatagtaagcaggggctcagaccccattaggcaagaggagcaggatcaacccaccaggcaaacaacctagaccagcaaaagtgctagccagaggatgagaggtgacaagtatcagtctctgcatggggtccaactacaatagcaggggctatggtttgtcctttcccattgacccttctcttgtacattcccccaggactggtgaccagttagaaacatgga

SEQ ID NO: 195091 - DNA, 1000 bp, Homo Sapiens
atgagaaacctgctttctgggtggtggctggtgttcttggtaaatcttacatcctcccatagcagccagaaaagtcctgggcagtctgagatccataaagcctgctcgattgcacaggtaatactcaaagtgacagtaacaaaatgtagccaagtcctgtgtttggcaccctccccatggtctgtgtgctaggtgtgccggggtcctggcccagagagtacactctctcccctgcccctcacccacccttgtgccccaagcctgtccctcagaggcttccctgaccctggagcaggcccacagcaggcgcggtgctgcaggcagtgtcctcccaagtgctgcgagaggctttttctctgtaaccttcccaagctcccggcggctgtaagtcttctcctggcagggactgcagaggctcagcctggtgcttgggcaggctgcctctcttgtcctccttctggctctgcagaatgcagctcctctccaaggccagggcaagatgcccagggccaggcgactgcagcattcttgtcctcatccttcaaggccagcccgaggactgagtcccttccccatctgaaatcaagggtcttgggtctgaatctttcctaagattctgatgagaatcatagtcactatttctaaagaatgctcacatacacacaacacacaattttgcataaaactttaccagctacttctcccaccaagtttgtcatgaatcagccaggtaaagaatttccacatttcaggagctactgctatttgcaaaagcaaactgcaaaacagaatgtatagtgttaatcttttaaaaatataaattttaacatataaatgcatagaaaaatctgaaaaaatctgtgtaagtggctctaatgcttatctgtagacagtggctttcaagagctttcattgtatacctcaggcatttttgtatatgaatttttttatttttgagacaaggtattgttctgtcacccaggctggagcacagtggtgt

SEQ ID NO: 195092 - DNA, 1000 bp, Homo Sapiens
actagggttgcaacccctgccttttttttgttttccatttgcttgataaatcttcctctatccctttattttgagcctatgtgtgtctctgcatgtgagatgggtctcctaaatacagcacactcttgggtcttgactctttatccaatttgccagtctgtgtcttttagttggagcatttagcccatttacatttaaggttaatattgttatgtgtgaatttggtcctgtcattatgatgttagctggttattttgctcgttagttgatgcggtttgttcctagcgttggtggtctttacaatttggcatgtttttacagtggctggtaccggttgttcctttccatgtttagtgcttccttcaggagctcttgtagggcagggctggtgttgacaaaatctctcagcatttgcttgtctataaaggattttatttctccttcacttatgaatcttagtttggctggatatgaaattctgggttgaaaattcttttctttaagaatgttgaatattggcccccactctcttctggcttttagagtttctgccgagagatcagctgttagtgtgatgagcttccctttgtgggtaacccgacctttctctctggctgcccttaacattttttccttcatttcaactttggtgaatctgacaattatgtgtctttgagttgctctttttgaagaatacctttgtggtggtctctgtatttcctgaatttgaatgttggcctgccttgctaggttgaggaagttctcctggataatatcctgcagagtgttttctgacttggttccattctccccatcactttcaggtacaccaatcagacgtagatttggtcttttcacatagtcccatatttcttggaggctttgttcatttcgttttactcttttttctctaaaattctcttcttgcttcatttcattcatttaatcttcagtcactgataccctttcttccagttgatcaaatcagctactgaagctt

SEQ ID NO: 195093 - DNA, 1000 bp, Homo Sapiens
tttattgatttgtgggacacataaaacccactttaaattgtctacttccagtttcctcattgattgagtttagatgtttgttcttgccaaatctcatgttgaaatgtgattcccagtgttggaggtggggcctgttgggaggtgtttgggtcgtgggggcggatccctcatgaatggcttggtgctcttacggggcagtgagttcacttcacatctggttgtttaaaaaggagcctgatacctccccaaatcctcttgcttcccgagcccttgcttcctctctcatcatgtgatatgctgctcgctcttcacctcctgccatgacagaaatcttcctgaggcctcacaagaagccgagcagatgtgagtgccatgcttatatagcctgtagaattgtgaaccacataaacctcttttcttttgaattacccagcctcagtatttctttatagcaacacaaaatggactaatacacttataattgttactttatcttatcttggacaaagtggtgttaggtttttacacatgacattcaaacattaatttagggaccacaaacttagaggtccagcaataatagggtataagagctctgcgctcttggggattggagagggtggggagccatagcagtgatgcttgttgaaggggccagttgtgtagctccagccacataacttttaccacatcgtgaagcacaggatggcagaggttctgatttttatagaaaagccagagtgtttatttatgtgaaaatttctgatctttaaatacctgacaaagattaaaaaatactgcacagggtacttaaaccaagtctgcgggttggatctggttctactgtaaatccatgtatggttagaacatcgtcttccttttcttattgatactgtcttattgttaacaaacttatctcatgctgaataaaatgttgggatacaatttcagtttccgacatgtgcttttagaaataaatgatactttcaaagcaaagctt

SEQ ID NO: 195094 - DNA, 1000 bp, Homo Sapiens
aagaaaacaacctttagatctgttgttttagcaactaataatctgctgtgcacatttcagttggtatttggaaaacatttaactctgtagctttgtagaaatgatattcccacttgaacatagaggaaattgtacttattgagagtttaactcaagagttagtgcacaacaaaagttcattagtgcccatttcatgttctggaaagataaaatatcagcatcctatagagatgtcttatttgtatatacagcatttcagaaatcaatgggatactcaaaagattaaacaggaacatcctttacttatggaacacaggataaaataaatctaaaattaattgtcatacatcgtttttgaatgagaaccaaatgacctatcctaccacctctaattgtgaatacaggtttttcaagagtgtaccttcttcctcatttatttctaattgccaggcattgccaaacaaaagttaattctggaaattcttgtaaatgaagagaggtttttgatcagagaaggtgttgtttgaaacagccagaagatccagcttgcaacaattacggacaagctactgtgtcttaatatcaagctaaaaattccctggtccactgatgcaagacttattttactcaaattgtgaacaaaaagacaagtggtaaattaggagggaaaaaagtgaagcaacttttattaaataccatgcaaccatctggcaccactccgcaaagttgattattgactaactttaatagcagacatttttgtctattcctttaaacattttgtggaggaaatgtcctctgtattggggggggtggggggacagttggaggtggggggcagatagtggttgagtgtgagttggagggtagaaggaggaaattaaaagatgcattgataaagcagtagggtacaggagttatgcaagcaatagtttatgtaaagccacagagagagtggcttatgccagaaacagcaggtccttccaaatttctcaagctt

SEQ ID NO: 195095 - DNA, 1000 bp, Homo Sapiens
tatgtttttctattaacatgctgctttacaaaattaaatacctggtttttgtcttccctcaaatttatcgtgcaatgttgtaacttttgtgctgtttgaaatgagtacagagtaaattaatcactcatccacttattcattcaaccaaccagcagttttccaatgccaattacatttgaggtctggtgctaccaactgtggaggagttacaaagaggaataagaccaagttgaggtcttggagtctagtacaggagctgaaggcacatagattaattttaagaattctaaacaaggggctccatcaaactcacctgtttttcctttcgttgttgtttttgcctgtttttcttaaacaaagcatcctctcaccccacgaaagatctggttcccagatcccttcagagatttaaataggatctggacctagatcaggcctaagaatctgtatgcttttaatgtagccctcactttctaccctagatgattctctaattaacagagttttggaaacccagctctagaagagggtacagctctatcaatagcacaaagcaataccaacaaaatacagtattttagaaggacagaaacctcagggcctatccagctacaatccacagggactacagagaggtcagataaacttggggggtaagggacaaatctgctgaattcagattaatcagcatttagtccaactggaacacagctgatcattttaagaaataagttcacacctagttttaaaaaacagtcctaactttgagatgtccagggcaacacatgtggtgctgggactaacgcggatttgcaatacttaatgatcctgtaggaacacagagcctggcggctgaagttgactgacccagtatcttcaatatattaccttcccagagctggcctttggtctacttggtctggcccacctcacaggaattgagcaagaaagagaacacgagagttgaatatccctgcaggaaccaccagggaacttgatc

SEQ ID NO: 195096 - DNA, 1000 bp, Homo Sapiens
gataagtttttttccaggaagtttatgaatataaccttagtgaaatgatgggtctcccattttcttagggtcctgcaggtgctcgtggtccagctggccctcctggcaaggctggtgaagatgtaagtatttactcttaagcactttcaaaatgctatttaaatactcttgcctcaacaagattttctagattcaaattaagtattctgccaaaagctgaatatgcctgacagaactcttaatgtatgggaaatattattttaatgaaatattaactaacctacttgtattaagggaaagattaaatatatatctggatccatatttttatgtgataactttctccccttttgtaaaaaccaagattcccccattttgtctgatagtttaccaagaagaagttgactctacaatgttttcatgtttagggtcaccctggaaaacccggacgacctggtgagagaggagttgttggaccacaggtgagactttttacattggtagatagcacaaacatcataggcctataagatagttgctaaaactagcatcaatctaaatgacaacatagatgtcacccaaactcataacatgaatcgaaggcatctaataaagaaaaaagcctagttaaaaaaaaatgcatatacattttattcatgcaaataatggaatataaatgacagcaagcataccataagcaactaaattgtgttttctacaaataccgtattattagttactcacattagagcaagttaatttgtcactctgtgcttagaggtatactagactttggttcaaagcttgaactttgatgagaataaatactttggagggaagaagtcactgtctttttatttatggtaaaacattattcaccatcttctgtatttctttctaagggtgctcgtggtttccctggaactcctggacttcctggcttcaaaggcattagggtgagcacattctttactcagaagagagaaaatgcctattaatt

SEQ ID NO: 195097 - DNA, 1000 bp, Homo Sapiens
aaatatcaacatataaaaatatatctattctaaagaatttgtatattcacttacactttcacagctctgtttaatatagtacaggaaagaaagaaaagggagtggtcctgccttattaagttttttgaaatggtattgaaacctatacaggtcttaatctaagagagaaaaatgaagagagaagagaaatatttaaacttatattcaatatttgaaaacttaacctgaaaactctgatattgatatagttcactgattacttgagaacagttcaaagtccattgtcgttaattgttccttccttataattaaaattatgtgtcaatgaggaacattacaacatggatgtgtatgctctttgtcaatatccagccttgtcttttctcttttttgtttccacaaatctttgaaagactgtatgcaattgagtttccaactgatttttgcttacatataatatttgaatgtaaaagcagatatgaggtagaataaattaatatttattactatttagatttttcaatttggggtgggaagtaatttagacatttaaaaaccattcatttcaattttcccaaacacatgggtcaaagatctgtaaatgttaccctttatagacaagttcagccaatctttttttgtattggcagttgaaacaaatggaattggcaattgaaacaaatggtagcaacatttattaagttcaattaattaaaccaatcttatgtacaacgtgtaaggggattaactatttgcaaaaaggagtaataagtgaatgattacagtaagactaggacatttctaacttctggtgacatttcataggaggatagacagtatcttaaatgaagcagaagaatttgtgaagtattaaactaagaagaaaaaaattaacttattgggtgcagcttggcagcccaagaagacatttatcaagtttatataggaacaggaggaacttgctaattaattgagtacactgtctttggtaaaaaagctt

SEQ ID NO: 195098 - DNA, 1000 bp, Homo Sapiens
ggtgagggaggaagggattatgcctatataccagatgaggaaactgagccacagtgcatttaaataacctgattaaaaaggttaactagttaacagttaaccaatggcaaagctgaaactcaaattctggtctgtctgattccaaaggtggggcctcagagaaaattcagttcaaaaaattattacaaccaatacaaaaagggcaaacaattccaaccaaattaatcatcatacatcacatcattcttcattcctatcctgaactgttaatgttcatgtgcattatacagcaataaccattttagcaataacctcatatttcttgtggatttttaatgtactactcctaaaacatgcattaaaaatattttagcaagtttctatcttccataagtctaatgactttgcctataaaaggaaaataataacaatagctatctcaatgagttgtgggaataaaggagatatatcatataaagcatttagcatattacctggcatgcagcacacaataaatattaaatacaattattaatagtttaggctggactcagtggctcacacctgtaatcccagcactttgggaggctgaggcaggcagactgcttgaggtcaggagtttgagaccagcttggacaacaaggtgaaaccctatctctacaaaaaacacaaaaagttagccaggcgaggtggcgcacacctgtaatctcagctacttgggaggctgaggcatgagaattgcttgagcctggaagacagagtttgcagtaagcttagatcatgccactgcaccccagcctgggcaacagagcaagcctctgtcaaaaaaaaaaaaaaaaaacccacacaattattgatagtttaattcagggacatgggacacacatctctataagaactctgccagtggattacatccttcagattaattatgcagtcaaattagttgaataagtatagggcctttaataatacagaggagctagtaagtctaaagctt

SEQ ID NO: 195099 - DNA, 1000 bp, Homo Sapiens
atagggattcttaactttctactatatatgtcaaaatgtttacaactaatttgtattgtgtcattttccccaaactttttaacttgaaaaatttaaacctatagaaaagttgaaatcatttgtgtgatttttaaaaacaagaattaaaaagaaaaaataagactcaaaatgcaaaacatcaaatagagaaggccgaaccagctagtgttcttgctgtgacagagtgtgttcaatcacaaagaatttgtaaaagttgtaaggattcttagagatcccaaccttgctaagggggtctcctgaagacatgaagggtattgatttctcatcagccctgtagagtagaggcaaaatcctagcagtgcacagaagccatgaaagaccaagaaaaatatattgatccccccaccttttttttttttgcaaataaaacgatgcagacataattttatatccttttcacaacatggtggtgtgtgtagcccttcaagggttaaagctaaccttgtccagaatggaggccctgctctcatcagagccaaagcactgctaaaggaagttaccactactcattagttcccaagtaggactgtgctttgtgccacatggatcaaggtgtggggtaaatgatttttccatcttctatgtcattgatacctcccccattcatgtgtataattgagagctgtctgaaaaatcaatgtgtcttccttttggaacatagctacagcacattaacagagaagcagaagcttcctctcaagtgatgaaaatgtgtaggcaggctttggcagtcacaaaggcaaccatgttagggtgttggcagggggaaactcccttccagcaagtttcaacacagttctgttgctctcttccttggagtgggttactgtttacatctctaggaggtttgaagagctacaaacctcagtcataatacagctcacagacagccagataaatgtttgtcagcctctttaatgtgtgaaagagggctgagatc

SEQ ID NO: 195100 - DNA, 1000 bp, Homo Sapiens
catcattagctagcgaatgctagactcactaagtaccaaagtttgctctgtgaaaatccccgtataaccactgaagtttgtaacaccctgaaccccactaccttgctcccggtatcagagagccctgtcaagcatgattgtgtagaagtattggactcagtttactctagcagacctgacctctgggaccagccttgggcatcagtagactgggaactatacgtggattggagcagcttcatcaacccacaaggagagagatttgcagggtgtgcggtggtaaccctgggcactgttgttgaagccagatcgttgccccagggcacttcagcccagaaagctgaactcattgctttcattcaggccttagaactcagtgaaggtaagactgtcaacatttacactgactctcggtatgcctttttaacccttcaagtgcatggagcattatataaagaaaagcgcctattgaactctgggggaaaggacataaaatatcaacaagaaatcttgcaattattagaagcagtatggaaaccacacaaggtggccgttatgcattgcagaggacaccagcgagcttccaccttggtgggtttgcggaattcccgcgctgacttagaggctcgaaaagcagcatctgcccccttccgggcatcagtcacagcacccctgctccctcaagcgcctgatcttttacctacttattctaaagaagaaaaggactttctccaggcagagggaggacaagtgatggaggaaggatggattcggttaccagatgggagagaagctgtgccacagctgctaggagccgcagttgtgctggctgtgcataaaaccacccatctaggccaggagtcacttgaaaagttgttagtccggtatttctacatcttgcatttgtcagcccttgccaaaacggtgacgcagcggtgtgttacctgcccaaagcataatgcgaagcaaggtccagctgttccgcccgtcatacaagctt

SEQ ID NO: 195101 - DNA, 1000 bp, Homo Sapiens
tgttgcccattcacaatgggaattaagcttttcctataataaagaccttgacacagaagtgagtgggctaacgaactttctccatccaacagttagttctatgtgtatcactaaagttataaacacattcttgagtaccagaattttaattttgataccacaacctttgaaattctactataattgggtcaaactctggaacagtagcagatatgctgacttgctatagaatgagagtgacaaagaatgatgaggaaatgcctgaggttgagtcccaaagtactctaagtgtcccccaccaaggacagtgatgactaaggccctctccatgtccttgatgtcaacattagatgatgtgtgttaaaaatgttgagaatggaggggactatcttcaggacatggcattactctccacatggaaggtgtgttcaatatgccatcctgggaagattgaattcttgcagcagcacataatggaaaaatactacagcactaagcagtaaactgagaatatatcagaatcccaaagactacatctaatattgcttaactgtagaatgtagttatacactgttctgactggaaaaaaaaataaaacactgcaattttttctcttccctattgaggatgagttccttactaacttggaattcagttaaggtttagtttaaccaaactattccttagggagttgattcctatcaaaggtcaaatcctgaaagagtaaaataatcaccttccaaatatcaatcttgtaaaacagaaggaggatcagaaaattagtaggttatactttatgggcaatttctcttcacagcttaatgctttgtttatataactatccttattaaattattttagcaataagaatggtgttgccttcaccccacttcactctccaaaccctcaataggaaaaagttggctggaagagtgaataacaaactaatcgcctcaaacttcactaagattaactggatatgtcacctcctctaaagatc

SEQ ID NO: 195102 - DNA, 1000 bp, Homo Sapiens
aaaaaaattatctgggtgtagtagtgtgtgcctgtggtcctagcttcttaggaggctgagatggaaggactgtctgagcacaggaggtcgaggctgcagtgctccacaccaccacactccagcctggggaacagagcaagaacctgcttcaaataaataaatatatatatatataattataataataaatactttttaaaagagatagctgtatgtgagttgactataaaaagatctcataataactggaaagcccatatgaggatgttcattagtaaaataaatgactatcagcagggcactgggtaaattagctacgctatatccatcctctgcaataccacaaagaggtaaaaataaaaagaacaagaactctgctttaacatggaaaacgcgctaagaaatacatagtaggaaaaattgaaaactatatacagtactttttttttttttgagatggagtttcactcttttgcccaggctagagtgaagtggtgcgatcttggctcactgcaacctctgccccctgtgttcaagcgattctcttgcctcaggctctgagtagctaagattataggcacctgccaccatgcccggctaatttttgtatttttactggagacaggcttcgccatgttggccaggctggtctggaactcccgacctcaggtgatccactcacctcagtctcccaaaatgctaggattacaggtgtgagccatcacacctggcccatatagtactcttattcctgcagggttgatcaaacggagctttagtctttttcttccttaaaaaaatgagttaatgtttttataataatgtttagaagaatagaggaaaaactttgttgttttgcagaacacttttttgttgttgttgttgttgacggagtctcgctctgttgaccaggctgaagttcagtggcacaatcccggctcactgcaacctccgcctcctgggctcaagcaatcctcccctctcagcctcctgagtagct

SEQ ID NO: 195103 - DNA, 1000 bp, Homo Sapiens
tgagttttttgtttggttgtggtttttggttttttttgagaccttgcttggtcacccgggctagagtgcagtggtgcgatcttggctcactgcagtctctgcttcctgggctcaagggatcttcctgcctcaggctcccaagtagctgggaccacatgtgcccaccacaatgctaatttttgtgttttagtgagacagtcttaccatgttgtccaggctggtcttgaactcctaggttcaagcgatctgcccaccttggcctcccaaagtgctaggattacagatgtgagccactgcattttttaaaaattaaccttgtagcagtcaggcatggtggctcactcctgtaataccagcattttgggacgccaaggcaggtggatcacgaggtgaggagatcgagaccatcctggctaacacggtgaaaccctgtctgtactaaaaatacaaaaaattagctgagcgtggtggcgggcacctgtagtcccagctacttgggaggctgaggcaggacaatcgcttgaacctgggaggcagaggctgcagtgagccgagattgcactactgcactccagcctgggcaacagagcgagactccgtctcaaaaaaaaaaaaaaaaattaaccctgtagctccagctcaaagggtcatagtgagttttcagctcactatgttataactctgtgtctggcagacaataagagcttctcaaatattaagtatttagtattagtaaatggagcaatcattactcagctccaaccaatagttgcttggcattgccagattttgtttttcaggaaaacctagaaatttgttttaattttctgtagagacagtgcttgctatgttgcccaggctggtctcgaactcctggcctccagcaatcctcctgccttggcctcccaaagtgttgggattacaggcgtgagccactgagcccgggaaagccagaaatttggaaacacggctgaatgttctgatttttgaataggggatc

SEQ ID NO: 195104 - DNA, 1000 bp, Homo Sapiens
cctcaggtaactggctggtaagtcacccccacctgggtctgggggatccccagtttaggggctgtactttccccttggcctgtgcactccccgagcacggtagcagtgtctcctccgcaggactggggcttaccaaagacaggaggccctgtcttcaccctcagaaggcctcaggcctccctgaaggaggcgccgcgccacccctcctggtgggagcttgggcctagccagggcgcgtgtccccaccctcagtttcgaagaccaagggctccgacccagaccgtgcgccctcaggacagggccctgccttccctgggcgtgggggctctccaaggatggggctctccaaggttagggctctccaaggatggggccctccctcccagccccggcaggatattggtctagccgctcgcgctggctcatggcgtccaggcgcgcgcggagcttggtcagaccgcgcacccagcgctgcgcttcctcagccgtgggcgccgccaggtccaggttcttgcggcggcccttgaaggcgatggtgaggcagcgcgctggcgcgaaggcacccccgaagcgccgcaggccctcggactggtggccctcgcggaccgcctcgatgtgctgcacgaagactgagaggagggccgggtcagggcggaggaccgggcctgtccccacctccctgtccgcccggcgctccccggcctctcacagatgtgctgcgatggcgcacgcgggatgcgccgctggaaccacacgctcaggccgtcctcctgcagccggtacagccgctccttgtgccacgtgcgcgagcggatcttgcggagccgggagccccgcagcatggcgcgcacgtcctcgtcctccgtcaggcctggcggggcgggaggacccggggcgtcaggccgtacctgcccagaggctcccctgccctcccccgctaggacctgctgccccatcctccagcctctccaaacccaggccttcatcccacagtaagctt

SEQ ID NO: 195105 - DNA, 1000 bp, Homo Sapiens
aatggtgtgagggattgaaaaatatataagtgtaaaaatatatggtcatttggcaaacacttctaagaaagaaatgaaactattatctattagtttattatccatatatgatttgcctatcagttctttgccctgagttttaaaatcaccacatcctctatattttattgaaatatttgtgtattggacttacagaaatacagttctataaaaaccacaataccacagtgtattatgttgtcaggttgtgtgtcaggagccaagctattattttgctgtctgggaagaaatgaagtgaggtgggcaggggtaaactattcactgaagacttagagttatttatttagcaacctctcaacttcccttccctaccctcccttatcttcctttcttccttccttttttcttcatttgagacaaaattctactagatttttgaaaatagctctgacctccatcttacaccaagtcaagtgtaataaaatcacaatctgctaaaccttttgaaattactatatagataccaaatgcaccagttgagaatggaaaaatgcaaaatacaaatttctttgcccacctcacatttgtcagttattcattcatcaaagaacatatatacttccttgccctcaagttgataaatgctaccatttatttagcacttctctctgttatgtaccttaccatgttattttataggaccgtgccagcaaccctagagggcatgcactattattttcctctttttatggagaaggaaactgatccttagagaactgaaggaacttgcccacagccagacagctgagaaatggcaggctaaggatgtgtacccaggtcggctaaatacagaacctgtgttctttaccccaggaatgaaaacagccaaacactgaacatacgtgtaccagagcttgggatggcggctcacggaatgattttttccattagttggagtgtctttcgttgctgatttactcagtaggaactcttgaagctt

SEQ ID NO: 195106 - DNA, 1000 bp, Homo Sapiens
actgtcccttcttctccctgcagggtgccgacccccacatcctggcaaaagagcgagagagcgccctgtcgctggccagcacaggcggctacacagacattgtggggctgctgctggagcgtgacgtggacatcaacatctatgattgggtgagggactgcccatccccaggacctctcagcctcctggccttcattcctgcctcaaatgttcacagagtacttgaaaggtgcaggcctgctctaggtgccgagaacacgagacagccccattcccagcctcacagagcagagctccccatgcagggaaggcagacatggaaacaggcagctgagatgcagtgaactgcgctgcgatggcagatgcacaggtggctacaagagccccatgtgggcaagggaaatcagagaggtcttcctggaggaaggtgtctaagcttgagaccccagaaagtgagatgggcccagtgatgagcaggaggaaccacgttcaactggaggccagagagtacaaggcattttgagaatgaggaagaggtaaacctttggtttctcctgcccctacccacgacagaatggagggacgccactgctgtacgctgtgcgcgggaaccacgtgaaatgcgttgaggccttgctgggtgagtgggagtcgggagtggccctgggggccccagcactccagcgggccctgcgggaatcctgagggcagggagacgcccaagtgttgcttgaagagttcttggagcaggtagtccctgcctgctcttctcggaggatggatcagaggggaggaggtggtaggaccacacgggagtcggggtctgggtttaggatctggccaagaggctaagcacctccatcctccatggttcagagacccttcagccacgttcttcagtggagaccaagatagcagaggttggacccttgtcaaaggccacatgggcaacgggcagacccacggctgcattgtggggaatgaggggtgccatgggatc

SEQ ID NO: 195107 - DNA, 1000 bp, Homo Sapiens
gcacttatcattatcatgggagtgaggggaggaagaggggaagatgtagatgcctatgttcaagttcccatcttccctaggaggcctaaattctctcttttacccattcacggattcctgaaatagcagtggtagaaattgttatgaaatccttcctcttttctgtggaagatgccatttagaatcttttaactgttacacccaacaacatagatggatttcaaaactttaggttgaccaaaagaaccccgacaccaatgtgcatatcttgtaagatgcactgtatgagtccacctgtaagaagtttgaaaacaggcaaaattaatctttggtgataggagacagaatagggtagatttgtgggggtagcgactgtctggaaaggtgcatggggggctttctgaggtgatagcatgtcccagaccttgatctgggtactggttacacaggtgtgtgcagatgtaaaaatttatcaagctgtaccattccaatttgtgcatgctgctatatgcaaagttaaacctcaattcttaaaaactcttcaaagtgggtgaaaaaggtaagctgatataaaatgggatggcatgttcagtagagaaaaaaatgtttctataatttctttcgtgagattagtcagaacccgattcctttctcagtttggaaaccaagactacgtaaaaatatcctaagggatgtggggattttatgaaggaccaaaaggaacactttttcatcttttctggaaaagtacagaatgaattcggttccttggtgaacacgagtcaccatcaagggtatgtggtccttagggctggagagtcaagcctggaatgatgagagaaatggctgagcttttctgcaggagaaacacgcattaataaccagctggagaaaattcttcagacaaaatgaatgtgacagagaggggaaggggcaggccttgggaggcagagagtcattaagggcttcaaaaggcaagaaagaggatgacacaaagctt

SEQ ID NO: 195108 - DNA, 1000 bp, Homo Sapiens
  misc_feature (189)..(238): n is a, c, g, or t
tcggggcgactcgggctgctgggtggctcccccgtccctcctcccgccagagtccctctcgcgcctgcccctcccgctggccacgcgcgcgctcgcgctagcgctcgcgcccgctccagcctcttgtgtgtcctcgcgccccccgcccgccctccccgcgcgtagtgtgctccgggggatcctctagannnnnnnnnnnnnnnnnnnnnnnnnnnnnnnnnnnnnnnnnnnnnnnnnngtagccccaacctggacggtcgccgtggccccggtcgcgtctgccttggagaagaagacaaagagcaaggggccctacatctgcgctctgtgcgccaaggagttcaagaacggctacaatctccggaggcacgaagccatccacacgggagccaaggccggccgggtcccctcgggtgctatgaagatgccgaccatggtgcccctgagcctcctgagcgtgccccagctgagcggagccggcgggggagggggagaggcgggtgccggcggcggcgctgccgcagtggccgccggtggcgtggtgaccacgaccgcctcggggaagcgcatccggaagaaccatgcctgcgagatgtgtggcaaggccttccgcgacgtctaccacctgaaccgacacaagctgtcgcactcggacgagaagccctaccagtgcccggtgtgccagcagcgcttcaagcgcaaggaccgcatgagctaccacgtgcgctcacatgacggcgctgtgcacaagccctacaactgctcccactgtggcaagagcttctcccggtgtgcacggggcctcggccgcccgctaggccgtggggagggagggacgcgacggaggtggcctggccgtggctggcggggagggaggcggctgctgaggctggggaaggggagccactcccagggcggagggaggaagcctctcccggttaccagggagcaaggggtggtcctttgtcgaggaggtgggccttggggttgacggaagctt

SEQ ID NO: 195109 - DNA, 1000 bp, Homo Sapiens
gctaacggccagcaaaggaagctatttaaaaacattgagggcccttgactgtgtaagtctagtgggagctcagggaggggtgcagggagaaatcttgtggccagttcggctggacaagcacagcttggcttgacttacagtcctagcagaagggagagcacacgtatgggatccagagactacacccacttccccatctgtactgcttctcaatgaatgaaagaataaatggagggacagacagttaatgcatatgagccactctgcatagaaggcactgtgtcacagccatttaatacaagaggcaacggtggttcaaagaggtcaagtgactgcccaagtgaggggcaaagatggaaatacagatcttgacttaatgcagtgttctctctcctaccccacagctgccaccctgtgttcttgggctgagcacaagctatacacaagtgaagagtttggtgagacagttacttaaccaatggatagtatgacccaattaaaatgtgaattcataaaagatgcttctctctaatactgtacagttggctcttggacaacatgggtttgaactggccgggtccacttatacacagattttttttttcatatttattgaaaaaatatattagaaaatatataaaaatatattagaattgttggagatttgtgacagtttgagaaaactcatagacaaactgtataacattagaaatattaaaaaaattaagaaaaaggtatgtcattgatgcataaaatataggtggatactactttattttatcattcattaccataaaatatacacaaatctattataaaaagttaatcaaaacttatgcaaccacttacagaccatacacggtgccatttgcagtggaggaaatgtaaacaaacatgaagatgcaggatgaaatcaaatctgcataaaattaactgtaatacacagtgtactactgttaataacttcgtagccacctcctgttgctattgtggcaagctt

SEQ ID NO: 195110 - DNA, 1000 bp, Homo Sapiens
aggcgggaggatcatctgaggtcaggagtttgagaccagcctagccaacatggtgaaaccccatctctacaaaaatacaaaaattagctgggcatgatggcgggtgcctgtaatcccagctactggggaggctgaggcagaagaattgcacgaacccaggaggcggaggttgctgtgagccgagccactgcactccagcctgggtgacagagcaagactccgtctcaaaaaaaaaaaaaaaatccaacttttgttctgtgctcaccaagcgaccttctgatattgtttaccacaaagagaatgttctggaacagagtttggtttcacttcctggacccagaagagttcccttaataaactaataatcaactggaattctggtagaaaattcagtgccttgcgagtttggttagtatggaccaatttctgaccacttgattaattccagatgccctagtaaatcacattcctgagctccaacctatcattctttcatctaacatttattgagcacctactgtctaccaagcactatggtaggaactggtgaaagccagataaaggacacagcctctgccctcagggagctttcagaccagtgttgacccaatcctggagtgtgagaaacatcacgcttgttatggctgagcctgaaagggacaatgagcctcctccactgctactgaatcagaacttactttgcatttacagtctatccatgggatcagaaaatcagtcaaccttagatttgaaaggaacctcagacatcaccttacttagtgactctcaatgctacctacacatgacaatcactgggagagcttttaaaaaatactgatgctggccgggcgcggtggctcacgcctgtaatcccagcgctttgggaggctgaggagggtggatcacctgaggtcgggagttcaagaccagcctgacgaacatggagaaaccccgtctctgctaaaaatacaaaattagctgggcatagtggcgcaagctt

SEQ ID NO: 195111 - DNA, 1000 bp, Homo Sapiens
ctcattgacttgcattttccttttgaaatgagacttctgcatgataaagagagaggattttatgtattaacaaaacaatctaagatgcctctttaaaggcattcatttctccttgatccggagctactgccctcttgaaggttcctagaggccatccagttttctgctgatcagaattagtctttttttctttgtcttatggggatggaatagattactgggcctagaactgccatagttgaataacaaaaagtaaaactgtgaggctgatgggacatttcccagcccatcatccttaaatttgcccttttcatgtttctgctttacttcttcatccagcagaaacgggcttagcatatttttcccatttaacatttttattgaatacttttcaaaatgaattatttccgcagttgatttcgaacacatttttttctgtcatttaatactttatatcactagaggaaagaaccatttaattctttcatacatttatgaattctaatcttcaaagagtgtgagttcttcaagtgatcaacttacatcaaatttacaagtataatttactaccaaaagaccttgaacgctttttggtgcacatgttttggcattccttattaacaaatgtaatgaggcaaaagcccacaagaatatgtattcctggttcctctttaaaaatgtaccatttgctcttattttctaattaaggctttgaaggttaaaaatccctttgttgttagctcctttacaagtctcctgcctgagtgcagaaaacataagaagggagtgtcctcttcagagcataaccaaaccaactaaattttaaccaggtaaattgttgattagcattggatcatgtaaagaaacagtatgaaagtaattgagataggcacaactcctaattgtgtgatcccagggggcttcaaacattgtttgaaacattcacctcagagattatattccatgtctgatccttatgctaatttgaatactaggatcc

SEQ ID NO: 195112 - DNA, 1000 bp, Homo Sapiens
ttcacactttttttgttgtttgttttttgagagagtctcgttctgtcgcccaggctggagtgcagtgaggcgatctcggctcactacaacttccaccaccctggttcaagcaattctcgtgcctcagcctcccgggtagctgagattacaggcgcgcgccaccacgcccagctaattttttgcattttagtagagacggggtttcaccatgttggccaggctggtctggaactccagacctcaggtgatccgccccctcggtctcccaaagtgctgggattataagcgtgagccatcgcgcccagcctgctcacacattatttttaacaaacgttaacgagcacctgctgcctgccaggctgtatttacagcagcaaataagttcaacaaatccctaatcttaaagaatgtacattcaaatcgggagtcgagacaataaaagtgtaaacataataaaggagatacatacggtagtgtcaggtagtgacaaatgctataaagaagctagatgggtggtcaggcgcagtggctcacgcctgtaatcccagcactttgggaggcctaggtgggcggatcacgaggtcaggagttcaagaccagcctggccaacatggtgaaaccccatctctactaaaaatacaaaaattagccaggcgtggtggtgcgtgcctgtaatcccagctacttgggaggctgaggcaggagaatcgcttgaacccaggaggcggaggttgcagtgagccgagaccgtgccactgcactcgtctagtgacagagtgagactctgtaccaccaccccccccccccccggaaaaaaagaagctagatgggtaacaagacagttggtgagagggaaggcggaggctgctttagataaagcatacctgtgatgaaaaggagcaagccatagttgcaaatacattttttttttttttgagacagggtgtgaccctgtctctcaggctgcagttcagtgacacaaactcggttcaggtgatcc

SEQ ID NO: 195113 - DNA, 1000 bp, Homo Sapiens
ggtggcatggtcagtgcaaactcagaacaaaagacctaggggaggtactcagggatgttgcatcaagctctggtagctgatgaaagtcaccttccttccaaggatagatctgtctaaaaaaagagctgtccgagtgaggaatgaccctgtagtgctctggcctcccgagtcctgcatttcttataatctaggccttgtgatctcagtcaagttaaaatgcccttctgtccccttccagttctttcttaagtgttaattggctccaaactggtttttctatggtatcagttcctgaaattggccggattaatttatcatgcactttaatgaaggactcttgtgtttgagggctctggcttagaaaggtgaatcctttcttccaaggaactcacagactgttaggggaggtagcctgtcaaatgatgactatgctataaagcaagaagcactgtccgtaatggaaatgtgggcagtggtctttcttacccctgccccgcaggactccatagtggggaagtacaaaccagttctctccaaaacatgtctatacttggataacttttttgtgaatcactaaagatgctcatgtcatcaaatgagatgaaatattcagacttttcacaaattctgattatttccttcctttgtccagatctccaagtgggttagccagctaactatactaacagctccaaagtcttattgcttagcagaatagaagtttctcactcatgtaagtttagtattggttggggcgtggagggtggacccaggctgcttctgtggtgtggcttgcccattttttgaggctttgctgtcctccagtgggttctttgctttgggcccacaggcaagggaagagagaaggcatggggaatcctgccagaagcttctgggacaagccttggaaggggtgtacattgcttctgcccacattccattgtctagagcccagtcacatggtgccacccagctgcaagggagagagactgtgaagtgt

SEQ ID NO: 195114 - DNA, 1000 bp, Homo Sapiens
acaggacaaaattatagacatgaaaacaaattagtgattgccaggaggtaaggaggaggtgagagtgagagggaagtgagcatgtctgtaaaagagcaataggagggatccttgtggtgatgaagacatcctgtatcttgactatatcaatgtcaatctcatgcctgtggtactatagttttgcaagatgttgccattggggaaaactgggtaaaggctaaagatgatccctctgtattatttcttacaacttcgtgctaatctacaattatctcaaaatagaaaatttaattaaaaagtcaaaacaaaagtgtgctgtttctctgcctaaggggactggagaaattacacgggggcccagaaaataagaaagcaagagcccactcaatcctggctaaggaattagaaacaaagaagaaactaggaagcaagacaagatttccttcttatgactcggtagagctgacagttgagcccgacgtggaaggttaggtggttgggttatggtcaactgccatttgccatatgctcactgtattagtcagggttttgtacaaaaccagcaagatgtgtacatagacagagacatttattttaaggaggtgtgtgtgtgtgtgtgtgtgtgtgtgtgtgcattcaagcaagtcaagttttaaaaactaggaaaaaaaaccatgactcacctggtgggaaaagatagttataaccatcagacaaggcatcctatgcttccatgctgtctttaacactagcagaaaaagtaacttaaaaactctgctgcaagatgactggctgttttctaaactatctgaagttctctcaggccatctgtgggataactccattttattttctcttctataaatattttaggtgtaatctcacatgccacaatttgtttgtcacatgtgtcacctgggtatgatggtttgattcataaatttctcttattctctgctaattttcctctctctcctgttcacccccaaatctcaagctt

SEQ ID NO: 195115 - DNA, 1000 bp, Homo Sapiens
tttaggtttattcctcccagctccaaagttcatcttcagtctcttttgctctccccttttcctctgttacttaaatattggtgcttccagcggtttcttgcaagatcctgacatccttaagtaccttggctatttttaatttcaactccttgcctaaaggttaaagactctaaagtttgagcaattagaccattctaaagttggcccatatctgattcttttttttgttgttgttattttctgcttcatttttccttcatacatacctgtttctaagttactgaggccaaggactggaatatgaaaagtagccaacactgtgaaatagtaggattttaagtatagcaaatgtaaaacatttacaaactccataatttcatcactcgtacctgtacctcttggggtataaaagtgatttacaatgcaattgtagaattataattgaaattttcactagataatatcacattaaaatttttaaaaataattaacgtttgtttatcttctgattcacagacagaacaggattcaagaattacaataaaagcaccagcatatcttttgaaacactgactacttaagagttgctctattaatgccatttaactttcctgaataaaacaagatatttccaaatgccagtcgagtatcatatataaaataattcaaaccaaatttcttggcttaccaatcccaacaaagtaacatgtaaaaaatttttaaataacatgaaaacttacaacatggtaaactagggaaaaaaaaaaaatctcgttttctgcatcttgtgtttccacaactatcttgggtagttttccacatctatttatcttacaaatagaggcagcattctatagtatcatattggatactgtgaaaataagctattaataaaaaaatttctgagcccacaagcctgataaaaaatatatgttgttggcagttgaaattgttagaatggaattaatatagtgaaaacatattttctctatacaagctt

SEQ ID NO: 195116 - DNA, 1000 bp, Homo Sapiens
agtttttatttatggggtatgatatgtaataactgaagtggtgataatacaaagtactatgatatttgacaaaagtaaagtgcaaatcgaatccaaatgctaaataaggaataaaattagtactcgagtgtaacaaatcatgactgcagaagtgtttaatgaaaagtttacatatgaaatggatattgcaaagagctcttaaatgcctttactaagatgtttagactttagtcaagagttagtggggaagatgaaaatgttttctcttttcttttctttccttttttttttttaagtagtgaaatcatctaaaccagaatcctcttttagaaagatcatattgatggtagtaaagaaatggaaatggcaagaacatacgagaagggtgtctaggttaaaaactaatgaaataattcatccatgagaaataaaagaataaactctgtactggaaggatataaaaaggaaacatatatgaatactacagaagtagaatgaacagaatttgaagacagaaaacctataaaatggtttttatataaattatttaaattatatataatttataagttggatctcctgggttttgtactcagtggttaaactccttgtaattccatgtatgaactattatttactttgctagtatttatatcttacggccagcctcttaataatttgaataatattattatgtccatcagatagaaagagaaagggtagtaaaatggaatccaattagttgtctttcctacttgccagtaatattctgggaaaaaaaaaaacagttaatatggtataagcttatacgtttttactttatatactgccttaatatataattagaagatgaatgtaagtaaaagtcctactatatttgatctttggatgacttcacaaccaataattgttttttcacctgaacttcacatttaaaactttcaagcaagagaacttagagaatgcacaattgctcactccaagtacttgtaacagtaga

SEQ ID NO: 195117 - DNA, 1000 bp, Homo Sapiens
tttacatttgctgaggagtgtgctttatttccaactatgtggtcaattttggaataagtgtgatgtggtgctgagaagaatgtatattctgttgatttgggatggagagttctgtagatatctattaggtttgcttggtgcagagctgagttcaattcctggatattcttgttaactttctgtctcgtggatctgtctaatgttgacagtggggtgttaaagtctcccattattattgtgtgggagtctaagtctctttgtaggtctctaaggatgtgctttatgaatctggatgctcctgtattgggtgcatatatatttagggtagttagttcttcttgttgaattgatctctttaccattatgaaatgcccttctttgtctcttttgatctttattggtttaaagtctgttttatcagaaactaggattgcaacccctgcctttttttgttttccatttgcttggtagatcttcctcaatccctttattttgagcctgcgtgtgtcattgcacatgagatgggtttcctgaatacagcacactgatgggtcttgactctttatccaatttgccagtctgcgtcttttaattggagcatttagcccatttacatttaaggttcatattgttatgtgtgaatttgctcctgtcattatgatgttagctggttattttgctcgttacttgatgcagtttcttcctagtctcgatggtctttacaattcggcatgtttttgcagtggctggtaccggttgttcatttccatatttggtgcttccttcaggagctcttgtagggcaggcctgatggtgacaaaatctctcagcatttgcttgtctgtaaaggatttttttttctccctcacttatgaagctcagtttggctggatccacaataaaaaaagagaattttagatcaatatccctgatgaacatcgatgcaaaaatcctcaataaaatactggcataccgaatccagcaacacatcaaaaagctt

SEQ ID NO: 195118 - DNA, 1000 bp, Homo Sapiens
tgaccatcagcaagccaatcagagaggcctcgaaagaaaccatccccgccaacagcttgatttcaaactttctttaagaattgtgagaaaataaatttctggttttttttttttttttttttttgagatggagttttgctcttgttgcccaggctggagtgcaatggcatgatcttggctcaccacaacctccgcctcccaagttcaagcaattctcctgcctcagcctcccgagtagctcacaccagtaatcccagcactttgggaggccgaggtgggtggatcacttgaggtcaggagttcaagaccagcctggccaacatggtgaaactccatctctactaaaaatacaaaaattagccagacgtggcagcacgtgcctgtaatcccagctactcaggaggctgaggcatgagaattgcttgaacccgagaggtggaggttgcagtgagccaatatcacgccactgcagtccagcctgggcgatagagcaagactccatctcaaaataaataaataaaataaaataataattaaaaaaaataatcattgtgcacctgctactgaaatagtggatcttggtgatgattttcaaaggccactaaaactattaaagtcagtggttcccatccctggctgcacactggaattactggaaaggcttcataaaacacaattcgtgggtctcaccccaaagattttaatttaattggccaaagctgtggcccgtgcattgtgaggcttctttaaactccccaggtgattccaatgtgcagccaagattgagaactgtcacatcaggtgaaaagctggtgggaaactgtataagggagggagtgggggaatggagagccagctcatgctgacaatgcctgagtccccagatctgtctttatcagaaaagacagccagacagtatggatctcatgacatgcggcactagaagggacacagtgtgaagtttcctgtggaatcatccgagctgaatctcaccaagctt

SEQ ID NO: 195119 - DNA, 1000 bp, Homo Sapiens
tgggtgggtcgaagagctccagcacgcggtcggggccatcggggcccggggcccggcgcagcgccagcctcccgcgctgccagcgtgccccgctgtccatggaggcctcgtcggccaggctgtagcgcagcaccgcctccttcagcgcctcgggtggcggctcccgggccaggctccagggcaggaacttcttggccaggccaggccgggcgggggtctcagcagcctctccgggggtcccgggggcggcagcggtgtgggccgctggcagctccccggccgagcggcggcggaagatgtggcggaggctgcggcgaaagtgctggaaggagcagggcccgggcggccgcggcggggccagctcctcagagctgcgggccttgggcaggccaggggcggcggggccggggcctggctccggggacgcctcggccttggctgggggcccacggcctgtgtcccggtagtcgcggcccggcgcccgtccgtcgcgcacctcgcggcagaagtagcgctggaagaggtcggtgaactgcagcgacaccagctcggcgcgcagcggcgcgtgctgcggatgctcccgggcgaacagccagtactggcgggccagctcccgggccgccgctacggcgtgcaactcacagaactcgctccagccccgcggggccgccgccggggaggctgagggcgcggaagagggcgaggagggctgcagggcaggcccgttcatggcggagacccaggtggtgcggccgggctgaaagacacgtgggtgggggggcgacaaggagtaagcaggtgggcaagcaggtgtaggccccattacacaccgggcaccacagcagaaatccaacgcgaccataacacccagtgctggtgaagatgcagggaaacatgcactcccctaccaagtggcattctgtaaggggcatggccaatttggcagaattgattctagactctggaatcctgcttttgaagtacaaaaaccatatgatcc

SEQ ID NO: 195120 - DNA, 1000 bp, Homo Sapiens
atggcttggctctttcttctgtccctccctcgccaagtggcctgggccgagccccttgacttcagtgccttggtgtctgctccccatgtgtgcccttcctttaggcatcccctgggatgaagaaagttctgcatcagtcactggccagacccaacccaggatggtctgcctcagaggtgagggaggcttccttagtcctccgtcaatgccctggctatgctcaatgggtgtctaacgatcttttttttttttttcttttctttttttttttttttgagactgagtctcactctgttgcccaggctggagtgcagtggcgtgatctcagctcactgcaagctctgcctcctggattcatgccattctcttgcctcagcctcccgagtagctgggactacaggcgcctgccaccacgcccggctattttttgtatttttagcagagacggggtttcaccatgttagctaggatggtctcgatctcctgacctcgttatccacacgcctcggcctcccaaactgctgggattacaggcgtgagccaccgtgcccggcctctttttcttttcttttctttttttttttttaaacacagtctcttgctgtcacccagactggagagcagtggtgcagtcataggtcactgcagcctcaaacccctgggctcaagtgatcctcctgcctcagcctcccgagctgggaccacaggcacgcaccaccatgccctactgatttaattttttgtagagaaagaatattgctatgttgcccaggctggtcttgaactcctagactgaagcacgcctcccacctcggcctcccaaagcgctgggagtataggcgagagctaccactcccagcctaacgatctctcttgaactgcaaaacccctagcttgggctggctgaggtcaagatgagcccttccccaaggaggcggcgtcagtgcaggacagcagcttaggcagcacctaaggacttttattgaccacatgaccccct

SEQ ID NO: 195121 - DNA, 1000 bp, Homo Sapiens
cactcactaacttgttctttcagtaaaatactgggtgaagctcagtaaatatactttagtacaaataaagtggtggacagagttgcagagataagcaaagactggtaggagagtagtgatttgttaaaagcagggactctcaagtcagattgcctgggttcaaattcttcccccatcacttgctaactgcataaccatgggcaagttacctgatcaccttgaacactgatttcctcatctgtaaaatgggtataataggagtatatgcctcatagagtcactgcaagaattaaatgagataacacaaataatgttcttagaaaaaaatgtcaggtacgtcttgaacactcaataaatattagctattatttttccttggaggatgaatgaatttcagcaggcaaagatgtgtgcgtgggagtgacctacagaacagtacacactaaggcacagagacaggaaaaccccggtgcaagtctagagaatagcaagaggccagtccagagaaattgggaaaagacaagttgggggcagatggtgagatgccttgtgttgactaagaaacttggatctcatcaacattttccagttagtgtttcctggagcaccagagtcccataagatgctattggatattttgtaaagatacaagaaggatatcaacaagcaaaagaatgaagtggacccttacctcaggccatatacaaaagttaacgcaaaatggatcaaagccctaaatataagtgctaaatctattaaattatttttttctttttgagatgcagtctcactctgttgcccagtccggagtgcagtggcaccatctcggctcaccacaacctccgtctcccaggttcatgtgattctccttcctcagcctcctgagtagctgggattacaggcatgcaccaacatactcagctaatttttgtatttgtagtggagacagggtttccccaagttggccaggctggtcttgaactactgacctcaggtgatc

SEQ ID NO: 195122 - DNA, 1000 bp, Homo Sapiens
agactatggtagcaactctggatactgattcccccttacctacctccaggacctgttgtatttgcttgttatttgtttagtgacttgattggactagttcggtgaagtccaggtacccatgcaatgtggagccgctggtgtcttcctcagaggccacagccttgggcacacacagtctccatgaccaccagggatgactgactctaggctctctatctatttccctgatgaactgttaagcttttggctggtctacttcacacccacttagcctcttctaatttctaggtgattgttctatggttttgttttgttttgttttgtttttttcagaatctcgttctgttgcccaggctggagtatagtggcgtgatcttggctcactgcaacctccaccttcccagttcaagtgattctcctgcctcagcttcctgactagctgggattacaggtgcccaccaacacgctcggctaatttttgtatttttagtagagacaaggtttccccatgttggccaggctggtctcaaactcctgacctcaaatgatctgcccgccttggcctcccaaagtgctggaattacaggcgtgagccaccacacccagccagcaatctgttcttttggtttgcctctcctgttggacagaacctctgtaccactactcctgagctggccgggggaggaagatggtggcctgcttttcccagaatgacacacttgctcttcaagaggggcactgggcaaagatagtatcccctggtcttctcatctccctcctcctggtgtggaaactctaccctgtgaataagcaaggcaaagtactgcagcctgcctccatgtagtagaacttctgctctaaggtggaggctggaaggaggagggagctccaatcctctgccctgcagttgcctggaatacaacttctgtaagacagaactggtggtgatgcgatgctgatggcatgcccttcctagagtaaaaccatagccctactctgg

SEQ ID NO: 195123 - DNA, 1000 bp, Homo Sapiens
ctggcagctccattgaccttgcatgtgcaatttctagtcactctttatcttcagaaaaatctgccttttgctatttacttgccagtaacaagaataaggagaggaatatgtttgctctggcgaaagggctacatcttgagactctaaggatccttacttaagatccgggggactcatagatttaccaagtaatatatggattcctgtgggttatgtggccagtaaagaccagtaaaggaatttgagagtccctattgttatccaatttcagtgaactgctggtcagttctaccaagactgagttagagacagagccaagaaataccattttagtactttcctactgtttcttcatttaatctgatgtccacactgtgtaaagggtgcttcaaaatatgccaatctttttattcactggacagtgcacattagagcctcattcctacagagtgtagcttaataaaattaactctgactcagtaggtgtgtgaaatgagattctctctatctcatcccacagtggtttggtccaaggacagagacttttcagtgttctagttagggttgaaatactatgtatagctgtgtaatttttttttttacccagaattgatgatgtttgagtgcatggatttaatacttcataggaatttcaataaaaaagagaatgctcttggcaaaaatagcaattgtttttttcttacggctagggctattctcacttgggaaaggagtgttgacaatcatatgaggttgaaattatggtgagttgtgctgtgtgtgcatagtattgtggttaaaagcttgggaatcaggccctctctgctccatggcctactaattctatgacctgaacaagatactcacctctctgagcctttgtttccttttctgtagaataggaaacttcaattgcatctttagcaataaaacctctgggattatttgggatttaaaagagattgaggcaggttatcattggaaggtttgtgtaaagaat

SEQ ID NO: 195124 - DNA, 1000 bp, Homo Sapiens
gtctttgcacaaccaagtatgtgtaaactatgcagactactttgtgttctactttcaaagtttcggtcactgaagtaaaatgccatcaaactcctctgggccagaaagcctagatctaaatgttgaacctcgagttcaatgttcttcctcattagcttttttctaccttatgtattttgatctatacaaaaagttgaatatggataatttctacaaactgctggagcttaatggtttaaaaggtagcataagcccggcacagtagttcaagtctacaatccgaacactttgggaggctgagacaagtggattgcttaagcccaggggtttaagaccagcctgggcaacatggtgaaaccccttctctacaaaaaatgcaaaaaattagccaggcgtggtggtgcatgcctgtagtcccagctacttgggaggactgaggtgggataatcacctgagcctagaaagttgaggctgcagtgagctgtgatcacaccactgcactccttcctgggtgacagagtgagaccctgtccaaaaaaaaaagaaagaaagaaagagaaagaaagaaagaaagaaagaaagaaagaaagaaagagagaaagagagaaagaaagaagaaaagaaaagaaaagaaaagaaaagaaaagaaaaaaagagcatggtgtgttggagcatgtgagtgttgggattgggatacctgtatgccaggcattgtgaagtgctttatatacattagctccttctctccaatagaggtagtattattatccctagtttctgaacaaagaaactgaggcttaagacgttccactgttattaaggggcagaggcaggatttgaacctagttctgaccaacaccaagggtcaagttcttttcatcatactagtggttcttaaccttgactgccttgactgcacattagaatcacctggggagctttaaagcatcccaatgcccagggcccatccccagccaattaaaacagagtccctggaggt

SEQ ID NO: 195125 - DNA, 1000 bp, Homo Sapiens
ttgcaaatctgtgctttaaatttattggattacaaagctttaaagatgtgtggatctgggtgctataacactgctcaaaatagctgcctgaatgaagagatatatgtactttaacattacacttttaaaagtgagtatatttcatgagatgaattgtctgtcttatgcgcaattataaatcatttctatttcataagactgtagagtgattttgaatacaaagcaatattggacaaatagcaaattatgttaaattgtagggcaaattgagaaagcgaagctgtgattttgagcaactgtgccttcatgatttaaaatgcaactttcttatgcagtatggaacaattcttatttcctctcaaacttctattataaatgcatttattctttttaattttagcttcacagataattctggtttggaattagggatctttttttgaggataggaagaaatttgcaaattatatttgagttttgatttattgtgataattgactaatttattatataacctgttataatctgaactatttaaaaataattttctgctttaaaatctctcacagggtctttcttaagacactttcattcacctctggaaatagcagcagtagtttctaatctttggctagcagataatttctaaaatcatttttctttctccccgaattgtagtttgagtagcacttgtctttcagagaaaatgaactttattcctattagaaaaactgttaaactaaaagatctgacaacaacattcttgaataagtttaaagaatttatggcttaaattaatctgaattctaatttaccttttaccttgagcttggctgctgttttcaatttatatgcattttatacattaactgctaccctcaatttcctgtcaactttgtagtaagtgatactctgtcaaatgctactctatgatgcatttaaataaagataaaaggtcaatctaggcttttctaaagttaccattctaggatataagctt

SEQ ID NO: 195126 - DNA, 1000 bp, Homo Sapiens
gggaggcctcacaatcacagtgacacgtgaaggaagagaaaaggcacatcttacatggcggcaggcaagagagcatgtgcaggggaactgccctgtataaaaccatcagatcttgtaagacttattcactataatgagaacagcatgggaaaaacctgtccccatgattcaattacctcccactgagtccatcccatgacatatggggattatgggagctacaattataggtaagatttgggtgaggacacagccaaaccatatcaattatatattgatgcatctaagtctgcatcttataagactgttcacatgttctttctctttctctatgcaaatggcaggtcttcccacctgtagtttcccacaaaggtcctttgacaaatcaagcccacactccaggttgtgaccctcaattggaagacatgagcctcaacttccaaggctcacttctgatatttctgcttgtttcctcagagtgtcatacgcgtatgtgttcttactgacgtatcctggacaatgttcctgctgccacttctatgttatccttgggccacattcttagtgctcattttggttgttcctggtcttgaaagatcactacatgaggctcagggagtgtgtggctaccacagttcagcctaggattcaggtcactttgctgttgaccttggaattctatcttgataatctgcccaatggccactcaaactgccctggctagcatctcaaggctgctaactgaagttcaaatgctgactccggacttcagatggatcctacagcaaagttacttgagacctaatactttagtgaagtatctgttttaggttccacacagtccttaacatctgggatatggatctaccataacgatggctgaactggggcagatttaggtgacattgccatgctgttcccaaagccataattcccctagtgtccaggtgccctttaattccaggtcactgagccagactcttttctttgagtgaagctt

SEQ ID NO: 195127 - DNA, 1000 bp, Homo Sapiens
agttccagtttactatgtggggagagacctttaatacaaacttaaaatatgtaaagaggcagattgcataatttaacaacctgaaaatgacagaccctacaattagtacttaattttttttccattttgtaagacattgaaataagagtttgattgaatttgagtagtgttaataatttttttttagtggaggccagtaaaatgtccatatatcaccacatcatcatcataaaataatgcaacacattttaacaaaattaaaaaacaaggtaaatatatttttataggcacaatactgtctttttgtacatcagtaacaaagagacgtccagggacttctgcgttcccataggataaattcagctaacaacatgtgaatttttacatatgtcatctgaaaaccatacagataaatgagaagagcaaatagaattacccatatcctatgtctacatcttagccaagacaccgagactagaacaaaatttaaagtacttgcaagtgtaaatgaacattccaaaccagtacaaccatttccagggcccaagccagattagaaaagcaggtagaacatgcgaaaaacaagagaaagaagcagggaactatgagaggtagaaccagtaatatatcacttccagaagaagaggggtactctttgagagagaaaatgcttagaaaaccctgaaaactggtagatcacaaagcaggatagcgatgaattgcaagaaatgggcatagaagtgtgcacagctggaagtagcagacttgggaaaacaccgtatctggaaaaaggaaaggcaaattggaaaaggggtgcatcacttgaatgcttggtagagagaaataaataaagaactcagtagataagtagaatttttaaaagaactaaatggaagctgaagaagtgaaaaaaaaaaattaaaaaaaaaaaaaaccacggccgggcgcggtggctcacgcctgtaatcctagcactttgggaggccgaggtgggcggatc

SEQ ID NO: 195128 - DNA, 1000 bp, Homo Sapiens
tgcctggactaccaaaatcctaatcacactgtagtccccagctaacatgttaccttctcactggcttaatcacctcccagccaggagagctcttgccctcctttgaactgtcatatcagtttgtctggaccttggatcttatcatataattatctgttctcatgtcccattttctgtatttatgaggcatatagttactgaactccattgaaaatcctttcctctgcttgctggctatatagccctgggtacgttgctatattagtttgctagtgctaccaaaacaaaataccacaaactaggtggcttaaacaacagaaaatttatattctcacatttctagaatctgaaagttcaagatcaaggtgttggcagggttggtttcttctgaggtctctctctttggcttgtagatagccgctttttccctgtgtcttctcttttgtgtcctacatgtctgtgtctcagttttctcttcttgtaacaaaccagttggatgggattacgtcccaccctaaagacctctttttaacttaatttctcttttaaaggccctgtttccaactatagtcacattctgaaatatttgagagttaggacttcaactatgacttttggtagaacacagttcagcccataacagttgctttaatctttctgtgcttcaatttcctcttatgtaaaatctgcaaaaagtacctcttgagtggactgaaaatatgtaatatatgcaaagcaacaccttaataccccataatagatgtttaatgaatattcatgacttctacccttactacttcaagcttcttgagaatgagaataaagcatcttgtgtccttgcagttctaggacaaactttgaattgcttataaatatttggtgaatgaaaaatcaaatagcagaagtgagtctataataattgtatgcatttctctttctctcttagatggatccagatactagatgataactaagatttcaataacaaagagtataccag

SEQ ID NO: 195129 - DNA, 1000 bp, Homo Sapiens
gtctcctgtctgcctctttgtgtgtgggtctatcttttaatccagctccacttattttcttcacttttacttcttctgggttccagtccttggcatggattactgtccagctagaactagctgtgactagccttgctgctccctgttggaggtagaaaaggatgcttcagaaaatacaaggtgccacactcttaaaatgaacacttccctaaataagttggaagcatttgggtaaaatggcacaaaacactttggagaagcacagtttgatttcagtgtgcaaaagatgtaaaaactaggagaaggtaaatatgttcttatttcccaccttcaatatacggtacttactactaaaatactaactatactaaattgcctcacacttcacgtttctccttagtgagggtaaagatagcaaaaaatacttgctaccaagatttggccatggagtactgtaatattttgcactccagatgaggctgcaccactgggctatctcatgcccattaacaattgcacaaggctcaactaaattaatgaagttcctgagtcagcctggaaacagccggtgcttttctaaaaacaaaaacactggaccaactagaaagatagctttcatactgttctccatggaataagatgggggtaaagttttcacacatgaattaaactaaactgaaataagctgggccattgttttaataaattgagggaatgtggctggcagtaattagaatggcctgaataaagaacacgttgaactccctacgctggggggaaagcacttggaatatttcattaggaggaggagacaagtggatttaaaacatatcatgtttttagacgactacgtttcccatgcatatgaggcacagtataaataatactataaaaaaatgccatgttcttaaaatgcaatggtttccccaatatataacatgaatgtaaacaagatgtctgtcaagcatagcaataacatattgcttaacacagcaagctt

SEQ ID NO: 195130 - DNA, 1000 bp, Homo Sapiens
aattaccttttgagaaagtaatttttgaccacaaatgcaattatttgctattaaataattgtgagaatgacagtttatttgatagtcacagaaacaactgctttgagtggcttaagttaacaattccctgaatattttaatgaaggctttcttttgagagcccaggatttcttcacttttaatagatattattctgtatttatattaaaaactcttatttcaaagtaaaatcattgaaaaagaaatccataaagcatggtaatttagataaaagagcttaaaccttgaggaatatacttttaaattcaatgtagttttgttgagaattccttttcgttgattagagaaagattgttttattgttctccagtagtcccacaaattcagtttatataagattttagcagatgcttgaggaaacattaagtagtagtaagagtaagattcattacaaaactattattttgtttcctgtaaaacactaggcatgggttttaaggcatagaaattcacatgttaatatcttggtaaacttgattatagttgctaataaatttacaattgcaatttataactttatttaaatttgtttttgacttctaaatctggtatgatagtaaatgtatttaaatgttaactaaaagtgagaaattagtcttaatgttttcttctcattgccttgaaaacataattccttaaccatgtcttgcttcttcttttaattatataggaacagctggacgtagctctttccaaaatctgcaagaattttgacattaaccattataccaaggttcaacaagcttatcgacttcttggaaaaacacaggtttgttacaaaaggatgtttggatttttccttaatcaggaatttgttgtccttcatgattaagtctgaatattattaatctcatgtccttaaaaagttttatttaacgaagtacatttttattctgaattaacagtgataaaatggttgttcttgtagactcagagggta

SEQ ID NO: 195131 - DNA, 1000 bp, Homo Sapiens
ttaatagtggtgcctgtatggctatttgcctgccactatatgtttataactgccacatttaaaacagtgtacgtcagatttgtgtacccattgattttgttggctttcatccaagtttaatgatgatttcttaatgtctttttataaatctcatttcgtgctattatgaaaacctccattttgaaaatcacaaacctctggttgaaaagttcatgcaaagtccacattgcacagaagcacatatttttaatgtctgtctccagaccaaaaaagtcttaaagttaatttaatgtctgcatttgaggtgcaacttaaaagagaagatctgaaggaggagtgggagagctataaagtagttttagcaaaatgtgtttgtgttgtttaggacatatgctctttagtaaatattttttaaggtagacatgccttatgatggtagctgaaataattgttaataataaaatttttgaaaatcttgtaattttttcccatatctattggaagttgtttaccagctgttattgtttgaaatgtgattgttgtctatctcttcccaacctctcttgcaaaaagagaagttaacttctggtagtgaattgagcagaaatgtaatattttttaagcctgttgctctgtgtaacttaatatttgcatacttaattgttttattatacaatcagtgaaatggtaatgtatattgatgtccattcaaccatatacttacactgtctggactgtgtgtttccagttttgtgggacaaataatttgtcagcgttcaccagcttccaaaaacttgtgaaagcttaaacacctaaattgatgatgaatgcaaaaaagaagacgaaaaattaagaggaattaccaattacatggaaatagaatgcataacttctagaagttatacttctaaaatagttctatctaaaataaacccaatccaaaagaagacaggtaaagagaaaaaaggtaaaggcggacaaaataggatgcagaattaat

SEQ ID NO: 195132 - DNA, 1000 bp, Homo Sapiens
tttttctgccaatagtgagcatcatttactaaaacagttaaaaagagatgtccaaaagcattttcaatgctgaaaagtgttttcaagtcctcttaagggcaaactaactagtatagtggagaaccaacatttttgaggagttcacaaagttccgagggaaaatgatggtatttaataattatgatagggaatagaattctttttagtttgaattttaaagtgagtggagaataaaagctgagccactgtcacttagggacgtatgagtatccaaaagttgtgttttgatggtagctgtgattgaatatcaataagaattccaagttcaggttcactgcttcaaacactcttactgtttgctactaatccagcactggagggtgggcaagcctatgtctggcaaacaagacattgctgtttttcccaagtcccctgcagcttgttgtaagtaggtttgtctcatgatcaacaataccttgttcagtaactattgagtgttctctgggtgcctagatttgtgtgaaggcattttatttgtaagattgattttgtcacttatttcatttttcttaaggaaaaggaatctctgctattattcttcatgaaatacaaataattatacttaatttactgtcttctcaatttgagctggaaaaggaatagaaatatatatattacactatctcccaaataatccatccctaaatatgtcatcttaaatttattacatttctgagctgattggctcttctcttagggccattgaataaactggtcttctttgtccttgtgtctgtcttttaaaagtttcagatttcatctccactttgaacttgcagctttcttaatgggattacaaaggaaagggtcaggcccgagagcaaaagagtgcaaacaggtgaggacgttggagacagagatttaaatggaaatgaaagtaataaatttgtcaaatacatttgacacatatattagacaaagacatctatttctaaagctt

SEQ ID NO: 195133 - DNA, 1000 bp, Homo Sapiens
agctccacttccctggtccacgccattctcctgcctcagcctcccgagtagctgggactacaggcgaatgccgccatgcctgggcaattttttgtatttttagtagagatggggtttcaccacgttagccaggatggtctcaatctcctgacctcgtgatccaccccccttggcctcccaaagtgctgggattacaggcgtgagccacggcgcccagcctatgatttttgtacaatggcaaaatcactcaataattcattttttagaatgtatgcccaatgttaagtgacacaagtctatactatgttctttcctgtacatgtttttctttctatacaaactacggtatagtttaatttataaattagacatagtaaaagattaacaatagtaactaataatgaaatagaacaattataaaaatataccagcatcactactcatgctctttggaactattattaagtaaaataaagattatttgaacacaagcactgtgatactgcaacggtcaatcttataactactcagtgactaacagatgggtagtgtatacagtatggagacactgggcaaagggctgatttatgtcttgggcaaaatgagtgggacaaagtaggaaagtacaagatttaatcatgttactcagaacagtctgcaaatttaaaattaatgaattgcttatttctaggattttccatttaacatttttggaccatagttgactgctggtaattgaaactgtgaaaagtgaaaatgcaaataaagggggaatactgtaccacaatagatgggggtggacacttctatgactggaacattttctatgattacatgaaaatggactaaataacataatcaaaggaagagattgtcagactaaatagaaaagcaagatccaactatatgctgtatacattttaattcaaagatacaaatatgtttaaagtaaaagaaagagataagttatgccatggaagcagtaatgaaaatcaagctt

SEQ ID NO: 195134 - DNA, 1000 bp, Homo Sapiens
cttcaggggcctaagaaatagtaaccaaagaagcaggagacatggaagagatcaatgcttcaaaaatctttcactgaattataatctaagatcatgacaatcacagcaataatgataataaattcattgtatgggcttttcttaagtcacttaatacacaatcctattgaggtatatgctatctcaattttacagaaggaattagaggcacagaaaggtaatgttatctgcccaatgttatctatccaggagggcaggaaacagctggctctgcagtccatgcttttagtaatttttgtttgttttttgacagggtcttactctgctgcccaggctggaatgcagtggcatgaacactgttcactgcagcctcgacctcctgagctcaagcaatcctcccacctcagcctcctgagtagctgggactacaggtgcatgccactatgcaggctaattttaaaatttgttgagatggattctcgttgcattgcccaggctgatctcaaacttctggtctaaaatgaacctcctgcctcagcctcccgaagtggtgagattataggcataagccactgcaccaggctagtgattgctaacacttaaatagcacttccaagtgccttgacacttttctaaacactttgtattcactaattcgtgtaattctcactatagttttttaaggtaaatactatcgttatctccattttatagatgaggaaactgaggaacaggaagatcatataaactgcccaaggtcatagatgtggaacattctgaactaacaccagactattgggccctatggtggtgctcagatgttacttggaaagtataatgctcacagaagcactctctctctctaggggaatacttgtttccatcatttgttttactctctgtagagggaaacattcctttccaaaggagatttcatcttctgactagtaaatcagactcagaatgagctatgattcatttacaggtaagtcacaagctt

SEQ ID NO: 195135 - DNA, 1000 bp, Homo Sapiens
aacatatcacaggaccctttataaaaggggctttgattaaatcttggacaagatttggtaattatttctttagtgtctccaaattgatgtgggctaggtagaactcaagtttacacccggggagaagcatgagagggtggagttctctctgtaggggtgagtgtgtgtgcgtttatttttattgagataacattcttctatttctttagtggtgactttttcattccttttatgccacttattttgaaatcagaagtatagcctatggagaatgcatatttttggcaaattgttctctgccctgcttgaagatggatttggccattgagctttttgagatgaccacactgggagtccagcaacctgggaccacagtcaccgttcggctaccaaccaacaaggaaaaaaggcctaggtaacagccaatagacatttgtgggctgtatcatatctctatgtcttttatagccaggagtgtaatacaatgtagaataataatattattaacaataatgactatcatttatcaagtatttatcatatgccaaaccctcagctaagtagttcacatacatgatcttatttatttttatagtcactctgtgtagtgggtattatttccctttctattttacaaatgtggcgcttgaggttcagcaaggttaagtaatttgcccaaaatcacacagataataagtagcagagccaggattagaaggaggtcaacagggctccatgtaccacctcaaaattatattaaaaccacaaggaacaatgtatttactgtcatcttgtttcctagagagcctttgctttccagggtctgatggtatgttttatatctgagtgctgcagcagtttacaaagtattaaactaaaccctcaagcttataggcagaggagcatgagagtagggctgggaggtctgtgctggctgttcactcccatcccacaatccaacagtgttggtcttggagttaaaccaaagttctagaagctt

SEQ ID NO: 195136 - DNA, 1000 bp, Homo Sapiens
cacagcaggcccaggaccatggctggggaggatatgtcagcacctggaagtggagtgcaggctgcagcgcccagccatgtgggccaggtgcattcactcagagtggggccacacacccatctacccagtttccacaagatgtggctcctgccacacccacagggcagcctcctccaaatccctcctggaggggcctacccagaagcctccttgaaccagtctgcaaccctgctctatgctgacccttgtcactgaaccctgatctagacttatatgaataaatgaaattacatgccaagggccctaaaaagcaaattttacgaaattgtgtggcagtttctgggactagaatgaatttcatttgtgctcctcggcagggagaggccatacttgcagtgagtcaccccaagacggagctgtttgagaactgcagctgcagcaaggccttccaggttcctgggagttgaaggaaaaggatgctgaggccaggacctgagtgcttgtctccatgttctggccacctcttcctagatttccagggactagcttgttggggctttactacctgctgacatgacccaggaggttgatgattgtcatcatcatccccgtttttcaaatagagatggtagtgaagggggcggggagagggttgtccagcttacccaccaggctgatggggcctgtggacagaagcctgtcatgctcctgcttgagaaccggatctagactgggttttagaagtgttctcaaaggggctggctggtttaagtcagggctgtttcagatcctatggaaagggcgcctggagctgtcttcctggcccctactcacaccatcctgccccttcagagaaccctgtggggcacggagctgcgctagcagggctgactgccacctgtctaccagtagctctgaggggtgagagccaggctccctgttctccttggcaaagagcttggactgagccctctaggagctgcagccactgtctggggca

SEQ ID NO: 195137 - DNA, 1000 bp, Homo Sapiens
tccatgtgacctgctctttcctgcctctgtcaccaccaaacatcaaagccttaagttttgtttggctgtttgttatctcttgagaattgagcaccagagctattgggtgggcttgatgttgacctacaatgcaggatgtctgtgggcatgactctctcctaggcactcacagacacttgaagctggggactgaggtcctctagtgtgtgtctgtgggggtgaaggagtgcaccctcatcctcctgcactttcgggtcttgtagcagcaactccctgtttctgtcctttctacttactgctggtttcatcacactcccagggttaatttaaagaaccagcctcggtgtgatgcacctacaacaaacagagccacttctgtggggagctctggagctgggatggcccctcagagtctagaggtggtgagagcgctggagcttcatcaccgtgctaactgtgtccctggaagagtgagggagcttgagtgattccttacccaagggccgtcataaaaggtctcagctgatgcctactgccgatcacattcagctatttgggaagagatgttcagtccttaagaggacattattagtggacatcactctttccacaaaagccccagtcttgtgttacttagtcccactagcttctttaaagaaaccccaagagcatttcctccaggaatctgtttgatctcttttcctgggggagatttccaggtgattctcattggaatgaatcctaggtcctgttgctgctgctggtctcacactgtgactgatgctaagtccttctcttccaccaccattctggattttccttgctatagcctaagtgtttatgtctccccaaattgtcagcgttggagcaccaagaagacaggcagcactgacagtagcagaagagtaggaggtggctgtggcaccccacgccgagcaggagcgggaggagttcctgggcgatggggccgcagcctgggccgatgctgaccatgggatga

SEQ ID NO: 195138 - DNA, 1000 bp, Homo Sapiens
accagcctgaccaacatggtgaaaccctgtctttacttaaaaaatataaaattagccgggtgtggtggcgcatgcctataatcccagctacttgggaggctgaggcaggagtattgcttgaacccaggagacggaggttgcagtgagccgaaatcatgccatatagcactccagcctgagcaacaagagcaaaactcctcaaaaaaaaaaaaaaaaaaagaaaaagaaaagaaatgtccaggtctcaacaacctttgactacaaaataaggtgaaatctccactcagtccctgttccccaactaaaaccagcccccaaaggtaacctcagttaagtttactgattaaagatctttttctatacacttaaccaacgtgcagtttttgctttttttaaaaaaaggatcacacagtataaatttttctgtgactttattttttgcttaatattatatcatgaacatctttccttgtcactacacacagatctacctcactatttttaagggcaacatagtatactatatatggatacatattcctatcacttaaaaaaatctaattatcacacgttattgttgttgcttttttctcttaccttacgttgctggactgacaatttcctttgtttcttttttcaactattagtgttttggaagttctacatactatttacattctattaatggtcacgtttcagttctgtttagttatgcaaatgatatataaacattctttttgtaagaaaaaatttaaacaatatagaagaatataggataaaaagtgtaagtgttggtggtcagataagcatacaaaaaagaaaaaataaaattaaaagtgtcttttacctgttaaatttggtgcatcaccttcctcagcatttatgtacatatatacttgtatatatacaaataggaagctttagtattttttaaaatggcataattactgtacatatagctctacaatttgcttttttcgcttaatatatattagagatc

SEQ ID NO: 195139 - DNA, 1000 bp, Homo Sapiens
gtcctcatgcctcagcctcccaagtagctgggattacaggtgcccaccaccatgcccaggtaatttttgtatttttggtagagactgggttttaccctgtaagccaggctggtctcaaactcctgacctccaatgatctgccggcctccgcttcctaaagtactgggatcacaggcgtgagcctccatgcacagccctcaatttggatttttgaaggtacataggtttgctgaagaaattccaagtccagcctgccagtagcatgatggcctctgggattttcctaagaagtaatttatcagatcatgaaaattaatgccaattgattatcagaaatctcctttttttggaatttaagggaaagacgtatgaaataatgttaaatggaaagagtggaccacactattggatatcttctatgtataactaatttgtcatggggccaggtccaaaaacttaatcgagtaagagaaattctgtgatttgggatggagattggggagaatttctaataagaaagttttcaatggaaaacctactgcctaacttttgcgacaacaggcagtacaccttcacatcagttgcctataaaaccaactctgcaacagtgattggtctacctgccccatggctggtggacatgtactttagttggaaagagaaaacccctactcctgcacatctgaatggcatggtgctcttcttgccaggtatcctgggagcagcctgtgtttcatgagttggcagtgagggggagctagagcacacagggaggtgcagacagccagtgggatcaggcttgcagagtttgggtcctgccactgcactccagcctgggcaacctctgcctcccaggttcaagtgattctcctgcctcagcctcccaagtagctgggacttcaggcatgcgccaccatgcccagctaatttttgtatttttagtagagacaggatttcactgtgttggccaggctggtcttgaactcctgacctcatgatc

SEQ ID NO: 195140 - DNA, 1000 bp, Homo Sapiens
ggtgagggggaagataactatctcagcttccttaccccttgggtggaaaaattaaggccatgtcgattccagaagtctgcagccaaactaagacccagttgcccatatcctatatgccgtgtaatatatttcttctcctttctctccctgtcttagttctccactcttttaccagtccagcactggggaagtagcaagcaggtaacttcactaagttccaaaacattaattgtgttttccagtttagaagttctgcatttggcagatactgggtaactgactagccctaaatgaagtgacttttgtatgtgattaccttgtgtcacctatgatttctttttcctcatctaagatctcagagagaggatctcgagctctgaaatcccactgaagccttaactcaaaattatttttgggtttgtaagaataagtaaatgtctctcaagtattgaggcaaaagtaaagaccttaactaaagaggaatggacatcagattgtcctaagctacctctactacattaactgctggatgacaatgtcacaaatctaaagagttctggagcaaaagtctgtgttccaagctaagataatagaaatatagtatcagatatgcaagagtttagaaagacgatcttttactgagaaagttcaattggaaaaacaaaacacatcgatcaaataagaggagaatcaaaagtaacaacttaggaataaagaagtaatgtaagagtaatgtttgagtgtcttctattcagatcagactatgatgtaagactcatggaactaggaagattagcaacagttccacacataaaccataaattgtgtcaaagaaatagtactagcaatgcactgatttagaagttgaaataatttgggatcataatgaaggctatgaagcttgatcaaagatttgaaagaaaagatgtgtatttgtatggataggaaaaaaaataaaataagagcacttttgaagttggaaaatgcctgagcaaagatc

SEQ ID NO: 195141 - DNA, 1000 bp, Homo Sapiens
cgggagttggaggttgcagtgagctgagatcacgccactgcactccagcctagcgacagagcaagactccatttaaaaaaaaaaaaaaaaaaaaaaagaagcaccttcaggctggagaagcagcgtagctaacacaagtccagtccttgtgatgtggctggtagttggggatggccaggctgaagcagagagtcctagagaaatctcgatacaagcttcaaagcaacacctagacactgctctagcggttgatcctggagataaaccaacaagagagagatggaagagaaatactaaatgaggtcaaagaagactcagaaaggttctgagcctggagatgagcagggaggcctcagggcttagacctttaatgataggggtttccctgcattggtttgacctgttgcctttttgatgtgctctgtttgttttcatgtgttgtcttgtctcccctgctaaactgggagctgccaggggtctgggtcttatctccttcctccatggtaccccacacaggccaggatgtggtttggtacccagcaatcagagattggcactccctcatacaggggaaagcaacctggtctagcaaattgaaaataaagatgataaaactctgaagtgaatgtccacaatttttgtaacactgctgcaagcacagggagggcaaaaataggagagagaaccagattcagcagcaaaggggaaaagtgatgcatctgaaaccacagaaacatcttaagataaagaggtggtgtgggcaaaggaagtgagagcactgacggaatcgtctttcgagggatgaatagagagtccggacttagaaaggatgcagggtgattccgattcacagtcatctgtctgccacagggccttaaaacatgtcaccctcctgctcagaaacctgcagagctttcctatcatcaaaatgtttccttggccagttgcaggggctcatgactgtaatcccagcactttgggaggctgaggtgggaggatc

SEQ ID NO: 195142 - DNA, 1000 bp, Homo Sapiens
tgttttggtaccagtaccatgctgttttggttactgtaggcttgtagtaagtatagtttgaagtcaggtagcttgatgcctccagctttgttcttttggtttaggattgacttggcaatgcgagctcttttttggttccatgtgaactttacagtagttttttccaattctgtgaagaaagtcattggtagcttgatggggatggcattgaatctacaaattaccttgggcactatggccattttcacgacattgattcttcctacccatgagcatggaatgttcttccatttgtttgtatccttttttatttcattgagcagtggtttgtagttctcctcgaagaggtccttcacatccgttgtaagttggattcctaggtatttcattccctttgaagcaattgtgaatgggagttcactcatgatttggctctctgtctgttattggtgtataagaatgcctgtgatttttgctcattgatttcatatcccgagactttgctgaagttgcctatcagcttaaggagattttgggctgagatgatggggttttctagatatacaatcatgtcgtctgcaaacaggcacaatttgacttcctcttttcctaattgaataccctttatttccttctcctgcctgattgccctggccactatgttgaataggagtggtgagagagggcatccctgtcttgtgccagttttcaaagggaatgcttccagtttttgccccttcagtatgatattggctgtgggtttgtcacagacagctcctattatttggagatatgtcccatcagtacctaatttattgagaatttttagcatgaagcgttgtggaattttgtcaaaggccttttctgcacctgttgagataatcatgtggtttttgtctttggttctgtttatatgctggattacatttattgatttggatatgttgaaccagacttgcatcccagggataaagcccacttgatcatggtggataagctt

SEQ ID NO: 195143 - DNA, 1000 bp, Homo Sapiens
gtggaactgcctttacaaaactatagcttaacattatgcatttggattttcctgagggcccacataatagataccatatgtaaaatatcagtacttttcttaggtaaaactcttgttaggtatattatccattgtgtcatacaagttcccttaagcaaagacttaggcaacaattttttcttagagttctgaaatttaaaaaacaagttttctctctttataggctagtctacttccttttgtgagcagctgaaggtcctctaggccatgatttgtccatctttgccttgtcttgtaggaacttcagggttaaatccttgcttatctttaacagtttctcttcatctgcatcaggagtcataatctggggtgcaaatgatgcctactgatgaattgtgtacagctggctttgtgtttaaaaaaactgcactcatgtgtcacataatattttggttaacaatggaccacatataagacagtggttttataaggttataatagcatatttttactgtaccttttctatatttggatacatttagatacacaaatatttaccatactgttacagtcgcctacagtattcagtacagtaaaatagtatacaggattgtagtctatgagctatgctattcccatcaaactaccattgacgttcttcacataattagaaaaaaactgctttaaacttcatatggagccaaaaagatcccacacagctaagacagtcctaagcaaaaaagacaaagcaggaggcatcacgctacctgactttaaatgatgctacaaggctacagtaatgaaaacagcatggtgctggtaccaaaacagacatatagactcatggagcagaacagagacctcagaaataagaccacacatctacaaccatctgatctttgacaaacctgacaaaaaaaagcaatgaggaaaggattccctatttaataaatggtgctggaaaactggctagccatctgcagaaaactgaaactggacc

SEQ ID NO: 195144 - DNA, 1000 bp, Homo Sapiens
aaaagcaaacggtaaatatactttcttactaatgttagtaaatatattttttcaacgtgtgaaatttctttgtagttgctaaatgatattatttttattaagtgatgtagacagtttaaatttatatgtagttttaacattttgaaattctgttcttaaacgatatttctaaaatgttacagctaagtagttaaagtaatataacagtggagaataatagtttacattatatgtgttttttcttttttaaatttaaattcttcaaaaccattttacatattaactaatgctacagtttttaaactgtcttcttatacagaggcagagtggagagagctggaagagagaagggaaagccaaataggcctccatgcccctatgttttgcttcaatcttggcagctctactttgatttatgtatatattgagattttgagtaaatatttctttgcaaaagtcttcttatgtcaaacacaatttaaaagcactaatataatgtattttctagacaagctttgaagcagttattatcaacctgttttacatataaggaacctaaatacccaaaagcttgttattttctaatttcacatggttagttactaataatgttcaaagtgaggccacagtcacttatcttaatgctttcttcaccctcaagatcatatcattaaaataaaatcttccttttttggaaaataatgttttatttttaaaaatgtatttaacttgactctttcaaccaaatattatgtgtcaaaaatatttttccattggcttccaatataacatcaaataatttttcaggaatgagttgaggtctagcctctattaaagtccagtagtgtctttggacagcctctgtagtttaatttctctatacaaacccagcatattaatcgaataaactatcaataaacttttaacacataattttaaatatgcatatgttaaaatatattttatgtttaaactctaatccattagggggtttaagctt

SEQ ID NO: 195145 - DNA, 1000 bp, Homo Sapiens
attattaaataaataataaatggtagtggtctctgcagaaagaatcaatggaaaaatcagatacagcttagtatttttttttctcttcttgtatacttataatcatagcctcttagagttgaaagggacctgaagcaaattgcctttaatagcaaccctgagtggaggtcacctagactcatcttgaatactttcagtgatggggcactcacatatttataaacatcaaagcccatttgattattggatgactcagaacttttccttgtactgtaaaaatctgcctccctttggtttccacttattcctattctatattgagggtacaccaagcagccctccttcctcttgcaaattcttaggacagctcactcattcatggccacctctaaccaactacctgctttttcctccaggtagaatatcttacatttccttaagtcttctgtgcatgacatgatttctacacccattatcacccatattgctgccttggatgttccttagtttatgggcctacactacttgttattttcttctactccctagccaatctctgagtaaaagtagttgccaaaactctgagtagagtgtgacttagtaaaatttaaaataagaatatatttacattaaacaattattgctcttttatgttttctgtttttctgttaaacatttttagagcatatttgtaaaaatatgtcattagtccagtattcttcattaaactaactgtaatagcacttggtgggagttttgaatcagtagagattcccagcctccagtctatatattcacctggccgcaccaccagaaatccaaaatcttgagtattagcaggaggtatctgtatttttcacaaagcccccagcatattctgaggatggagattgatggcattctcccgtctccttccagggacactgcttggaaagctgaaccttcgagcagccacttgcagctgcatggtgtgccatcacagctgttcaggtggaagctt

SEQ ID NO: 195146 - DNA, 1000 bp, Homo Sapiens
tgataataggtaagagcagcctgtggctgggcacagtggctcacacctataatcccagcactttgggaaactgaggtgggtggatcacctgaggtctggagtttgagaccagcgtggccaacatggtgaaaccccgtctctactaaaaatataaataattaaccaagcgtggtggtgtgtgcctgtagtcccagctactcgggaggctgaagcgggagaacagcatgtacccaggtggcagaggttgcagtgagccgagatcatgccactgtactccagtctgggcgacacagcccgaatctgtcaagaaaaaaaagaaagaaagaaagaaagaaggaaagaaggaaggaaggaaggaaagaaagaaaggaaaagaaagaaagaaagaaagaaagaaagaaagaaagaaagaaagaaagaaagaaagaaagagaaaaagaaagagcagcctgcaaaatctaacttacagaatgagtaaaacaatgttaaaactatgctggaaaaatactaaaacatttgctaacagtagatacttagggtcactgttcttcattatttttatataattttttctattttccaaatgttattgtgattattttgactccagatatgaacaggccaaagccaatttattcacgtgtaatcaccggctttttaaaatttttgattggtatcaatagctataaatacaacttacccttgaacaccccaggcttaaactgtgcagatccacttatacgtggattttcttctgcctctgccacccctgagacaggaagaccaacccctcttttcctcctcctcagcctgctcagtgtgaagacaagaggatgaagacttatgatgatccactttcacttaatgaatggtaaatatattttctcttccttattattttcttaataacatttttcttttctctaacttatgagactatagtatataatacatatacaaaatgtatgttaatcaactgtgtatgttattggcaaagctt

SEQ ID NO: 195147 - DNA, 1000 bp, Homo Sapiens
caataaccaagtttacccagctagtcaacagacgagccagacagatagagaggggctaacctctctatcttgtctcttttggatttgtgttaaaacaaagacaaggttttctcactttcttgaccctgagactacgtttttgggctttccgttttgcaggagaagcaatgttttatatgggccaatgtggggagatggataagctgggactttggtactctggatgatccagaaaggcagagcaaatcattgaggatcaaactccagagcaaattattgaggaccaaatcccataaggggtcaggaccagctcagccagttcaactgcagaggcgttgcaaagggtagaattaggagactcagttggatgggcaggtagtattccagtggacatcggggaagatcaccaggacgtcagcaattgggcaggctttagggtgagctcttgttttgttagagtagggccaggcagaatagagacttggattttgatcaggactgagacagagtgtgcaaatagaaacttagaccagggaaccaacgtaagggagacagagaagagtaagtaggagacctgaacttttccctctatacttgatctcatataaaaatggcggtgaaggaatctacccatgtaacaaacttgtacatgcatcatgtgactctaaaatgaaagttgaagttactttaaaaaattgcagtggaggagatcatgggacatcgggccagacagaggcaacccagcggcccggcagtcaagatagtagggccgccaggtctgagagcagggctacaggccaactccccagcatgtaggggtggagaggggccagtcacagccacgactggcaggctgagactgagacctaaggtgaaagggactggcggagccaactaaggaaaggtaggggattgaggggctaggagccagaacctataaacttgagcttgtagcagtggcaacaaattctatttcccagctggagggaatggatgatcc

SEQ ID NO: 195148 - DNA, 1000 bp, Homo Sapiens
aaacggcaaaggtccttaatgaacatgtatcctgtttttaaactaaagccatgactataaccttctgatacatttcacatatgaagtaccttttggtaggactgtgcaataaaggtgagggtaacatcctctaaaaggacatcagaggtcgggcatggttgctcacacctgtaattccagtagtttgggaggccgaggcgagtggatcatctgaagtcaggagttcgagaccagcctgaccaacatggtgaaatgccatctctactaaaaatacaaaattagccgggcatggtggtgcatgcctgtaatcccagctactcgggaggctgaggcaggagaattgcttgatcccgggaagcggaggttgcagtgaggagagatcatgccactgcactccaacctgggaaacaccaatgaaattctgtctcaaaaaaacaaaaacaaaaacacgacattagaaaatgtcccatctgaaacaatgaggcatcaagaactaactggcatagaacaaagaggaaataaataggccgagcgtgctggcttacacctgtaatcccagcactttgggaggctaagcaggtggatcacctgaggtcaggagtttgagaccagcttgaccaacatggtgaaacccatctctactaaaaatacaaaaaaattagccaggtgtggtggcacatgcctctagtcccagcttctccggaggctgaggaggagaatcgcttgaacttgcgggcggagatcgcgccaccgcactctaccctgggcgacatagtgagactccgtctcaaaataaaagaaaaaagagcaaataactaaaagagtataattggattgtttgtaacacaaagaataagtgcttgagggaatggatacccccattctccatgatgtgattatacactgcacgactatatcaaaatatctaatgcatcccataaatatatacacctacgtatccagaaaaattttaaaaaaattttaaaaaggagcaaagctt

SEQ ID NO: 195149 - DNA, 1000 bp, Homo Sapiens
tggatgttcctgagcacgcctgagcctcagtttctccagctgcaaaataaagataaaccacctacctaataatacgtactgaataaaactattttgccaggagttcagacctctcaacaattaggccctcaactatcaccttaacttgatctcctcctcattccttccagacgtactgttttctcagcctccaggcctcaacctagaatgccatacaccttacttcagtataataacaagatattccctgaccttccaggctcttcaatgccacctctttttttttttcctctttcaagtcaagggttaattctctctgctctaaaattcccaagcacattttatgtccatagtgcatgagctttatcatgtgtcgcctagtgtaataattgtaaacagatttgctctccctgaatggcctgtcgtctctttttcttgttttgttttgagacacggtctcaccctgttgcccaggctggagacagtggtgcgatcttggctcactgcaacctctgccctccaggctcaagcgattctcctgcctcagcctcccaagtagctgggattacaggcacacaccactactgccggctaatttttgtatttttagtagagacgaggtttcatcatgttggccaggctggtcttgaactcttgacctcaaatgatccatccacttcggcctcccaaagtgctgggattacaggtctgagccaccgcgcccagcccagcctgtagtctctttaagtgcattcctgttgcccatacaatgcttggcacagtgggccgcatgtaaaagatgaccagaaaatactgacaggaggaagaaactgcaggttataatttaactattataagggtctgagggattgtcaggaggagacttgcccgtgccctttttctgtgggttccatgagcagctgccatccttcccaggccttgacactccctaagatggatggatcatgtgtggacagatgtgaacgtgggcgacaagctt

SEQ ID NO: 195150 - DNA, 1000 bp, Homo Sapiens
atggttatcattgttgctgtttgacttggacttagaaaacttttcttctgagcatgcacccccagtttggcctggtccccactacctattgtacaacactgtggtttatttgatagtttatataacattacgcctcctgaggatgtcggagtttgcgagtcttgttttagggaggagaaataccaagtgacagattccgcaagcctgggaaggtagcttgggtttttccataaacattctggggccttggctaagtcatactcctctggggcccccatttcctcctttaacaagaagcggtgaattaaatatctcctgcacctgccagctctgaaatcgtaaatcctaggtatggtttataagaaaatcttattcccatattacaaaatccgtggattggccggcagtggctcacgcctgttatcccagcattttgggaggccaaggtgggcggatcacctgaggtcaggagtttgagaccagcctggccaacatggtgaaaccccgtctctattaaaaatacaaaaattaaccaggcatggtggcgcatgcctgtaatcccagctactcaggaggctgagacaggagaatcacttgaacccgggaggtggaggttgcagtgagccgagatggcaccactgcactccagcctgggcaacagagcaagactccatctcaaacagaacaaaacaacaacaacaacaaatccatcgatgggagtagacgatacataatagtttgtggagctctggctcatatcagtacttttttttttttttttaagagatggggtctcactacattgcccaggctataatgcagtggctattcacaggtgcaattatagtgcactacagcctcaaacacctggccccaagccatccccctcaagtagctcaggatacaggcacacaccaccgcatccagctattgctctaggtcttttgcaagttcagtatttagggcctcaaacaccttcccccatcccagatctaagctt

SEQ ID NO: 195151 - DNA, 1000 bp, Homo Sapiens
aatatttttacaataaagctccaataaaaaataaacctcttagcaccctaagacatggtgagaaaaaaaaaaagataaacctcactgtttatcaaagaaatgctagataatgcatcaaggccatatcatcaagctaacaaagattataaaagttaatgagttttggggaggaggacataggcttatcacaataataaaaaccactaacaaaccctttttgagcagctacaatgtattattctaagtacgttttatgtattaactcattccaccttcctaaaggtcctatgagtgttactcttaatcccacactgaagaaaaagcacacagggattatgtaatttggccaaagtcacaaagtacataaatagccaaaccaggaaatgtaaattaacacagtcctttcaatggcaatttggcaatagtcatcaacaaccttaaaatgtgctactcttgacttggaaatctcagtgctaagaatccactttaaaaaaacaggtttggacactatcttgatgcccaataacagatttactattctgaactgaacacaggcattcctctccactccttccccaaataccactaaaatgaaacttacaggatgaaaaagatataacgcggccgggcgcggtggctcacgcctgtaatcccaacacttggggaggctggggcgggtggatcacctaagtcaggagaccaggccggccaacatggtgaaatcccgtctctactaaaaatacaaaattagccgggtgtggtagctcacgcctgtaatcccagctactcaggaagcagaggcatgagaattgcttgaacccaggaggtggagcttgctgtgagccaaaattgagccactgcactccagcctgggtgacagagtgagactccgtctcaacaaaaacaaaaacaaaaaaaagaagatgaagactgaatgcctatggccagccatgccaatgaaaagtgagccaacatgaactctagaatactgggaaagctt

SEQ ID NO: 195152 - DNA, 1000 bp, Homo Sapiens
atcccagctacttgggaggctgaggtgggagaatctcttgaacccgggcaacagagcttgcagtgagccgagatggtgccactgcactccagcctgggcaacagagtgagactgtctcaaaaagcaaacaaacaaaaaacccatagagactattttgggtcttcatgactacctgacatctgacatgtcagtttgaggaatttagtatatttaatgatgcatttgattcactattagtgatttgtatgttttaaagagtaatttagatagctttttcccctctatcttccccagtaaatattgaagcaaataagaattatatataccagctgtcttgctttttatccactgtttatatcctgtttatcaagtgacccacccagttttatttggcactagctttttatatatttaaactgtctctgaggtcgctttgcattttcttttttttgagatggagttctgcttttgtcgctcaggctggagtgcaatcttgactccctgcaacctctgactcccaggttcaagcgattctcctgcctcagcctccgaagcagctgtgagtgcaggcatgcgccactacgcctggctaatttttgtaagttctttttttttttttttttagtagagatagaatttcaccatgttggccaggctggtcttgaactcctaacttcaaatgatctgcctcccctcggcctcccaaagtgctgggattacaggcgtgagctactgcgcccggcttgcataattttcttggaagctttttttttttttgagagagagtcttgctctgttgcccaggctggagtacagttgtgggatcttggctcccagcaccctccacctccgggttcaagtgattctctttcctcagcctcccgagtagctgggactacaggcgtgtgccaccacactgggtaatttttgtctttttagtagagtcaaggtttcaccatattggccaggctggtctcaaactcctgacctcaggtgatcc

SEQ ID NO: 195153 - DNA, 1000 bp, Homo Sapiens
tgcatgggatttttgaaagaaatagaaggcaatgaatggggtgatcttgggtcttcgccaatgttcattggttgagtcatggaagagttttacaaagatttactgtactgtcaattccaattcaagattttcttgaaacaaagggaatgcttgccaaatatttaataatcaaagataaacatggcagtgtgacttaagttttctcagcaatatcatagtgtatatgaaatgagataaattccaagctctaaagaaagaaaaacctgtgacctagctggaaaagtataagaatttacattgaaatgaaaacatttcataatacaaatcaatagtaatgattctgcatatttttaacatgaatcaatatgcaaaatatatattttttaagacagggttttgctctgttgcccaggctgaagtgcagtggcattatcttggctcacggcaacctctgcctcccagactcaagtgatcctcccacctcagcccctcaagtagctgggactacagatgcacgcaccatcatggcctgctaattttttttttttttttttttttttttttttttgtagatacagggtcttgtcatgtttcccaggttggtctcgaactcctgagctcaagtgatcttccccacctcggcctcccaaagtgctgggattacaggcatgagccaccgcgcctggctgcaaaatatttttaatggtaatcaccagtattatgtaaattatctgcaaaacttacaagaaaaatttgaagaatattgttgatattgacaaactttagagttacttttcaatttatacagcatccttttacattccatgttaatactgagttgacatgaggattggtgaattgctataactcggacagaagtaggtttttgttttttgttttttgttttttttttgagacagggtctcactctgttgcccaggctggagtgcagtggcgtgatcttggctcactgcaacctctgcctcccaggctcaagctt

SEQ ID NO: 195154 - DNA, 1000 bp, Homo Sapiens
taaaaatacagaaattagccaggtgtggtggcgctcacctgtagtcccagctacttgggaggctgaggcaggagaatcgcttgaacctgggaggcagagatcgtgccactgcactccagcctgggtgacagagtgagactccatctcaaagaaaaaaagaagctgcctgtagaccatacaagggaacttattataggcatggtaactggaaggtgattcattaaccagctaaactcaagctggccagaatgggtcagttcaggcagcacccctccaggtaacatcgccacctgttaatgagcctgctacttcaggcctggggttgcaatgactctggaattaatggggttctggggaatggagcagtcattgtcagggaggtaagccgggtcagtgcctcttgaaagacctctcctccagcccgggggctggctgacctcagaccctctccacttgctctggcagcatcctgaaagccatgaagctggcctccagcacctgcagcctcccccaggtaagtgtccctgccaccatccctgcagggcaggctgccccagtgagccttccgcccaccaggtgccctctcaacctgcctcttgtctcctagggcatggccaagcctgaagactcactgcttattgcaaaggaggccttcttccccacgcagaaattccttctggagaagcccagcctcctggccagccctggtaggggaggaggatactctggggctgagggctggggcgggggctgcctgtgggtctctggccttctcatgcccaaggaccactgccttccatgcaggcaggagaacgacagaacaacaggtgtgcattgatttggcacctgctgtatgcctgtcctgcagggcatccacaaacacccacgtcatcgttggggtcacacagctggtttgggcccttccaaggccccctaaagagctccactccccactgagccttcttgagctgcagcggctttcatgaagtggtcacagggg

SEQ ID NO: 195155 - DNA, 1000 bp, Homo Sapiens
gggagaaacatgaaggatttagtcaatatcagcagctgtcctctggggtgcctgccattaggttcgtgggcaaaggccctgccactctttgctgcagctgggaaaacagagtctgtgtctcagtttccctgctgggatgaatagtcactcttatgctgggtcagactgaggcttcaggatggatgggccagccctagaggagcacctagacctggtcatataataaacaggtaacataagagtcacagaaaggggctgggctcatgcctgtcatcccagcactttgagaggccgaggctggaggatcgcttgagctcaggagttcgagaccagcctgggcaacatagtgagacctcgtctctaacgagggctgccctgagctgctgcccccaccccagtctgggccctcttcttcctaggtctggaggcctctcttctaaagaactgggctgggtgcagtggctcatgcctgtaatcctagcactttgagaggctgaggcaggcagatcacctgaggtcaggagtttgggaccagcctggtcaaaacatggtgaaaccccgtctctactgaaaatacaaaaattagccggacgtgatggtgcacacctgtaatcccagctactcgggaggctgaggcaggagaattgcttgaactcaggaggcagaggttgcagtgaactgagatcaggtgactgtactccagcctgggtgacagaaggagactctgtctcaaaaacaaaaacaaaaaagggtgggggggagggaggaaggaaggaaggaacagacttgagatgtccttgcagggcaggcagaggccaccccaaggtgtctgactaggaaagcaactttcctttggggctgaaaaatggtgtgggagaatgagcttcccaccttaaaggggaaaccaagcgggagcctgaacagctcattcagcactaagaaaactgcatttgcagaatggcttttatggctcaggctctggtctctgcctagttagatc

SEQ ID NO: 195156 - DNA, 1000 bp, Homo Sapiens
ctcactgtgctaagtgttcaatacactttgtctcatttaatcctcactacaatcccttgcggaaactgtgttgttatctttgttttacagatgaggagggtgactgcagagggagatacatggtttgcccaaggttacatagctagacataaatgacaagcaagagtgtggcaccctcacttttaattccagggacgcgttcctcttctagtaggagtgggatgaaggtgtggggaagggaggcggttgtttgtgagacattctatgacagcagtattgttacagtttctacttaacaactagggcaataagcaagtaacaaaggaaaagacccagaaatagattgggaaaaaaatgttgaagagcactcaggcttttgaaatagtctgaagtcgtataaatccaccacagtcacctgtttaataaacccacacagttccctataacaagtactgcccttcataatgtgcaggtagtactgtggatatttactgtgaatgaattttccttgtacatctgcactatccttccccttgtgtcttttgatcaagtgaaggttgctcaagttgacatgtttttctgagactgcgaaacaggttgctgcatgctcttccccatggggctagaaccctttatcttggtatcatgagttgtattatttattgctaactctgggtcttaggggctaatccctatcatcctaacagggattttctaatacctaataataccctcttggtgtaagactggaagttaaactaatatcggctgtagtgagaataataggctcagtagctaccaactctgaagcacttactagagaccggaccctgtgccaagtgctttccatgcattgtctccttgaatcctctcaacgatgccatgttggccaggtgcagtgcctcatgcctttaatcccagcactttgggagagaccaaggtgggcggaacacttgagggcagtggtttgagaccagcctggccaacatggtaaaagctt

SEQ ID NO: 195157 - DNA, 1000 bp, Homo Sapiens
aaaaaaagagaaagattagaagggtaaaggggaagtagaagagttagatataaggcagcaactagaggaataggagggggaggatattgcttaagtttgccaaattgttcaatggctttattcaaggaaatttttactgaaacaattttttattcagaaccttggagattgtacaaatacgattcattccaataaaaaactactgcttactgggcctgagaaattttgttttctttcttttctaatgcatctcttaaattaacagtttttgttttcttttcaactgaaatgttcctcctagtagccactgaaggcaaaaattatccgggtgaagttatgccacttagaaacctaaacactagaattgtgattgtaatcagagtacatataacatgcaggagactttcctggaaaggagacgatttcaatttagacgatccaataagtgctggcactgtctgagaggagtgtaatgattatgtaccttaggcctggttctacagcatgataggtggctacttccccacaagaacacgacaatcttcacacctcagcatgcagaaaatctgagaatactctttctgaatgaatgcctaattctctggacaaaaaagaaaaaaaaaaaagaaaaagaagataagagaatcttatcccattttatcagtgacccaaagcaaagtctgtccaaatggtcaccagtctgttgagaatcagaaaacccttggtctgtgatattagctgaaacaagtcactagagcctatgcttgagttttttttgtttttgtttttttaacggagtttcactcttgttgcccaggctgaagtgcaatggcgtgatcttggctcactgcaacctctgcctcctggattcaagcaattctcctgcctcagcatcccgagtagctgggattataggcgcatgcctggccaattttgtattttttagtaaagatggagtttttagtaaagatggggtttctccatgctggtcaggctgatc

SEQ ID NO: 195158 - DNA, 1000 bp, Homo Sapiens
taccattttaacaaagggggtaagttgtggagaagtgactagacaaaggaaaagagggttggctttctagaggcagcaaattgtgggaaggtgactaggcaatggatggtagataaagattgtttagtaaggtttgttatgtagactcaagtgatctccagggtcattcacctcttcctggtacaggagaggggaccacctttacaatggaaatttatgttacatttacaaagggaaatttatgctctgcttttaggcaaatgtggagtcctaattagggaaaatgagtcaggctgctgggaccaagggaaagcaaaaagagaaagctgattagctataagtctgcctttcttcatggtccaggacacagagccttcctgcacaaaaagctcacaatcttcatgcacccagcactcaccagacacacctgcaagttagctcacttcaaccctggcattatcagtgctgcccgtagcactcttcagcataagcaccattctataacatccccagcaagcctttgtttccttgcagacagccccttctctgctgtgctgcccattgcaaccttgcaacatactttcatagtttctctaataaatctgcctttctttacctacaacttcttggtaaattcttcttatctctgcaccactggccccagatagttgccgatcacccatgacagcaatagggggaggacagagagctcttcatttgtctgccatttatttttattttttatagagatgaggtctcactatgttgctcaggctgttctcaaacttccagcctcaagcgattctcttgcctcggcctcacgaagtgctgggattacaggtgtgagccactgcacctggcctggtatttcttaattgtctttaactcaaaacagtcctgatgccaaagtggcgtattttgggatatcatattctgatccctcttaggggcatccatgaacagattctgatgcctactgggaccccaagttaggaagctt

SEQ ID NO: 195159 - DNA, 1000 bp, Homo Sapiens
gaaacaggaggattacatgagctcgagtttgagtaaggcctgggcgacatagtctctttaaaaaaattcagttcatgcgggtgcggtggctcacgcctgtaatcccagcactttgggaggctgaggcaggcgggttgcctgagctcaggagttcgagaccaccctgggcaagacggtgaaaccctgtctctactaaaatacagaaaattagccggacgagccggcatgtgcctgtagacccagctactcaggaggctgaggcaggagacttgcttgaacccgggaggcggaggttgcagtgagccgagatgtgctactgcactccagcctgggcgacagagtgagactcatctcaaataaataagataataaaatccagttcagtaaaatgtgcctgataaaatataagtgactactggcctggagcagtggctcacgcctgtaatcctagcactttgagaggccaaggcaggtggatcacctgaggtccggagtttgagaccagccgagtcaacatggtgaaaccctgtctttactaaaaaatacaaaaattaactgggtgtggtggcacattcctgtaatcctggctacttgggaggctgaggcaggagaattgcttgaaccctccgggcggaggttgcagtgagctgagatcacaccactgcactccagcctgggcgacagggcaagacaccgtctcaacaaaacatatatataagtaatgaatgaatattatgtcaatattctaagtcagaatgttactgtaatactttttaattctcattccatttaaaataactggttaattttcaaatcataatgaaatttttacaaatttatgtgtagtacaaagcatgcatatacattcatatgtattatatgtatatatagcctttaaaaatatttatgagctttatgccgggcgcggtggctcacgcctgtaatcctagcactttgggaggcggaggcgggcggatcacgaggtcaggagatcaagatc

SEQ ID NO: 195160 - DNA, 1000 bp, Homo Sapiens
ctattaggctggtctggaactcccgacctcaggtgatccacgtgcctttgtctcccaaagtgctgggattacaggcatgagtgacggtgcccagccattcgtgacatgtttatacaaatataactttagcaaatatttagcataactatcaaaattacaaatcatattaaatttgtataaatgtatgcaatttttggaacacgcatatcaacaacatacccataaatataactgagatgagatctaatgtcacctcacttgacagtgccctcccatgcagtatcgccacatttgacaatgcctgcccatttaatctaccaaataaatcgaatcacttaatacctctacaagatgagagatacattctttagactccccaagggatgcagctgaaaaaaatcccaaagttagttttaagccaaaaagacttgatttaggattttgacactggagaaacccatcaaagatgtcaagtttgaaaacacttgatcaaaacagaatcacaggtcactattaaaagagtattaatttaaccagagacttccaaagcaatacagaaacttacatggatataaaaaccctaacccttttaaaggtcagatttgctaagtgatcaaaaggggtacttgaattgaatcgacacaggaagagtgtgtacagggttatgagtgtaggcaggtggttactttggtcatatctccatttgccacctgattacacatgagaatggcatctttactcaccagaaagccagtattataggaggtgtaggaggcattcttggacttgagacaagaacattgttgtgtagaaatttcattgactgtgttaaaattattctccatgggctggagaacacataacatggcctttagaatgagacgggcattgattggatgcaaggtctccacacttactagctgtgtgacattggacagagtgcttcatcattccgagactcagtttttaaaggaaaaacaactaactaccttgcaagctt

SEQ ID NO: 195161 - DNA, 1000 bp, Homo Sapiens
tagtttcaattgattctttgaaaagtgggaaaaagagtgatgccagaagggttacaggagcagttaacaaactactgtccatgggccacatctggcccactgtctgtttttgtaaataaagttttattgaaacaagaccacacccatttgcttataaattttccatgcctgctttcatgctacagcagcacacttggggcattgtgcaaacaccacaggacccataaagcctaaaatatttgctatctgaccctttacagaaatattagtagacttctgggctaaaatattttgaagaataagcctaaagttggtatacactggttttaaaaccaagtgagtcagttagattgtccccctctcttcctggacatccttcctgaaagccactgggcatacacttttctcaggagaaaaataataaactgttgtataattttaatatgttacaggcagggttctaagtgctttacctattttagttcatttaattttcacagcaatcctatagttactattattatctatctcgtttttacatataaggaagttgacttgcacaaaatcgtaactggtaagtagtagaggaaggaatcacgcttggaagtggaaattcagggtctgtgttcctacctgccacataacactgcctcctaagagaaatgagagaaggaaccaacgagaacaatctccatttatttgaaagcgaagtaaatacagatagtctggagtggacattgtatgtcatcccagctcacaatcaccctctgtagttgctgccttaatccacaaaggtagtcttctagtagcactgtgtaatcaacattactcagcccaagctacttgaaacccaccaaggctggaccaatcagagtcttttccctcccaggagttaaaaggaagagaaaacgagtctctacatggggctgggcttgagacgtatatttgtaaaagctatttagggttggcagaaaaaaatattgaattctcatttaagctt

SEQ ID NO: 195162 - DNA, 1000 bp, Homo Sapiens
ataattaaaaataggtaacacttccatagcacttattgtgtgccaagagctattctaagctcattacatatattaaatcattaatcctcatgaggtaaatattgttattattgccatttcacagatgagaaaactgaggcacagagaagtaaagggactcgccatgagtttcacagtcaatacatggcaaagcggcaatttcaacccaagctgtctggcttcagagtctttgcttttaacaattacattatgctttctggtctgtagagcaagaggcaaaggactaactatcctgtattatgcacgttggttcagatggcatataacatatagcccagatagcagggtgattatcaaaagaacacatactaggctaccaactacatgttataatttgagaagagctggacaggatctcctgcccaaaaatctctctcgcctcctgcaaaaataccccaaatttccaccattagaaagtgtcacttctcagccaggcgcggtggctcacgcctgtaatcccagcactttgggaggccgaggtgggtggttcacctgaggtcaggagtgcgagaccagcctgaccaacatggtgaaaccctgtctctattaaaaatacaaaaattaaccaggcgtggtgttgggcgcctgtaatcccagctactccagaggctgagacaggagaattgcttgaacccaggaagaggaggttgcagtgagccgagatcgtgccactacactccagtctgggtgacagagcaagtctctgtctcaaagaaaaaaaaaaaaaaaaggaagtcacttttctatatcttagagtcttttccattttcaaaaatcccctatgaaaaggtgtcactgagaaaggtaatctcttaaataattatcaggcatctacagtgtgatttttaaaacagtaaattgggcttccagttagaagaggggttctaattctgactctgtcaattattacctatgtgaccttgggcaaaacaagtggatc

SEQ ID NO: 195163 - DNA, 1000 bp, Homo Sapiens; identical to SEQ ID NO: 114845

SEQ ID NO: 195164 - DNA, 1000 bp, Homo Sapiens
caatctccaagccttgactccttggccagggccttagaactgataacccagtactttaacaactggaactgggtctatgacaacgtaatagatcaagatgaaaatgaattgagtaagttaaagggaggcacatattcctatagtggcaaatgggggcaacaagtaaaaatccttccactgtgtttccaaaatccacctacaaaggagaaagaaagagatatacaagtagttaaagaaaaagcagtgtgccctattcctttaaaaccagggtaaatttaaaacctataattgataattgaaggtattctccatgaccctataacactcaatactgccttgttgtcagtgtaaacaagggcgtaatctgaaagcacttcactttgagagttctgctcatggccccagggtcaaccaacttgttgtcaaaccctggagctaatggctttcctctctgttgacccttggctcagcccagaagtacaggaaaagtggaagctggttccaggcaaaccaatgttcccaactctgaagagttgggggttgttagagagcccttttccagaaagcctgacacccatgtctttagtctggcagccgccctagttgcttttaactcgctggcaggtgcctggtatttagccccgaattctaaggaaaaataggaaggaatagcaagtgaaatgggtccgatggtgctcaccacttggcgataggtgatagtccctttgtggttgccaaactgtgtctggaatttattccttccagtgggttcttggtctcgctgacttcaagaatgaagccgtggacccttgcagtgggtgttacagctcttaaaagtggtgtgtccagagtttgttcctcccagtgggttcatggtctcactgacttcaggaatgaagctgcagaccctcgtggtgagtgttacagctcataaaggtagtgcagacccaaagagtgagcagctgtaagatttattgtgaagagtgaaagcccaaagctt

SEQ ID NO: 195165 - DNA, 1000 bp, Homo Sapiens
tgaaattagttacaattaagttaaactcagttctttaaccgcagtaactacatttaaaatcttcagtggtggcatgtggcttgagactactatgttggacgacaaaatacagtatatttccatcatcaccaaaatttccttgctggacagcatttgtctgtagccacctaagaaagaattatggtatagcaaggaggaggtttgagatggaagttaagagatgactctattctaatttgggcccttaaaagttctgtgaccatatatctgaaccactctaggcctcagtgcacacatcagtactgcagtgacttctgtatacttttgtatatttatattgcaatgctaacatgaagatcggatatactagtatcattttatggtttagagagtggactttggagtcagactgccagatttaaaataccagttacttctaaattaatgtctgggccttgattttctgatctgaaaaactggagcaataaaatacctcctttgcatgattgagtgttaaatagtttcatacatgtgaagtgcatagaacaattcctggcccatggaaaatagtgttttaactattatgtatatcatccattgaagagtataaggtgctatcaaaagcttttgttacaaatgctgttttcagtttgccgttactttctgggtctttgaacctccttgtaacatgttatataggaatgtaaatgtgccacatggtagcttcttaatgcttagttgtcctgcataaattaatcccctttagaaagtaaattacttacaatttagaatggcatactcatggtctgttctttaatccacctgtataattggttcttctccaaagatattaacaagcttgacgtcgatgctgagaaattctagagcagaagagcagactctcccttcactgttatttgtgttcctctctctccaattccttagattgtaggacgaagtaaatcacaagggccagtgtcttgtttagaaaggttttgtc

SEQ ID NO: 195166 - DNA, 1000 bp, Homo Sapiens
acccctctatcctgccttactgctaatggacttgtccaggtgtctaagtgcccgtgcagatgaggatacgccatgctcaacgtgctagggtttgcctgactctccccggtttctctatgaaagacatctccacatgctgaaatcctaaagatacttttctgactgactctgaatacctcagtcactaaacattctaataagctgagattttactgttaaaagactatgtgttctccaatgtgtatttttttaagactctgcaagcttgaaatctaaaggtgacagtacttgactaaaatgaatgcaagtgtgccaagatggtaataacttataaaaatacaagttacttttaatatcataatagtgtcaagaagcagggcagttctgtgtgagcctcatccactgggaatcaaaattgggccagcatcctcatttctctttctactcaccaaactatgaaaatgggtatggggaggtggaaagtcacaatgcattcattatttcctcatatcttaccatctcatctttttttctttttaaattcacttttggaatagtcttgatctaggtggattattttttaccactgcagtaaacctctgcccttctttttcatatgtgctcctcagaggcaactctgaagagtccccttccttttaaagttgtatttatgacataaaaaaaggttctatattattttcttaataatcaatgaccaattttgcacacaaattccttaggcctaacctttaatgttctttaaaaataagcatatatgttataagcaaactagaaggctataaattaaaagcaaagaacatcttaaaagagttttcttttaaaaccaagtctgcatgattaaatgataaaaattgcttgtcccatgtctacagaagaaaactacagtttgaatgtttttgaaattaacatttcagtactgccatctgtaaatggtaaccctgggtatgccatcaatttccctttagtatgttcatggatc

SEQ ID NO: 195167 - DNA, 1000 bp, Homo Sapiens
tcttattcccactaaatagaagaggaggccgaagctcagaaaggttaaggaacatgctccagatcccccaggaggaaacagtaaagccagattcaaacacaggactggtttctaagtatacactcttaactactgcagctgtcagtcaaccaaaacttccatgcagctgttgagctaagctttctgtatcctatacctgctcagttggttttatttaaagtaactaaaaggtttgccttccccttagattcactcatctttccctcctacccgtcaataaggcctttggcacctgtaacctaacagctagtctcccctttcaggtgaaccgcgttatccatgggtctgatcagtatactttgcactgattcctattactgataaaactgtggaactggacaagacccggagaaaagccaccagctacctccaccctggagggtggtgtggctcccccttaaccggcaatgtttgggccatatttcaaaaagtatcctttccatatcactcagtgcaggccatcctagcacttctcaaccctggctgcacatcagaatcatttgggaagcttttaaaaatccccaagcccagtcagcaccctgcacaattacatcagaacctctgtgagtggggccaggcatcggcatttttaaagctctctaggtgactccactgtacagtcagggtgagagccactgggcgaatgcacatttcccctcatccaaaaagaagtccaaaaggaagaccgttgatgactatgtcaaacacggtggactctgagtactgtatcttggcattagcctcatcaagttaaaccaccccactgaaaacggatgcaggccgcctgtgcggtatgacaaaacctttctaaacaagacactggcccttgtgatttacttcgtcctacaatctaaggaattggagagagaggaacacaaataacagtgaagggagagtctgctcttctgctctagaatttctcagcatcgacgtcaagctt

SEQ ID NO: 195168 - DNA, 1000 bp, Homo Sapiens
atttgccttagtcacaagtccacagtacaataaaagcaaaattcaaccgccagatacagtgcaaagtaagttccatactaaaccacattgcaaggttacatctttttcagtggaaaattttggaaagtcacatcattgtggagagaatacagtataaaagcacttaaaaagttggccattttaaagtgctatatgacagatgtattaatgtgctgcattcacaaaggtggttatgtgaatataccaagaactagtgtcttttgaagactatttatgttggttttccctatgttttgatatgttttcctatgttatgattattcattaaataataatcttatatccaaactcactgaatttttttttttaactccacagccattgtgggacaataaaccttaaaggctgatatcataactatatgcttcagaaaagtgtttatgttagcaggggagagaagaaagaaaatatcaacaaatgaatccctatctgaagtccaaactgagaaatgcattatttaatatgatcacagtgctagtttcaactatttaaaaatacaagtccattatacttctaatgcaaaaagtacagaaatcataatcaagacacacaatttctaatgcatcaacactatttactttatgtcagaacaaatcattctaccttttttcatgaaaaataaatgcacttgaataattagaaatgctgtcacttaaaaacttctaataaattaagtcattcaatagctcttctaatcctttttaaagtactgcagctcaatcaagtcttaattgagactggcaagcataaaggcatagactggcatctctacaatgacttgcattttacataaaatttgaaaaaacttcggtagatatttgcaaaaaaaaatattgaggaacaaaactgatcaactgcctttgatagcaaaagaatactgatgagatgaagagacttaggtgcaccttatcgaaataagcaaatgtataatccaaagctt

SEQ ID NO: 195169 - DNA, 1000 bp, Homo Sapiens
ttgctgtgtgaccttgggcaagtcccttgacctttccagcctatatttcctcttctgtaaaatgggtatattgatgataatacccacattacaggatggttactgaggaccaaagatacatgtaaaatagggctttgtaaactccacagggactgttctatagcagtcatcatttgtctttgaacgtacccaaggtcacatagctgggatttgaactgagccgtgcagctgggatttgaaccaggccttctgatttcaaggtccgagctctgtcctctgtcagtcatgcgtccactttcccttcccctgtgactcctcccttccccactctgctcccagcccctaccttgagaccctcttctctgggcccagagagaggcgtcctggtgaggacaaggtacaggcaaggatgatccagggattgggcctgggactcaggcctcctaagtgtttggttcctccctccaaacactcattagttcactcattcattcattccacaaacatttactgagggccccggaatcagtggactccgaggggactgagacaagccctgccctggggtgggggtggggggcaaggtacagttgattctacatttggatagggagtgggggagggtgggaaggtaggggcgggagagtgagggggtttgtaatttattaattgcgtattttctaagagttttcaacatagtttggcttcacacacaacttcaggcccctcatttgagagccattatcctcaactccatctaaactgaatcttggggagaacccagatctgaccaattggggtaggagacagcaggctctccaagaacatgggcaaatttatttttttataaaacaaaaagataaaaagagttgaaagacgtgaaagtggtgagagatggaggaaacagaatcaggaagtggtagaaaagagaggaggtggctgggcgcagtggctcacgtttgtaatcccagcactttgggaggccaagttgggcggatcc

SEQ ID NO: 195170 - DNA, 1000 bp, Homo Sapiens
agaatcagacagtgagtagccagctaataaacacataactgaccacctcccacccctccaagtgagaattgggagggcagtgaccacactggcacatcccataggcttggtgccactagagagttgtaggcaggtagatcaaggcagtgcttctaggtaactgggttcagcattccaagaaggcctttcaagggtttcaacagagaaggctcttggtcatcctcatattcctgctggccagcacggtgcctgaaacatggtagccactgattaaatatttgctgttgagtgaaagtacaagacttgaatccaaactcctcccgctaagccctgctggcctcggggaggacgagagagccgtgggctgtttcatgatttaccctcttttaccaaagaatcgtgtgagatcctctgagaatattcctcatcatgccccatgtcccaagcccttttttaccttcccaagggaggacaagaatatgacccctcattataaagggacccctctgccacttatgtcctcaagctggttacttggtccagcttgtcaaagagcatgtggggcagcatctgaaatgaggccagggtcaaggttgccccgccacagggcggagctggacctgtgcctccttccatgcattggaagccttctgtggaagctgagttctttgggtttcttgtttattctgaagttcctcaaactagttcctcaatttcagaaccagtcaccagtgactacaatgaacttgaattctcctatacagggagcctgagcctgtctttcttcatcttttctgaacacaggtagacgctgcttgaagccactcccacctctgaaaaccagatttctaaacccagaaaggagcggtgggtggttgtatttcagcgagattgaccgtagcctagggaacttcttgctcagaatccaccccaaaaggttaaataaggagagttgtttttcacaaccaaaatgctgcttgtaacgatgatctcaaagctt

SEQ ID NO: 195171 - DNA, 1000 bp, Homo Sapiens
aggtgggtcagattagctttacagtccacttacaaggagactaacaaagctcctctgtgggtgtttgagcacattttacaaaactgctgatgacctcatgagccaaagaaaccaggtctcacattgtggactaagcctaaatattaatactactttatatttatgtagtgtcttttttccaaggaactccagcctctttacagacattatgtcactaatcctcaaagcatccctgtttggtacatggcaaatattatccccctccctttttttttttttaacagtgatggaaacttgcaagttggtgatggaacccagccccctggttcttagtctatgcactataccataaaaaaagtcagacgaatactttttcaagctattcattgcttcttgggtgggatttaagaggatgtcttggcttgtatgcatttcagttttcagtgtctctagcttctgtgatcctctttttcttcttcattgtaagtcaagcatgttcaagcatatttctcttccactgttgcatttatgggaacactagaagtttgtaactgagatttgaagtgaaagacttcggtattgaatatgtaatttcacttgtcactcagagatcccttatacttctcataacctaaaagaaattagattttttaaaaaaattcaccatgccagcttagagcacatttcatttatagcaatcacattttcaccaaaattaggtaatgttcaactaaatacaaccaatttgtgttgaattattaacatgtaccagatattatatcaaacattttcaaatatatgatcttgttttacatatattaacacatatgtaatattccatgtgaacctgttagatttaattcttaagtgtataaacactctcctagagtagggcaaagaaaaaaaaagaggcattaatagaaatatggcctcagttgttatatccaataaaaataaaaataaaagagctccctcaattctctcagtggaaatccccagt

SEQ ID NO: 195172 - DNA, 1000 bp, Homo Sapiens
attaaattattgaaaggagaatgcactagaattgtctcttcctgttttcctatccaaatgaaacaagttccttttgctataagtgaagtcttttgaaccagttaaaagcgtgaacctgtagccagctagacctgggtccaagcctgggccctgctagttaactgctatgtgaccttggacttgtttactttcttcctgcttcagttacatcatccctaaaatgtggataagcaaccaactcacatagatgtcatcagaaataaatgagataatacatatgtaaattagttagccttgtgttcattataaagatgccaaagtgttagctattattattattgctattattattagcacataatagtgattttcaatagtgggaaggatcccagtttgtttaatgtcatgtgaaccttagggccaagataataccataggatgctagtcccatcacactcagtgcttcatttgcactgggaccaagcccatgatttggaatgaaacctgacatgtgtgacgttctagcctgagctcaagagtgtggttaatggatagttaaacctttctgaggcaaactcagaaattactagtcctgttatatattggttccattatctccttggcaggataagcagtgcagttcttttcttttccctgctacaaaatgcaggttgacagaacaatcctggaacccaagagttggataaaaatgtgagttgcataaggccttgcatttgatcctctgttattgctctctgatgaggcatagccatttagccaccaggagcagccatcctctcaggagcgacacaagagaagagcacacctctttgcaaatggaaagctgatctcctggtcttggtctcacttattctgccacagttgttttcagctgtccactggggaccctgaaaaagatgtcatttccagtgcactctccaccaataaaacgtgctaacagtgcccttggggaatgtttggagggacttgattccagatc

SEQ ID NO: 195173 - DNA, 1000 bp, Homo Sapiens
caggggggcattcaccagatgccagccagagctctcctgtgtgaagtgtctgttggcccctcctggaaggtgtctccccctcaggaggcacaggggtcagggacccacttgagaaggcaatttgtcccttaccagagctcgaacactatgctcagagaactgctctcttcagagctggcaggcaggaacgtttaagtctgctgaagctgcacccacagccaccccttcccccaggtgctctgtcccaggagatgggggttttatctataagcccctgactggggctgctgcctttctttcagagatgccctgcccagagaggagggatctagagaggcagtctggctacagtggctttgctgagctgaggagggctccacccagttggaacttccccatggcttgctttacattgtgaggggaaaaccacctactcaagcctcagtaatggtgggcaccccttccccaaccaagctcaagcatcctgggtcgacttcagactgctatgctggcagtgagaatttcaagccagtggatcttagcttgctgggctccgtgggggtgggatccgctgagctagaccacttggctccctggcttcagcctcctttccaggggagtgaatggttctgtctcgctggtgttccaggtgccactggggtatgaaaaacaaacaaacaaaaaacctcctgcagctagctcagtgtctgccctaaaggctgctcagttttatgcttgaaacccagggccctggtagcgtagacacccaggggaatctccggatctgtgggttgtgaaggccatgggaaacgcatagtctctgggcgggagtgcagtgttcctcatggcacagtcccacatggcttcctttggcttggggagggagttccccgaccccttgcattttccaggtgaagtgatgccccaccctgtttcagcttgccctccatggactgcacccactttttaacctcctaaaacgttcctttcttctttgatc

SEQ ID NO: 195174 - DNA, 1000 bp, Homo Sapiens
cagtgaatggcaccacaccaacacccagccaattgtcaaaaggcctaggagtcacttacaactcctcccactccttcacctttttaatattatcagtcatcaagtcctgccaattcaacttcctaaatgtccctagactctatctccacaatcgcctctacttcaagccacagtcatttctagcttaggttactacctaaaatcttttacagggttctgcctctcatcttgacttcagtgaatcccctttctttcttttctttcctttttcttttttttttttagagacagggtctccctctgttgcccaggttggagaggagtggtgcaatcacagctcactgcagcctccacctccctggctgaagcgatactcccatctgaccctcttgagtagctgggactatagatgtgtgccaccatacccagctagtttttacaaactttttatagcgacagggtcttgccatattgcccaggctggtctctaactcctgggctcaagtgatcctcctgccttggcctcccaaagtgctcccaaattacaggcatgaggtaccgtgtctggccaaatgcattttcaatagtgcaaccagacaggtctttcttccctcaaatgagatcttatctctcccttcttaaaacaatcacaagcttcaaaatgtcctcaaaacaaagtctacactcattcatacagccttaaactctatattctatcaaatgatcaacaactatttcttgaatgcctgctatgtgctaggaatggtctggaatctaaggatacagcagtgagccagacaaagcttcagatatcaaggagcttatggcccagtgggatatatacataaactgggaaatacacataaacaaataaacaaaaatattccagattccaataagtattataaaggtggggtagagagtgtgctgtgtcagtcggggcattcaggtgatattttaatagagaggtctgaatgttccagccaaatatatatctagc

SEQ ID NO: 195175 - DNA, 1000 bp, Homo Sapiens
ggtctcctatttccatttcactaggactctaataaaaaccaacagtagataatatttccattcatgttaacattgacagagtctgagaggttcatcaagaacagaattgccatggcacaactaaactaatagttagctccctttcttcaactgattagagcaaatgctctccatccaccatcaatcattacctccagtttcaaaatgagaaacagaagacgtatttatatcagctatttctttttaactttgagaatcatgaaacaaaacaactccaagattatctatgtgttcttataaactggttataatgaagatttcttgtttacttattgtgttgatgtagccaatgaataaacttagaacattttataatatgaccagatattattcttgggctatagttcataaaataaactacaggttagaggcattgaaccagaacaaatcctggctgatggatgttttgagttatgttaaaatattgagtagaaatgagtatccactgagaataccaacttaaactgtaaaggttttacaaatctaatcatcttagtttctctcataatactggtgtataaccagcaatctcaactttttaaagctgagttattttactactgaactcataggctagcaatatcctattagaaattacactttataaattccataatactaaaagcattcctactttgtccttaatggtaagtcaactggcccaaatacataaaatatttgctttctatgatcatttaagacagacttaaactcggacgctctgtaatttaaagattagctttaagaactacattgtaaaactttgacttattttgaacatttcaccttcaatcaccgaataatttcaacaaatagccttacatagataacttgattccggttaaccacagcctggaaatagtcagggtctccttaagatcggcaagtgaaaccctgcgttctcttcttgcatatgtcacatagtattaggttaaagctt

SEQ ID NO: 195176 - DNA, 1000 bp, Homo Sapiens
gaagaatagagaaatgctgtgttccatcttctgatcctcagacctgccacatgtttgggatctgccttcatctggtaataggctgtgcccacaggcctcacacaccttgcaggctcacctaagaggcacaaatatatgcacactcaaaagcaggactgcattcttatgccagttatcacggtcagcctttgagacatgtcacgcaactctcttctggcctatgtgactttgaaaaatcagaagcatattgaatgaaaggtacgtaattgtttctgacgtattaaaaggtaccacctgaaaatatattgctgcctttgactgttaagaggatagctctcccagggattgcagaatgtcatcctccttgaaccacaaggccaaggcaaagcatggtggtaggtactgtgatgcccctcccagatccttctttggaaatcaatgactctccctgtggctgggagtgctggggtagatagtcctcgaaccctagcacccttctgggatggcttcagctgaagagagctgctttgctcaaggctggggctgcttcccagggtggcttacatccagtgaaggctgggccttggcactacaacttggtataactctgcagggccattcccacttaactgaccaagattgtcactaggcctgcatcacagatcaacttcgccctctggcaagttctgcttccttcctcgtcactgcactggggtgaatcccgagaggacttcctgctaaataccctgcaagccaatctccatctcagggtctgcttcctgaggggctcagcctcttacaagctttcaagcactccccattcagaatttacttctggcccaatttgtttaaagtcctctttctaagggagaagaaaaaataacatgattgcattactattttatcttaaggattttgctaagtttttcatgtgttagttctaaccttctatgacacagacatttcaatactcattttagagatagagaaacagaaaaaa

SEQ ID NO: 195177 - DNA, 1000 bp, Homo Sapiens
aggtggttagcatcccataccacctgcatcctaataggctataagctattttggtttttctgaggcttcactgaaagcaaagaggatagataagcagaatgctctatctttagtattcaggacttagaactgcactataagccatctcttatgccttgctgccagcacagacttgcagggggatcctactataatgaatagctttagaatagtatccaaagtgttcttaaagtaagaggtcacaggctggttaatgcctgtagtgctcttaacagttgtctctaggttcctcattgttaggagtcctgaggtgattgtaactatgatagtcatggataacacatggagaaggtagagctcatgcatgccttatatactcaacagccatgcgctttgttcttggccagtttttaactatgctttaagattgtctacccctagttagacatatttttttctactgttgtcttagtcctagaagtgtgataggggaagagctgacatctggcagcacagatcctgtgggacttataaaactgacagatgtcatatgtaagaagcttgctttgcatttgacacccaatgatgttatgaaaaagtaattcttaatgcaaactgaaaaccagatttttaacatccttttcaaaaacaagttgaaattataaaacatctctcttacaacttctgtaagaatgcttgctacattcatgctgcaaataacattgaaacatttgttatatattgaattcagagaagagttcatagaaagcagactttgggtttgacctagagctaatctcttttaaattgatcttagagtttcttgccttgttttaaacagaacctagggaatggttagtttggaaagaaaaaaataagatatagtttcttaataaccagtatgacatttttattgttcacattcacccttagctacttcttgacacccacaggataacagtgctgtttcacagattcacagtggggcacaaacaagctt

SEQ ID NO: 195178 - DNA, 1000 bp, Homo Sapiens
attcatttggagttactaatataatttgttctagcccttagcagaatatttctacattttctagaaccacagtataaaatttcaactggtcagagtttaggaagcatgcatagtaagcctagtgaggtaatttgtggggattcttactttcagttttgaggtataattagtacacaaaaaacttaaaaagcaagaaaaaagaatgcaacttttataggtgattaaatatgtttattacctgggttatatttagttgttttagtttaaaatctttactctcatatccctaattttcctcctatcaatctgctacagatgtctgacatttcagcattagatagcaaatcatttgtgttaagaatttattccttataaaacaacatacatatttaggaaatagactcaacataaatttatcagaaaatttcccatgggactgctagccctcagtacctacatttggaataaataaggatttgtgctctatttaagggaaagaatgggagatcataattttcggggtaagattgctgctctgagataattcttgactgaatatcacctttagaagtccctgaaaagtcaccaggatacaagggaagggagcaaactttgaagacttactttatgtttcagtgagtctcagagtttaagtttcaaagtagacaatccttcagcaactttacctttgattcatgtaattcctatgaacttgtctcctatgcatttgctatcaaaaatagcttaataaaatttttctcgccaaaagtgtttctccttgccgcatttggattttcaattcatggcagtttttaatggtgagaaatacattctaaagaacggacatttctaacactggtatttagattttgtgtactcacagaaaatttctgttttcatttcctcatttctacaaaaagaaaataagattatttctatccaatttcaggtaaaaggtataatgatgaagcttatattattctaaaactgcctcaagctt

SEQ ID NO: 195179 - DNA, 1000 bp, Homo Sapiens
agtcactttatttggtgaaacattccagcacctaagttttttgtacaggtgtttgtgtgtgtgtagtaactaccaatttaagaacagattgcgtttgaaaaattaatttttaaagcagttgcttggatctcagatctgtttctaatgaaaataatgaaaggtttagttcttcgtaatggaccgttaagttcttaatacgtagacaaattgtatgtgaaatggaccgtttagttgttaatatgcagacaaactttatatgaaactaaaacttgagcagtctgaaacccttgaggactaggttattctgcgtaacagaggattctttcatcgctaaatgaagtttaaacaccagttttgaatgttcagcagaatggcagatgctcaataaatagttgagtattaaatatccccatggagtttacatcctaaaaaaagaaaatctttcaaaagagttttatatagttccgtgcctcaggaataaacacacgaatatttcttgctgagtcaactattattttacaatatgcggtctgtgaaagtatatagggcattttgcctctatcctaagtagtactacaaagaaatacatttcaatgctaataacttaaactggtagggttgtaaggatttttattctgtaatattgtataatgaaatattttaaaaatagtaaaagtgtctgtgtaaaacatctgattctaaacatctttaataggtggaatccaagtcaaaaatgaaaaaaacagaccatctctgaaatctctgaaaactgataacaggccagaaaaatccaaatgtaagccactttggggaaaagtattttaccttgacttaccttctgtcaccatatctgaaaaacttcaaaaggacattaaggatctgggaggggtaagtgaaaaccgtacactggcatagaaggaaaaatttgtaactagtactttctactgtgtaatcatttaaatttttcattttggaaaacgcttctattagcaccaagctt

SEQ ID NO: 195180 - DNA, 1000 bp, Homo Sapiens
tctctcagaccacagtgcaatcaaactagaacacaggatgaagaaactcactcaaaactgctcaactacatggaaactgaacaaaccgctcctgaacgactactgggtacataaagaaatgaaggcagaaataaagatgttctttgaaaccaacgagaacaaagacacaacataccagaatctctgggacacatttaaagcagtgtatagagagaaatttatagcactaaatgcccacaagagaaagcaggaaagatctaaaattgacaccctaacatcacaattaaatgaactagagaagcaagagcaaacacattcaaaagctagcagaaggcaagaaataactaagatcagagcagaactgaaggtgatagagaccaaaaaaaaaacctccaaaaaatcaatgaatccaggagctggttttttgaaaagatcaacaaaattgatagaccgctagcaagactaataaagatgaaaagagagaagaatcaaacagacgcaataaaaaatgataaaggggatatcaccaccgctcccacagaaataaaaaactaccatcagagaatactataaacacctctacgcaaataaactagaaaatctaaaagaaatggataaattcctggacacatacaccctcccaagactaaaccaggatgaagttgaatctcttaatagaccaataacaggttctgatattgaggcaataattaatagtctaccaaccaaaaatagtccaggaccagatggattcacaggctaattctaccagaggtacaaggaggagctggtaccattccttctgaaactattccaatcaatagaaaaagagggaatcctccctaactcattttatgaggccagcatcatcctgataccaaagcctggcagagacacaacaaaaaacaagaattttagaccaatatcccagatgaacattgatgcaaaaatcctcagtaaaatacttgcaaaccaaatccagcagtacctcaaaaagctt

SEQ ID NO: 195181 - DNA, 1000 bp, Homo Sapiens
acctaatggaaattgatcctttaaaaattttatcttcaaaaactatttttcatcttggtatcccgatatccctgcccagtgcctgaacatagttagtgctcaacaaatatctgctgaatgaatgaatgctgaataaattagttatatactctggaaagaatataatgagaaagaaagacaaattctttaacagttgcatttttatagggtatcaatgagagaaaaattttaaaaatacttaggaaataccacacagccacatgagaagaacagacccaaccagggcagcatagtgagaacctgtctctacaaataataaaaaattagctgggcatggtggtgcatgcctgcagtcccagtcacttggctgaggtgggaggatcacttgagcccaagaggtcgaggctgcagtgagccatgatcttgccactgcactctagcctgggtgacagaacaagaccctgtctcaaaaacaacataaaacaaaataaacaaaaaacaagagaggaaccacctcttcattctgctaaagactacactttgtagactgggaatggtagctcacacctataatcacagctccttgggaggctgaggtgggaggaccgcttgagcccaggagttcaagaccaacagagagagaccctatctctacaaaaaccaaaaaaattagcaaaacatggtggcacattcccatagtcccagcaacccaggagggtgaggtgggaggatctgagcctaggaggctgagacctgcagtgagctgtgatcatgctgctgtactccagtgtgggtaacacagcaaggccctgcctttaaaaaaaaaaaaaaaaaaaaaagagtacattttgtaatccctccaaagccaggagcagcctgaagaaaaggacccatgatgtacacataaagtgagtccctggaaaactggatcagttatttatttcccaactttttatggacttcccatttcccagctcactgaagtccattgctaaagctt

SEQ ID NO: 195182 - DNA, 1000 bp, Homo Sapiens
cacacaaacatctaaaaggactacttttggttttgcaatgacagggtcgaaaaaagccccagatgggctggatttttttttttttctgatattttcttcctcaaagtccagttgctctccaagttcctacccctcccctgcccttgcctcagacctttaagaccaaagactgcaaaaccacagtgctgtacctgccacctccaaggactggcgtcgaggcccaacccaggaatgttggcttatttacctcctgggggaagcagtttaggcctcatcagagctggggagcacatcccttcagagcccatgggtttcccattccctcctgtcagccctggccatgaaatcctggggatctggagggagggaggatagttagagagtgagaggggcgagggctagccttttcctaatacccctgggtttgagtttaatttgcaataaaatggaatcccagcacatcatgcagtctccatggtggtgtgtgtgtcagggcctgcccagacccctctgtccctctcttggctgggctgccctggggttcagtatgctgcctcagtaggggcaggagggtcatccctctgggctgggagcctcaactgtggactccctgcctctgcttccccagctgtggggaggaagggcacagagaagggggctataatcactatgggtctggctggtgccactctgtgaagagagacacaggtttctgcccagctccacacccaagaagcccacccgcctcttgttctggccacgggggtaggacagagcccatttcagaccctgcccttcttcctcctgcagcaggcccggcctccggcgcccccagccccctgctggcctccctgcccctgcccacccggcctctgcagcccccgctggacttcaagcacttgctcgccttccacttcaatggcgctgccccgctcagtctcttccccaacttcagcacggtatgggctgggctggcgggtgggggcatgcacacaagctt

SEQ ID NO: 195183 - DNA, 1000 bp, Homo Sapiens
ttgaggcagagtcctgctccgtcgtccaggctggactgcagtggcgtgatctctgctcgctgcaacctccgtctcccaagttcaagtgattttcctgcttcagcctcccaaatagctgggactacaggcgtgcaccaccacaccgggctaatttttgtattttttagtagaaatggggttttaccatgttggccaggctggtctcaaactcctgaactctggtgatccacctgcctcagcctcccaaagtgctaggattacaggcatgagccaccgtgcccaaccaagaatgattttattatcattaataatcatgcttttcccaccttctgtagggatctcccctgttcttttagaacttactttcttttattttttgcatcttcatccttcagagctgggttcatatgtcatgtctttagaaaaaccatccttggccttcccatttctgcagataaacagaaagttaggtcaggtcatcctgtacgatatattatccgctcacctgtgctttttctccattatgcttatcactgttatttaacaagtaaatatgtaagtagttgtctgcttttccccctgtaagcgcatcacctccatgaggtcctgtctgtctggtttactcaaaaagtttgagattttggagcactttggatttcagatgaggaatgttcaacctgtatatggagcccctggctaccacaaactgtaatggctaatggaaaaagccagggccatgatgtgggagagaaaaattattttgcatttcctcttcctggagagtcaagaatggcttgtgaaggagaaaaatagttttcacacatttaccaggtcttggcgatttatgtttaagttcctatttagtttagttaacagaacatcctttgaagagtgtttgatttgattgttttctccaaccctgaggcctctttggtgaatgcagacaaagtaggttattttagttggaacagttcacagcagggcagatggcatcaagctt

SEQ ID NO: 195184 - DNA, 1000 bp, Homo Sapiens
ccactggtgtgtaggagcggccttagcctctgccaggcatccttactcccaagtttaaagtcattgtgtctgtaagaactgtctggtgctattgcttcactgaatacgtgtcaagcactcgggggaagataatcagaacagggcagtacgtgtctgggtcttgaaatggctcaggaaaggtatggaggcagaagaggcgccacgctctccattgaccaagatgaggagtggaggcagtcagctgtgttggcctgcgggagggagactgttgggggagctcactgcaccaatctctagctgggctggacagggtccatagttgagagtgaaattctcagagcagatgcacagaaccaggagagaaggaactggggactggagtggaacccagagcgttgtgaggcccttaggggttggagggaaggcagaaggcctacagaagagagcatttccccagattccaacatcagaagctacagggaggtcaaagagatgaggattccgacctgatcatcctgttgacctttaggagggcattggtgaccttaggaagacgtgacacagaagtagaaaccagattgcgacggtgtgaatgagaaggtgaggatgtgaagccaccatttcaagaagcttggctttgaagggaaacgcatcagtgccagaatagcagaggggtcagcttgttacaagaaaacgcagtgggaactgaagcagggagggctgagaaggtgaagacaggagaaggaagggctgggggacttgagattgccgagaagcagcagcatcccagttgaggttgagggaacagtgctggccagcgggacagacaagtatgggtgattggttaggccatggggtttgggagttcaaggtcagtctctgaagtgcaggctggagagtggccaggacgttcttggtccaggcagagtgtgaatctacctgtccctatgactgttgacgtcgccctcattagctctgacataagaagaagggactgatc

SEQ ID NO: 195185 - DNA, 1000 bp, Homo Sapiens
gcatgagccaccgcacccagcctttctttgctatatttcaaactcaagagcccaagagtttgagattccagtgagctcagattgtgccactacacctcaagctgggtgaaagagtgaggccctgtcagactctgtagaaacttctcagagcacattcacagaggcttttggtagaaatccatcccatgccacaagttggtgttgactgtcgctgtccccaaaggtatggaataaaaacctgaaaagcaaagtgtcattttatggatgtgatttttaagtttttcttacccttcttttttaaagcggtggaactatttctttacattaaatcttgtttagaaagccaatattgggaggccgaggcaggaggatcgcttgaggtcagaagttggagaccagcctgggatatagagtgagaccttatctctacaaaattaaaaaatctagctgagtcaggcatggtgacgcacatgtgttgttccagctacttgggaggctgaggagggaggatctcttgagcccaagagtttgagattccagtgaactcagattgtgccactgcaccccaagctgagtgacagagtgaggccctgtcagaaagggaaggaaggaaagaaggaaggaaggaaggaaaggggggagagagggaaggagggagggagggaggaaaggagggagagagggaggaaggaagggaggaaggaaggaaaggagggagggaggggagggagggaagaaaagagagacagaaagaaagccaatttttaaaaagctaaaaacaaagtgactctagtttaaatacaagttagagatctgattcctttcccctctgtcttccactcttatgcatttcctcaacacccacaattgtccgtgaagtagggtttaaattacactttcagagaaagagcatgatgttctaagcacaccgcttctccagaaaacacctaaggtgatcacttcttagaagccttctgtctgctctaaggagaggaagctt

SEQ ID NO: 195186 - DNA, 1000 bp, Homo Sapiens
ctctcctctcctctcctcccctccctattccccagagtgggcagaacagggaaaggaggacaggactggcctgcagggaaccacaagaaacaagatgcctccctcccccagtgggggcccatgccatgagccctaggctggccacaggatggaggaactggggtcagtgcacagagcaggctctgggaccccaaaggcagcctgtgggtgctccccagacagagccccgtctgagaaagatggacatttggggaggggtgcaggagctcctggagtcctctaacaccttccccccaccccaggcccaagcactggacaccttcttggatccaaccctgattaagaacagaaaggcagagggagaggcctgggaggggtatgccgtccccatcccagcccaagtccccacctcctaagcagaaaccaggagcatggggggagcctcggctgacctcccaggaagagccagagctgagtggtgcctggaccagggaagatggcacacacgttgactcggtagcaagtggaggtatctgggggtcgcaagggcagggaccccccacgagattcatgcagcattcaaagtgagtgtttgggggtgataggagaggacggagaaacagccagtgggtggggctggtgccctagatcttgctgttctccaggtgggagtcaatgtgtttgatgagggcatcatccgggtacccgacagggaaacccagctggcagagggggcagctgcggatgtcggagcccaccgtctccatcagcaactgtcgagagagaaggaagtcacttatggtccccagcccccacccatggtccccacatcccagcctgccctgtcccaggacccagggcagggagggctgtggcatgcaggaggggtccagccaccctttcttcagcaccgtcctcccccacaccagctcagtgtccacccccctgcccagggacagggtccccaggaggcaggtatgagagagtcactgctaagctt

SEQ ID NO: 195187 - DNA, 1000 bp, Homo Sapiens
aaactcaggtccattcattcattcaagggatagttactgaacatgtacctactacacagcagttactcatccatgtcttgggaatacagcagtgcaaagagtagacccaggcccctgcctttgtgtaactgtacctgggacaggagaaaataagtatattaaaggctctgttaaaaagtataagggccaggcgcagtggcttatgccagtagtcccagcactttggaaggccgaggtggacaaatcgtttgaggccaggagttcaggactagcctgaacagcatgacaagatcctgtctctacaaaaaaaaaaaaaaaaaaaaaaaaaattaaccagatatggtggcacgcgcctatagtcccagctactcaggaggctgaggcaggcagattgctcaagcccggtctgtaacgaaccatgatcgcgccagaaccagaccctgtctcaaaaaaaccaattctattcctaggcatatacccaagagaaatgaaaacatccatgcacacaaacacttgaacaaaaatgttcatagcagcattcttcaaaatagtcacaaagtagaaagaactcaaatatccatcaatggataagtggataaacaacgtgtggtctatccatacaatggaattgtacttggtagtgaaaaggaatgaagtactgacacgtgctacaacatggacaaactttgaacatattatgctgagtagaataagttaatcacaaagaccacatattgtatgattccatttatatgaaatgcccagaataggcaaatccatagagacagaaagcaggttaacagtggcctagggctggaagggggatggttggggagcaggggcttgatagctacagggtataatgattcttttgggcatgataaaattattctaaaatcgaccacggtgatggttgtacaactctgtgatacattaaaaaccactgaattgtatactttaaatgggtgaattatatggaatgtgagttatatttcaataa

SEQ ID NO: 195188 - DNA, 1000 bp, Homo Sapiens
ttcttctcctgggtttgggtttagttcttgtttctctagttccttgaggtgtgacattaggttgtctgtttgtgctgtttcagacttttgatgttaactttttaagaaactgctgaactgctttccaaagaatgaaaaccagaaatatgtgaaggttccacttcccctatgcttttgcaaacacttagtcctttttttgttttcaatgcagtcattctagtaggcatgcagtggtatctttttgtggttttaatctttatttccctaataagtggtgatgataagcatatttatcttcaccactattaactattcatgtatcttctttggtgaaatgtctatatgaattttttgcccatttttaattgagttgtttttcttattattaaattgtaagaatagatatctgaatacaatgcctttattaggtgtatgatttgcaaatatgttgtccccagcctataacttgtcttttcattttctcattgatgtcttttgcagcacaaaagtttttagttttataaagcccaatttatcaaatttttctcttatggctcatgtttttgtgttgtatcaaagaactctgccgaattcagggtgatgattgttttcttctatgttttcttgtagaagtttaatagttttagctcttaaagtctatgtttcatgtttcatgaattaaattttaggcagggtatgaggtaagggtctaagttcattttttttgcacatgaatgttcaattgtatcaacatcatttgttgaaaagatttcctttcttccatgaattgtttgtcaaaaatcagttggtcatatatttaagggtttttgcttctggactctcaactctattcccatggtctatatgtttatccttataccagtacagcatagtcttgattattgtgttttgaaatcaggaagtgtgagtcctccaactttcttccttttcaatattgctttggctattcagagttctctgcatttgcttataaatctta

SEQ ID NO: 195189 - DNA, 1000 bp, Homo Sapiens
ccagaggttagctggtggggctggcgaaatgcagatgatgagcatctggtacagtcagtagccaaagcttgtgcctctgactcccgatcgagtggcagcaagctgtcaactaggaacacttctcgagactttcccaatgggggagacctttctgacgtggagttcggtaaggtgctccctggacccatggcaatgatttttatagcatctaagaaccttttcttgaaatggcctcttccttacaagacatagatttacttttatagaagtgaatgtgcagagcttcacttgatgggattgattgaggagtcatgggtcttggcagagaatcagaagaccctttgtttcaaacctgaatcaagatattagtgtgtttgttgtctttcttgccattgtgacaaaaatggagtgtttatgtaatagaggacttgcagtatctgcagaccatggcaggaaatgccaggcttcatgaaaggacaacagatacagaaatgaagtataagagactgggctgtgtgaaccccatgtgtactctgggagtcagttttggagaataaatccttctcatctttcataagaaggccacatagaaaaaaagagaaaaatcctatgtatcaagggttttggttaggggatttcattttattgagccttttttgtgccataagatgtgcttgtgggtctaattctgcacagttctgggagagacaggctcatttagtatgccctctccctctgtgtccctagattcttctctgtcaaatgcttcaggagcagagagtttagccatccaaccgcagaagcttttgatcttggatgcacgctcctatgcagctgctgtggcaaaccgagccaaaggaggaggctgcgaatgcccaggtgaggtgtatggtgctttgttccccatactttctccttgtgagtgtagcccttgcccaactgagacttagttcccaatttgaaataagtggcaagccatattcctcatccatcctgtcgt

SEQ ID NO: 195190 - DNA, 1000 bp, Homo Sapiens
gaaggaagggaggaagggaggaagggaggacgagaggaagggaggaagggagggagggaaaagaaattcctgggcagatgaaagtgaggggtcgggggtcggggtcgggcgcggcgatgccgcagctgcggggctcggtggactcggcgagcaagagccccaggacgctgctggcggcgggcgaggagctggggcgcggcgcggggcggctctaggcgctgtggccgctcagcgtctgggacccagcgccgcccaggtcagggaatccttggtgttcccgccccgcagcacccggggcgggggaggagtcggcgcggtcgtgcggccgtggaggacagcgagacccggggctgcggctgcaggccgaggggcccctgggacagtgagaagcagcggcgggagctagtcacggggcagggagcgctcagcggtaaagacggcttcatctgactccagggctggcaggcggcccggatggcatgccgtctcctgcggagaattccaatttccccctaaatcgctcaacaagcgagaaggttttgggattcgaattcagtggggcaagcgaagtcgcctttccttcttaaacagatggaatccctggtccacaaacgtaccctgtgccaatttcatacaacacgctatggctgctgcggatgagaacacagcaactctgccagatgaaaagcttcaaggctctgtgaatccaaggtcaaaaacgccaaaaaggaaagtccttttccaggacaagcgcacgcgtgctggtcgtggagcgccccctcctcatggagaccggcctgggattgatgtccttcattaacaatgaggctaaactgggctattccatgactgaccaggggcaaaataggcttttagccagcggcattctgggagctctccccactaagaaggccaagggatgtggggtctgagagcctggcagtcctcatgcaaagccgctgctggctggaagcataggggtcttttaccttttgggatc

SEQ ID NO: 195191 - DNA, 1000 bp, Homo Sapiens
gaccccgcctcccggacttcgcaccgcggccccggcccccgccagccgcccagtaagtacacctgggccccgccccctggccgccacgtgacggcccccggcccaacccattggccggcggcccctttcccctcccccctccgcccctttccaccggccgcgggaaatcaaacgggccggtcgcgccccaaccgccacctggcctctgcgggaagggcggggccggggccgcagtgccaaggttgcccctaacgacctgagcgaggggcgggaatctgcagcctcggttctggcagtgagtagcaccgctcgcctccaccctcgagaccgaccttgcccgtatgctgccaggtgcagacgccttccggccaccaccgcccttggcaccctctccccacaggacggccctgcacaccctggggctgcgggatccaaccgcaggataggctggaaagcgcagcagaatggttttcccggctcacacttgctcccatgagccaggaccccctacttttcttttttctttctttttcttttcttttctttttttttttttttttgagacagggtctcgccctgtcgcccagactagagtgcagtggcgcgatctcggctcgctacaacctccgcctccctggttcaagcgattctcctgccttgagccacctcaaggtggctcccggcctgcccctacctatgtttgtattggaaacaaggtttacaagtagtacaatgcgcaattcttcttcgctgagtttgtttgtttgtttgttttgacacaaggtctccctctgtcgcccgggctggagcgcagtgcgcgatctgggctcactgcagcctctgcctcccgggttcaagcgattctccctcctcagcctcctgagtacctggaattacaggcttgcgccaccacaacctggctaatttctgtatttttagtagagatggggtttcaccatattggccaggctggtctcgaactcctgacctctggtgatcc

SEQ ID NO: 195192 - DNA, 1000 bp, Homo Sapiens
gtcttgcaagaagacatggtagtgaaaatgaaagtgagaactcccactcatgagtgagattctcaaaagaggggaataagggaggagaccacccctcatactgtcttatgcccaatttctgcctccaaagaaagaagaagtaaaaactaaaaggcagaaatgaaatctgctcggcaccacacctgggcttggtagttaaagatcgacccctgacctaatctgttatgttatctatagattacagacattttatagaaaagcactgtgaaaatccctgtcctattctgttccattctaattatcagtgcatgcagcccccagtcatgtaccccctgcttgctcaatcgatcatgaccctctcaagcagactcccttagagttgtgagcccttaaaagggacaggaattgctcactcagagagctcagctcttgagacaggagtcttgctgatgctcccggctgaataaaccccttctttctttaacttggtgtctgaggggttttgtctgtggcttgtcctgctacaggtctaagtggaatctaagtggaggcatcactgagccagcctctccagcccagggatggggaggccccaggccctagtggacctggaccagtgatcacgtccttgaactacttcctacctgcctggggtggcccagagtacaggaagcccaaggagccaggagctttctcatctgggagcacaaaggatgtgaggaaaaaacggaacccagcccagcccagggaaacacagggactttcccctgccccgggcttcccatcttctttgcagagaccctgcctcttcttcaagggggatgattccagaccctctaagagcaacagggacacggagctcacatacataccccacatcaacatggagatcacacacctcaacacggagatcacacacatcaacatggaaatcacacacacatatcgaatggggattacacacatcaacgtggagctcatacatacaccccaacatgga

SEQ ID NO: 195193 - DNA, 1000 bp, Homo Sapiens
ggaattccagttgttcccagaggtctctgaagaagggcccagagtgtcggggacttggaagaggatctcgggactggaagtcagagaaagtgcaaagcttgtcactgagccttggaaaaaccttgtccctgagcaccctgagcagccgtactgaggctggggagcctgcacaggcctataagatcctagccctgtttcctgctgctgccccaaatcctgctcagggaggaggaggagggacaggaagaaatctgaacaacaactcttcttgtgacggagttgaaaagcagacctatctgtacaagtcaactctaactggaatgtcactgggttctgaaggggttgaaggaaagtgtcagtccaaacacacagaagctctggaacaaacaggagtttagagagaaaaacaaagtcacctttctgcaccaaagaggaataatgttcagattctgacctgctccaatggatgtgctcagggccaaaggagctgcaaaccacaggcattctccaggcccctaattctccacggaggaagtgcagtttgaattgattttaatggtgttttgaaatggagataaaagtattctggaagggtaaaatgccacaagcaaaatctcatttagaaaatatacagatatgtgaaaaggacaagttgtccagggacgtatggctggctttgagtgtgtgtgaaagactgtgtaagagcatgtttctgtgagagcacggggtgggtgtgaatgtttaagactgtgggaggtgagggtgagggtatatggggagtggtgagggtgagggtatatggggagtgtgtgtgagtgtgcatgtgggatggtggtgtatggggagtgatatggtttggctgtgtccccacccaaatctcagcttgaattgtatctcccagaattcccacatgttgtgagagggacccaggagaaggtaattgaatcatgggggccggtctttcccatcctattctcgtgatagtgaataagtctcatga

SEQ ID NO: 195194 - DNA, 1000 bp, Homo Sapiens
ggaatacaggcatgagccaccgcgcctggcctgtgtcttcattttcatttggttctaaatactttttaatttcacttttgacttcttctttgacctatgggttatctaaaagtatgttatttagttactaaatattcaggacatttccaaagatacttctgttattagaattattcttaattccactgtggtcagagaatatattttgtatggcttgcataattatcaatttggggcttattttatggctcacaagaatatgatctatctttgtgtttatactaaaaaagaactacattctgctctctctggatggtgtgctatgactgtcagtcagatccagcaggctgaaggggttgttcaagtctcccgcatccttaatgattttcagtctccttattctatcaattactaagagaagaataatggaatcactatcattatggatatatctatttctccttgcagttatcagtgtttgcttcatatactttgaaacactgtcatttagtttataaatgtttagaactgttttgtcctcttgaagaactgacccctttatcattaggaaaagaccttcttcaaccatggcaaaattatttgccttgatttgtctgatattaatacagccactcctgattcctgggggccatgctgagtcttactcttttttccatcctcagcacctaatgcatggtaaatgttcaagtgtttaagaatccaacaagttctcgcagtcttggcttaccagcaccaaaaattcaaaacaagttcttaactaactgcttacaagaattactaaaaacaaacaaaaaattaaggattatactgaatcccactagtactatctatactagatacagccaaggcatttacatgacatatgaagagcagggcactagaaagtactaaatactattagtatgtagactcttatgagctgttagaaatttcacatcaacctggtttcctatatgcactacacaacaaaggaaagctt

SEQ ID NO: 195195 - DNA, 1000 bp, Homo Sapiens
ccactgggtcagactatggcagagggagaaagtcaaaagcaaaacttaatcacattggtgttggagttactgtctcatcaagccattgggatttatcattgtctccttccagagtcaagaggggagttggccagccggatgctgtggctaaagcctataatcccagcacttcgggaggccgaggtgggtgaatcacctgaggtcaggagttcgagaccagcctggccaacgtggtgaaaccgcatctctactaaaaatacaaaaattagctggtcatggtggcgcacgcctgtagtcccagctactaggaggctgaggcaggagaattgcttgaatctggaaggaggttgcagtgagccaagatcacttcactgcactccagcctgggcgacagagagagattctgtctaaacacacacacacacacacacacacacacacacacacacacaggagttggctagggttttgaacctctgtgccaagcactggactaagcatttcatatggattacagcaattctttgaagtaatatgtattctctcctattttttcacctatacataagatgcagaattcgaaggacaaacaatccaagtgcccatcaatggacaattaaattgtggtatattcacccaatgggatattatactgtgaagatgactggaaaatggcgacatgcaatagcatggatgaatcttactaacatagtgttgattgatataaacaagctccagaaaaccatacgtgtgtgtatatatttatgtatattaatataatgtgtgtatatatatacacacactcaaacatatatgtgtgtattgttcaaaaaccacagacacacatatgtatgagtatacatgcatttatacacatatgtacacacacaaacacatatatataaagggagtgataaaattcacgattgtcatggctaataagtaacatgcaaatgactaaaacccagttctttccaaagcctaggttctgtatggatcc

SEQ ID NO: 195196 - DNA, 1000 bp, Homo Sapiens
gcgcggcttgggttggtttagccggttcttggaagggccctgggaccacgaaaagggcggcagccctgagccgctggcgtgcagagcgggtgcaagtcctgtccagcacagccaggcttacctgccgcctgcctctcgctctaggcccgctgcggaagcgcgagccccacccccgaggtcttcggagaggaaggagttctggcttcgggcccgcagccttcggaggacgcctcactcgggccgtcccccgtccgcccgcccgaaacctaaatgcggctccctgcctgtggggtcgcggcggggacgtcacagaggcggcgacatcacaggcaccggcgcctctaatatttccagcgcccaccagtccctcagccaaagagcacactggaggcggagaggcagcatccaccagcccgctccccgcctccaggacagagcctcggtctgcatgggggtgacaggtgggagcggccgagcgcccgggggcgagggttggggcaggcggggaaagcgaaagtgagagggggaggggcgcgaagggggcggtcaggaatccgcccagggcccgttcccctgctcccaaacccccggcacctgaaaggcaggtcgacccgccgccaaagcccacccggtgcccctgactacggctcccagcctcagcccctgcgcggtgcacacccatgtgctctcacggacacgcatgcgcgccttggagtagggactgcagagtcagtggttcttgaaggggttctgagaccacagaaggagcaatggccttgtgcacaggaaacgactcatgaattatcctgaactgcagatccaaaaaatcacatccagttgtccctccttgatgcttgaggctttgcagggaggagcggcagtcttcagcacatttttacggagcgcttcgttgatgccttgtactcttctctgaaccaatgagcaaagatgtttgcccccagtgccctgtgtctccccttcccataggggcgtcagatcc

SEQ ID NO: 195197 - DNA, 1000 bp, Homo Sapiens
gtctccctcaatgcagacctcatggggccctccctctctctcccccagggtgactccggggggccgctggtctgccccatcaatgatacgtggatccaggccggcattgtgagctggggattcggctgtgcccggcctttccggcctggtgtctacacccaggtgctaagctacacagactggattcagagaaccctggctgaatctcactcaggcatgtctggggcccgcccaggtgccccaggatcccactcaggcacctccagatcccacccagtgctgctgcttgagctgttgaccgtatgcttgcttgggtccctgtgaaccatgagccatggagtccgggatcccctttctggtaggattgatggaatctaataataaaaactgtaggttttttatgtgtattttatgtctttgcttttctagtaattcatttttattgttctttacaaaaacatctggctgtggtaggttgggagagcatggtgcctgccccggacattgtctgcgggacaccttcatcgttagggtcacagcgtccaggcttgctcaggacggtcttgggcgatgtctgtcccgtgtagttagataggatccctgtccctctcaaaaagtgtcccaaaagtgggagtaagagttatatagtcactgtgactcagccagtgcaagagctggagctccttgaagcccacagattttcagtctcaggcatccttgtgtggttgccatggccaccaggtgtccaataataggccttgttctcccagctccggcccacggagtgtccataccttcccccaccaccctgcccgctgctgactgcagccagtgggggccctggggcctgtcccaggcatgagcaaggtccttgggcgctgtcccaggcatgaacaggggctttgaggccgtcgccagcgtggtgggcagcgccctctgcctgtgtcttagacgcatggccagagcagtgcctggtagcgccagctccacacttgcaggg

SEQ ID NO: 195198 - DNA, 1000 bp, Homo Sapiens
caaagtattcggcttatttaaattttataaaaactcttcttaaagaaggaggtgttaaagtttctactgaaaagttaattgaactatttgaggttgtagatcttctttgcccttggtttccgactgagggaactttagaacttaaagattgggatgagattggcaaacaattcaaaattgctcataaagggggacattttatcccacccaccatttggtcaatctgggcttcggttcgctctgtcttagactccttacagactcaggaggacaatatggagactgatccctctttcctctcctctgaggaggtcgaggaagctctcagctctctttcccctgaggataccgcacaagttgagaacgtaatttcaaaggaggacttccactctgacatgcctgcgacaccaccacctacgccagaggctactgcacccccattgccgctttatgatgatcttttaactgacctaaatgtacttatctcccccaatcagcaaaactcagctgaaacatatcaacagccattgcggccagaccctcctgtctctcctcactctttcaacactgccgccgtgcaaatagcagatgagaccaggcagcctgtaaacgagtctacaaattacgtttctatgcagcccggtacagaggctctgctatatgaacagcttggaaaagaggcttccaattctcggcccggtaatgaggccctcaatcctatttctcctaatctgactcacttagagtcacaggctcccttgaaggctggttcattccctgcaaatcggactcagttagagtcacaggctcccttgaagcctggttcttttcctcctaatcggactcagttacagtcacaggctcccttgaagcctggtccacttcctacaaatcgcactcacttagagtcacaggctcccttgaagcctggttcctttcctacaaatcagactcgggtagagtcacaggctcccttgaagcctggttcacacttgccgtg

SEQ ID NO: 195199 - DNA, 1000 bp, Homo Sapiens
aagatagatgttgaccagtaagactatcagttactaaacacagccctctcattctacacccctaacacaatctcttaaaaaagaaattacaacttccaatctccatttgtcaagtatcttgaatttaaatatacaggtcttcacaaatatgaactaaaattcaacaaagttttgtctactatgtgctggacactaataggataaaaatgactaggaaacacttcttgcctcagaggaactttgcatgcaaatgacaacattacttggcaacaaaagaatgtggacacaatgtgaaatcaagccggggtccagcagttagaatcagcccttccttgactacaccagggacatactactacaaatcattctgtcttataccccagcatccagctatcctctggaaatgcttctccctgaagtttacatccttgcttagctatttcactcatctactccacggctaatcccttcatctctgcttctcagaaatggctctttccaatcctcccttccaatctctactccacaattctagtggcccagtctcaagcttcccctccagtgctctcataccttctcaaagctgcaattctagtcctgaagatctaggcaggggaaactggtactcacacattacatcaaggaaagacctcagaggtacacacaccagtggagataccataggttcagttccagatcacctcaataaagtgagtcacacgaattttttggtttcacagtgtatataaaagttacatttacactgaactgtaatctattagatgtgcaattgcattatggaaaaaaaagtacacactttatttttaaaatacttcattgctaaaaaaatgctaatgatcatctgagcctttggcaagttgtaatcttttagctgtggaagtgtcttgcctcaatgttgatggctgctgactgaccagggtggtggttgctgaagagtgaggtagttgtggcaatttcttaaaacaagacaatgaagctt

SEQ ID NO: 195200 - DNA, 1000 bp, Homo Sapiens
tgggaatcatgactaaaggtagaacttacagacatacatttggcatgagtagaaaaagatgaacaggcaggtccaccatatttcaagtgatttcatgctataagtactatttatatacaaatacacttaatctggcctggcatctgatgtccgtacaaaatgtcaactcctaaaaccttggaatatgtttaattgtcaaggattaaatcagatgctgtgctgtgtgctgctttggccacaaattggataaaagggcaggggttgttatttctgttctggggctcggctcttcttagctcccagaggtttaatgaccccttcttgctataacctcatgtctcccatgtccataataggcagaagaactttaggtcatagagaggcctttactttcccatgttttgcatggtcagagaagtgctgagaatggtgaatagttgacaccaggattacagatcagggtagtctaatgaagttggaaatatgcaagaaggtctggaagagtctctgtttcccttcataccaagccagagttttgatggcagtggctgctgccgtgatgcccatgggctgcggcggggaatcatggatggggctgcacactccatggagccagtgagagccctgccccttctgaattgggatgggagctccccatgcttctgcagccacccaaactgcagctgcagacccaggcctcctgctctagggagcaagcagtagctccacccaggagggactgcagctgaggatcgagcctccctgtgctcttgtgggagttgggaacaggcaggatctgccttccctggtgcagctgcagctgcctcacctgtggctgcagacctgggcctcccactccaggaagcaggcaggagtctgggacaagctcgggagcactgccccttccaagttggctgggcaggagctcctgggtgcagctacagcctgcagcctgcaccctcggggaccccaggaagggccctcaacttcttgcaagctt

SEQ ID NO: 195201 - DNA, 1000 bp, Homo Sapiens
catattttctctgatatagataattctaattcttgctactaaatttttagagtaataaaaagttacctaagtgaaaataaaatagccattaacttttaattacccagatatttctaccttttccaaaaatctccatgtgcttacagaaacatagccaaaggcttcaaaacaattcctgatctgggaaaaatacaaacggatttttggacgtccacatgaactagacatgttcttgtttagaaagctggcatttatgacaaattttccgaaatgaaatgaatctaaatttgttgatattacaaaaataacacaataatgtatttttgctctatgtcaacttaaatgtcttcaaactgatgtaaaaatatgcataaaaataactgtgccaggtaataactagtattccaaattccacctggggaaatgaattttatggctatactataaacttctaaaatcctgaagttttaatagatatactgacacaaccttaaccataacagctctagcaactgctgctataatcaatctgtcagtttctataatagctatgacaaatccattaatatgaatgatgtacacttcacatagcgcactacacagcaaccgcacaagttatgtcatctccattctgagtagcaaatcagtaatcaatatttgtaaaagcagcagctaatcctttgtaaaatcactggttcagtgattgaggagtttgctcaatccacacagttaatccctcttcatctgcttgagccctctctttatcccagcctcttacaatgctagctatggcagattaatacatctccacatgctaaacatgacctgacaattgacacaggatattgctgacaggataagctctacaaaccctggccttttaaaagggaagcttaaaattaacattcagaaacccaaagtttacaaacagactcaccactatcccttctcaactccagttatctgatttattaagctcaccctccttgggaaatagatc

SEQ ID NO: 195202 - DNA, 1000 bp, Homo Sapiens
tcagtctgtcacctaggctggagtgcagtgatgcaattacagctcactgcagccttgacctcctgggctcaagcaatcctcccacctcagcctcccaggtagctgggactataggcataagccacaatgtctggctaattttgaaaaaatttttgtagagacaggatctcactatgttgcccaggctggtcttgaactcctgggctcaagcaatgctccttcctcagcctcctaaagtgctgggatcacaggcatgagccactgcgcccagccagagcctttatcttctatcaaggaatgggaaggcatgtaaggggcaacggaccacaacagattctgtttggctgttccttttgtggcttgtggcaagagaagagtgcacaacattcaactaactacagttctggggaggtgacaatggaatttatgagaacctggtacctgcagatacgaataaatacaagtcctttaggcagacactaaattctttctcttaggcaggtttctaataaaagctatttgtcagacaggttgagcttatactccaatctgcctcaaacaactggtattctaaaccacggatgaggacaactcttaacacagggaaaatcagacaaccagatggcagggcagcaccttgttagtaaagctgagaatttaaccagacctttctgaacaatgcatatacacacagaggtggggtgctaaggaggctgtagctaaacaaggcattctttttagcatgcagcaaagactctgctctgacatttagacatgtatttgatagagcatccaggaatctacaccacggtggatggcagaaatgctttaagcctcatatgttttcaaaatggcagttactgcattcctcgcctagccaatgttcacttcataagtattcccaaggaacatccaattctgagtagcatggcttcctgatgtagcctttgatgttactaccccagagagctgaatgaattggcttgttacatccaagctt

SEQ ID NO: 195203 - DNA, 1000 bp, Homo Sapiens
tattgatctgtcttatgtcaatttaattcttggactcagctgggaccctaagaagatggaggtggaattttgctgcccctacaacatcaatgatgttttagatccaacaaagcacactgtattgccaaattgctcttcaaaggcgttacataaatttacaaaccagcaaagtgtggtggtggccaaacagttaaacatttttaaattatattaaaatattttaaaattctatattacatacagaatatattaggaaataaaataaaatagaaaaacttattaaagcatttatatttatgaaagattacttaaatataaatttccacacacctttcatcttgtgcaaattaggtgcataagaaatatttgttgatgataatgtgcttcttaatgctgtagtagcagtatcaaaatataatattattgaggtaatagttaaacatgacatattttgacattaaaatagtttgccgtttggccaggtgcagtggcttacgcctataaccccagcactttgggaggccaagctgggcagatcatttgaggtcaggtgtttgagaccagcctgaccaacatggtgaaaccctgtctctactaaaaatacaaaaaagttagctgggtgtggtggtgcacgcctgtagtcccagctatttgggaggctgaggcaggagaaacgcttgaacttgggaggcaaaggtcgcagtgggccaagatcgcgccactgcactccatcttgggcaacagagcgagactctgtctcaaaaaaaaaaaaaaaaaaaaaaaccacacacacacaaaaaaaccgtctgccttttaaaagatatttatagtaaaggaaaacttagattcaccctcatccccttcacaactaatacaacacagtttttctaaaactgtgtttctttaattgtcagaacaacagctggatttaaattaagatgaaacaagatctggaggatctagagaataataaaaatatagaataaaataatttaagctt

SEQ ID NO: 195204 - DNA, 1000 bp, Homo Sapiens
atttagaaactcccctgaggaaacttgcttttcacacagaatggattatgtgtctaaatgtcaaaggaatttccatagttttcataaatacgcttcatacccagaaaacagcagttggtttaagattttgtaaatcaggtttgcctctaccccccagatatacgttaaattttttattatactcagttccactacattactatgttctgtcttgtcgtatattccaatcatctcacgcctcattaatttaaatacttatttacttatttattttttggagacagagtctcactttgtcacccaggctggagtgcagtggtgcaatcatagctcactgcagcctcgaactcctgggctcaagccatcctcctgcctcagcccctcaagtagttgggattacaggtgcacactactatgcccagctaattttctgtattttttgtagagacggggttttggttttgccatgttgtccaggctggtgtttaagtatttaaacccgtattccctaaatatagtatatgtatacacataggtatatatgaatagattatatattgcatatataatatgacatgttattgttatatattaatgtacaatatattaatattttttatatataaaggttttatacacacacccacagacaaattaactcccccaggcactcacctggcttggtctcagcagggtgtcgcagattgatcccagcagtgaaaggtaattagaagtaatcccaatcttactggcatctctcaaatctctcaaatatcattagagaggatccaatgcatagcctatagtaacaacaaatgctctttccttattcctcttcttgcccctcaccacaaaaatctgtccaagagcctctctccctatagctcactctagtccctcccctttcaaagcctagagtccctcccctttcaaagtcaattcccatccttgcttctctgttcttccccactggatttcctgggttctgtagtttaggatc

SEQ ID NO: 195205 - DNA, 1000 bp, Homo Sapiens
ccatattttaggcagaccttacgctcatgccgactaaaaatggactcactctgctaaggaaatccaagccccattgggaaatatctctgagtctaatttggtcatttcttttgccgcttcaggctgtggaccttacaaagcagagacagcacccttcaagatgcagagttcagggaaagctcctatacagaggggagtgggagtctccgctgagtttggaaagatgactggggtttgattgacagagtgaacgcggtggggggcggcgggggagatgtttcaagtgaagagggtctggaatgtgcctagaacagggaatcttctgacaggctgaaacaggctgtgtaagggagtgcaggtggctaaagctgctcagagagacacagaccagtgcggaaagaaagttctgagggttcatgaagatattggactttattctgcataaatacagatggtgaagggtggaagcagtgtttcagaaaagaaaaagtgtgtagtgctgtgcatgcagcattggtagaaatgggcttgatgggaggaaaattacttagcggactagggcctgaggtcatggggacctatgaaaaggaaaataaaatgcatgagggtggctatatgattatgtgcagagggggtggaaactgttgctcaaaactgaatcttaaaatttgttttgtcattgctttacccaaaatagtcgaccctagttggatttttttggagaaaatattttgtcccttttaaaaaggttctagtaagaagcagctttaatgctgtttgtggaaggaaaaagttacaaggagaaagagtgaatacagtgcatgattaaaggagtgatggaaagtgacaatggctttcaaaagagcacaggcgaattgacacgtattatgacaaacacgatcttacagtgacttcattttcttgtgagtgttgggaaatactttctagatattctaataatgatgccgttagcattgtacaatttttaattaaaaagctt

SEQ ID NO: 195206 - DNA, 1000 bp, Homo Sapiens
ggtcatctagctgcaaatcagaatcatccatggacaatgtaaagaaaaacagatgctcaggacatgctctacctgagtattctaattcaatggtcccaggatccaggtataaacatttttttaaaaaaagctttccagatgattgaaatgcatacgattgaggactactggcttgcaagaggaagtctctgtgttacatacaaggctcaattacccccacttttcagctgacatttcaccttccagccacacaaatccacttgcagttctctacagactatctccacacctttgtagcagccatgcccacccttactgtgggcacagcagagtggccactgtataaggtcgcagctcaaatgaggccttcttgtccatttctgcctaacatccccaggctggcatgcaccaggctgcccttgcatataccttgtatatatattacaacactattacaataaagatacttacatgcttctctcctacctgaactgtaagctcctggaggacctggtctctatgattcctatatcctgctgcctagcaaaacacctgtcatatgataggtactcaaaaaattcttgatgaactaataattgcatccatgtaaataaaaccaatgtagtcaatgttgtaagaaacagactgctggcattattttgagttgaatggaagaaaattggaatggatataatcacgaatttttattcaaatagatttttttgtagtgagctttggattccaagagttacttaatcatcctcaagcatgctacaagagaaaatgcttggggatctttgactcagttagaagcaatgctgcttccattgtatgtctggaactcatttcaagaggattcgtatgtcttcacttctagtcctagatatctctgaaagaaaacccaaaagaaagaagccagcaggggaattgacaaaaacgaagatatattttatgtgcagtttagagttttctgaatagcatttttataaggtacaagctt

SEQ ID NO: 195207 - DNA, 1000 bp, Homo Sapiens
tgcttccagtgtggtcttcaaggacactttaaaaaagattgtccgaatagaaataagccaccccctcgtccatgccccttatgtcaagggaatcactggaaggcccactgccccaggggatgaaggtcctctgagtcagaggccactaaccagatgatccaagcagcaggactgagggtgcccggggcaagtgccagcccatgccatcaccctcacagagcccggggtatgcttgaccactgagggccaggaggttaactgtctcctggacactgctgtggccttctcagtcttactctcctgtcctgtcctccagatctgtcactatctgaggggtcctaggacaaccagtcactagatacttctcccagccactaagttgtgactggggaactttactcttttcacatgcttttctaattatgcctgaacgccccactcccttgttagggagagacattctagcaaaagcaggggctacccaagcattcaggggtagcccccatctatttggccaggcattagcccaagacttcagacagttttaatacctggacactcttgtcctttggtacgtggatgatttacttttagctgcccgttcagaaaccttgtgccatcaagccacccaagtgctcttaaatttcctcgccacctgtggctacaaggtttccaaaccaaaggctcagctctgctcacagcaggttaaatacttagggctaaaattatccaaaggcaccagggccctcaataagaaatgtaaccagcctatactggcttatcctcatcccaaaaccctaaagcaactaagagggttccttgacataacaggcttctgccaaatatggattcccaggtaagacaaaatagccagatcattatatacactaattaaggaaactcagaaggccaatacccatttagtaagatggacatctgaagcagaagtggctttccaggccctaaagagggccctaacccaagccccagtgttaagctt

SEQ ID NO: 195208 - DNA, 1000 bp, Homo Sapiens
tagcaaaacaccatttctaaaacaaaataaaacacggccagtgtgctggcccacgcctgtaatcccagcactttgggaggccaagtcaggtggatcacttgaggtcaggaatttgagaccagcctggccaacatggcaaaacctttctctactaaaaatacaaatataagccaggcggggtggcatgcgcctgtaatcccagctactcgggaggctgatgcatgagaatcacttgaacccaggaggcggaggttgcaatgagctgagatcatgacactgcactccagcctggatgacagagcgagactccatctcaaaacaaataaataaataaaaataaaacaaaacagaaaccaaaccaaccaaacaaaaagattatagtctatagcggaagaccagacattgttaaatagaggttaagttctaatcactttgcttaaattgttaggtaaataaataaaaataccaggaaatttctagatcagaaatccccagcataacgtcttaagaagtattttaaggcctctactcatacatcttacctaataaaggtgaggagactactgacagtttcaccaagtaataagaaaatgcttttagacaaaggactgttgtttcagtcaagaacaaatctcatgttgctcagagaacagccatgccaaattagtctgctgctcttgctaggataatcaatgatgaataacttttctctttggtgttctcttctaaaacatctataccatctaccaacatttgggaatttacttttcagtttttctatcaaaattaatcccctgcttgctgtatattcagcactttgtccctttgaagtatctttggaaacataatcttgccatcttccttttctaaaagggctagtccaagctcaaatgatgaagtaggtgatatttattttcagttttcctttatctctttttagcaaaaagctccttgcatgcctgtggtcccagctactcagcaggctgcggcaggaggatcc

SEQ ID NO: 195209 - DNA, 1000 bp, Homo Sapiens
caaagtattggccttacaggtgtaagccactgtgtctggcaaaaaaaaaaaaaaaaaaaaaaaaaaatcggtatttttaagataaaagtatactttaaatgtaaatgtaactcttcaaaggtctacttctttcaaagtcatatacaaatgatttttctttttaacaactttagttttggattttttcctatactcagcagtctgatttagtgtaatgtctgaagtttgagagataggtatttctactgtgaattatctatatttacataaacaattttggattaaatatttttatatttactgtatctgcaaaaatatattttagtataaactcttttgtgttttataattctgtagtttttgtaaaaatgtttttccaaatttattaaatttgcacggtcattcaatataaattccctgatgtttagcaaagttggaacaactacctaaggttttcctgtagtacaaaatgtgtacaataaaatctgtgatacaagtaaaggcactacaaccctctttatatttgtaacgtttttcctcaaaataaatattcttctgtattttaagggcttttattttctgaaagatctagtgacaataattgcacttttaatactttatttagtatgaactctctggtgttgaataagatgtgagaagatattagtggcattcacaatttttttttcccagacagtctctctgttgcccaggctagtatataaatgctttcctttgcaataaggcatgagtattggttaaatgtgtgccacattgtttattctagtagttttctccagtatattatcttacctacaatcaagtgtgacagccatttaaaggctttgtcacattcttcacatttctaggatttctcattcatatgatttcttttatattcagaaaagtctgaggtgttgccaaaagcattgtcacatctttcaggtttgtagagtctctcatgtatgaattagcctatgtttcttaagaattgaggatc

SEQ ID NO: 195210 - DNA, 1000 bp, Homo Sapiens
ggagggtgaggcaggaggatcactagggcccaggagttcgagtccagcctgggcaacatatgagatggtaccacttaagaaaaaaaaaaaaaaaaatcaaaacaagggccagactttttgttgaagaattacgacattcttgtcacagcctcccaactaaaataacatcttacagatttttgtgtattgtgttttgcttcattcggataatttgatcagacacatgcaactaacttctgtgttttcttatcttctgaacattgcctttggttctgggctaattgagtgggcaagtggcttctatttcaagataccttttctggaaataattatttaacttacagatatgggctagagtcagtaaaaatgtattttcataaaataggttgatattcatctctacctgaaataaaaaaactaatagaacttgttttaatgtgaaaatgcaaaacgttgcaaaccttaccaataagcaaagcaacttctgggtaggtaccaaaaagactgtctgtcacaagcttttattttcctgtatacagtaagtgttccatatatttttactgactgaatgtgtgaataagtaaatgcagttatagaaagtataacctaacaaaaagagaaacattgatttgactcttggaaaaataaagattatatgtttttataaagttacagatctgaggttccttatattgaactactggcactttatatcatatttgcttttgactatgtttccttttgaactagtgagcttttatactcctctaacattgtagtataacaagtttttatcttactttttcactatgctgtaaacccctgaagacaaggattaccttatttttcttattcactgtgtgtgaatattattgattttgtttcttttggagtcttaaaatattatgctattatgaattgtaagtttactttaaaaaacccttaatagttaattgaatatggcctttacccagaaacttgagaatataatgacaagctt

SEQ ID NO: 195211 - DNA, 1000 bp, Homo Sapiens
gaacggagtgattcctaagagcatgcagatgggttcatgactggcccttaggaaaggtgagagcaccttctggagtgcttgtttggggacaaaaaaatattttttctggtgcttatagacagtttttttgtatctcagaaaactctttttcacctgctcattgcgccagttttgaagaatatttcctatgaatgagatcacctgtttaacaagttgtacttcccactaaaaatacttgctggctatctatcctctgggattattctagactaaactgctatgataaatagccccaggaggacaatggctcaagtccagtggaagttaattccctgcagatataagagtgagggtgagcactgaggtgtgcccaccctcggggaggggcctgtcgtccccgagcaaccaggtaggggccaagtgcagaggacagcagcctggtccccatgtggctcacatcccacagtgaccacggttgcagggccgcaccttacggcaaggaaggctgggcatgtgctgggctgtgcccagggagggagccaggctttggtgggcagctcttccttccactaatgtccatccactgcccctttcaaacagtgtttggaaacagaatgctcgcagggcttgtcccgatgcatgttcacggcagaattgttttgccccctctccatccaacaggggagaagctggtgcccggagccagagaggttctgacggagatatttaagagttgtgcccattcagagcagacgctgagcctgacaccagcgaagcccatcagagtctctgacatttatcttagcaaagagcagatcaactcccagaccccaggcaacctcctccacctcttcttcaccaatgtccggccgccaaaaaaggtgctggaggatcagctcacccaggtagctgcccgtccccaccatacccaggccgggccttgggtgccctgcagggcgaacctgagagcctccccgctgcctctgtgctccacagatcc

SEQ ID NO: 195212 - DNA, 1000 bp, Homo Sapiens
cttgcctatttaagtgttttgcctgtggctagactaaaaataaggaatgaggggggtatcttccactcttgccatctcatcaccctattccctatatccagaactcagagtcctaatattagtatgagaaattggggtcaaagaggcatattatgctggctagtctagaaaccaaaccctaatttataacattgtctctatgggaaaatatgttccaaatttcaaacaatcaacttaaaattttttggaacaaaatccattcataagttggagtctgcctatagtttactttatgtataagataaggttaaaatattttattgccttataaagaaaatatgtcctagtcctctcagaaggtttatataaaactaattagaagcagatctgctgtaatcaccaaaagtaagcaattttaaacagattctttacgatgctatgtgccagaaaaataggtttccttttgtgccaaagaatctgatttgctgccattctcctgtgattaaatggagtttctgcctcacacgcaggcgtctgtcaaacgctcacacctgcagggcttccaaaactggacctgctggcaggactcgagatgaccacatggaaaccactagcaggccctggacattccttgggtttgtttcacccatggggccttactgccaactgaagacaagcatggcccagggcaaaaacaaaaccagacacatgcaagaggaagccagggaagaatccatcccgaggagagagaagacacccactggctgccggccctgcccactggtggtggggagcagctgggatgggctgtaacactgaactgtggcatgctgacctcctgcccaaggatcacctgaatctgcccaaagcttaggaagaaataaggatcactgccagttgggggaagcagaggaggcatttccagaattagtaacaataccattagccttaccttttctacaaaaaaagcgaactaggacttatcatgttaacatttgtt

SEQ ID NO: 195213 - DNA, 1000 bp, Homo Sapiens
gtcccaggcctctgtgtcttcagctccttccttagcactgggccctgcagagtgggggtgaaccgggccactgcagaggcctcacgactccagctcttcaaaccagggccgagcacagagcctccaacaccagagaacttgtgacacctccaccactggtggggagtctggccagcccaggccacatgcctcattctgacacacagccacaccccactcccacaagccaggctagtctgcaaagccaggggccaggccaggctggaggctgatctctgcctccctcaacacaggggcttcactctgcctgaaactagcctctgagtcacctgcagctgggcccagccagccccttgctttgccaggcgcagacacgcactccgggcaggggaagggaatgaacgagcacagccagtacttggtaggtgtggagggcctggaggttgggctgccgggggctgtggtgggcactggagacacagagtcggtagtgcagcacctccagctgagagagtgaacagagagaagccggaagaggcagaagagaaaagcatgagaggacagggtggtgaaggagagacatggtaccggacatgggagggggaagtggagaaagaaagcaatgagaacgagcccagaagtgaggagaaaaaaacaacaaaagcatggtcagtgaccatccaaacaactgcagtcccagcagctgtgaccagcgcagcaccctcctcggcagccaggccagagctgtgacagcactctcctcagccttggaggctgggggcggatagaccctccaggtcacctgggtggcctctcaatgtcgctggggcctaaaggcctctccagctcattggaagggcccaactcactgcccttccagatgggacccgctctccccagtgactctgaggccacaccgtgtgtgccatgtgcacaccacagcccttcaagtacccagggccttctctctgggacatgctgtcagccaccaaggcctcaa

SEQ ID NO: 195214 - DNA, 1000 bp, Homo Sapiens
attaaatgatatgtagtatagtcagagagttgtgcaaacagcaccatagtcagttttaaaacctttcatcactccaagaagaaacctttagccaccaccctccaatttgctaatcaccccagccctaagtaatatgatctattttctgtctttatagatttgcgtattctgcatatttcatataaatgaaatcatgcaacaaatatgtggtctcttgtgactgacttctttcgcctagccttagcatagcactttcaaagttcatccatgttggccgggtacagtgactcttgcttgtaatcccagcactttgggaggctgagacaggagcatcgtttgagcccaggagtttgagatcagcctaggcaacatagtgagactctttctctacagaaaaaaagaaaagaggaacaagagaaaattagctggatgtggtgatgcgctgtagtcccagctactcaggaggctgaggtggaaggatcacttgagcttgggagctggaggctgcagtgagctgcgctcatgccactgcactccaggctgggcgacagagcaagaccctgttcaaaaataaaatagtagcagaacttaattactttttttttttcttgagatggagtcttgctctgtcgcccaggctggagtgcagtggcacgacctcagctcactgcaacctccatctcccgggttcaagtgattctcctgcctcagcctcctgagcagctgggattgggattattacagacagttgccaccacgcccggctttttttttttttttttcttttttgagacggagtctcgctctgtcgcccaggctggagtgcagtggcgccatctcggctcactgcaagctccgcctttcgggttcacgccattctcctgcctcagcctcccgagtagctgggactacaggcgcctgccactgcgcccagctaattttttgtatttttagtagagacggggtttcaccgtggtctcgatctcctgaccttgtgatc

SEQ ID NO: 195215 - DNA, 1000 bp, Homo Sapiens
ctcccagactcaagcgatccccccacctcagcttccagagtggctggaagtagtgtgcacgtgtctggcccctttaatttaaagtgtatgggccatccttctgggaaactcttaactgggccaggctggcagccttagtccaggtcagagattgtaagtgttcctagtgccactggggcttggggtgatcccctttgctcaccagtctctgcaggatcaacccctgccgtctgggggcctcaaatttcccttctgcagaatgagtgctgtggagggcggctcctgggcttggcccctgcagccatgtcgccttttcctgctcttccctcgttttcctagaagtcctccagaaacccccacagcagaggccacggcatttgcctgttgggtgttgatgtcaagatttctcccctacccacttcctccccgaaccagcgcctccccaggccccctctctgcctgctcaggctccctccgtcctgtcctcgatggggctcaacctcctcacaagggtgtgcttgtgaccctcctcacaaggcatgctggattcccgctcagaggcatcccaggcttgcccaccctctcttcccacagggaacgtcattcccaccctctctgtccacactcgaagcttcccagcccagctgctggctctgactcccagaagtctgccccttcccctcgagggcccccagtgcctggagtgccgctacttggccgtgtgacccctctacgggcctgtttcctaatctgtagtagagggcccacggcatctcccacagggtctccgtgatgggggaaggagcggggaactaccttggtctgtgcaactcccggagccccgcccgggtgagtcaacgccccttatcccccatggccaccaaaagccctgccgggagcggtgggcaggggcgcccccgcgcgtgggagaaggcgctggcgcggcggttgcggcggcgatggcccgcggagataggggggtggccttatgtaacgggag

SEQ ID NO: 195216 - DNA, 1000 bp, Homo Sapiens
aggaagggaggtcccaatcccagcgcttcggggccagagcaaagcgaagaggctccccatggccataagcgggcggcccacgcagcgcattgcaggcaggtgcgagccacatgcgccaagtgcccggagcggccctttggtagttagtgttaattaaaattacccgcacgggagtggatccccgctgacaatctagaaacaagcaacagaccctctgatgtagccatctgtgccgcgcctctccgcaccgcccgccacgccttggtccctggagaccaccctccagggcaggggctgccgctcggccgggcccgcggggtccctcggcctgacatggccggtgctggagcggcacgtgcgcgcctcggcccctcggccgctcccgcccctcgccggtgcgcaccggcgctcggggagccgctggcccgggtgtccagccggcccttgccctgcctggcgctcggaccgccacctttgccgccccctcgccagcctccgcagcttccagactggccggtctgcgcgcccacccctgcctcccggaccggccaccgccggaggccgcggaggagggcccggccgcgcagatcccgcttatcgggcccatctcccgttacataaggccacccccctatctccgcgggccatcgccgccgcaaccgccgcgccagcgccttctcccacgcgcgggggcgcccctgcccaccgctcccggcagggcttttggtggccatgggggataaggggcgttgactcacccgggcggggctccgggagttgcacagaccaaggtagttccccgctccttcccccatcacggagaccctgtgggagatgccgtgggccctctactacagattaggaaacaggcccgtagaggggtcacacggccaagtagcggcactccaggcactgggggccctcgaggggaaggggcagacttctgggagtcagagccagcagctgggctgggaagcttcgagtgtggacagagagggtg

SEQ ID NO: 195217 - DNA, 1000 bp, Homo Sapiens
tttctcacccaattacctcctctactcaatttctagctcccatttttggttcctccatggcctttgtcccccaaatctgcccttgttgtcagagcactggactaggagtcaggagtaccaggtttgtcatcagttagccctttgtgtctcatggccccatctgtaaactggaatggggttttctcttgatctcaggatgtaagtgggatggaaaagtgcccaatctcacttaagactgtggtttcctgacccagagtttcagttctgtcttttctttttcagtatcaggagtgttacatgcctgttatcctaaacacacactcacactcataaaggtataaaactgagtcctcccagaagtattatctgtcagttgggtatctgttgttatgttacagatgattccttcactccttacaccaaccctggcagttgggtatgtggattacccatgtgtattagttcattctcacactgctataaagacatacccaagactggacaatttataaaggaaagaggcttaattgactcacagttacacatggctggggaggcctcaagaaacaatcatggaagaagccaagagagaagcaaaggcacgtcttacatggcagcagaccagagagaccgcaaatgggcgaaactggaacagccccttataaaaccatcagatctcgtgagaactcacttactatcacgagaacagcatgggggaaacctccctctgatccaatcacctcccaccaggttccaccctccacaggtgaggattatgggaattacaattcaagatgagatttgggtgggggcacagagccaaaccatatcaccatgtttcatatgaagaaagtgggaattagagaggccaaggaacttgcccaaggtcacatgctgggaatggtaggctgcggtaccgcaggaagacataagatgaaatgcatgaagaacattctgaaaaaagtgaaattttctccagtgcttggctttatcgtgagct

SEQ ID NO: 195218 - DNA, 1000 bp, Homo Sapiens
aaataactcaaaactgtacaattatatggaaataactgatcttctactgaatgacttttgggtaaacaatgaaattaaggcagaaatcattaaattctttgaaagcaattagaacaaagatacaacataccagaatctctgggacacagctaaaacagtagtgttaagagagaagttaatagcactaaacacccacatcaaaaagttaggaagacatgaaattaacaacctaacatcatacctagagaagctagagaaacatgagcaaaccaactccaaagctagcagaaggcaagacgtaaccaaaatgagagctgaactgaaggaaattgagatgtgaaaaatcatacaaaagatcaatgaatccaggggtttcttatttgaaaggataaataagattcacagaccactagctagactaataaagaaaaaagagatgagatccaaataaacacaatcagaaatgaaaaaggggacatcaccactgaccccgcagaaatacaaaacaaaagttcagaaactactatgaacacctctatgcacacaaactagaaaacctagaagaaatggataagttcctggaaacatacaacctcccaagattaaaccaggaaaaaattgaatccctggacagaccaatcataagttccaaaattgaatcagaaataaaaggcctaccaaccagaaaaagcccagaaccacatgaattcatacccaaattttaccagatgtataaagaagaccagatactgttcctactgaaactattccaaaaaattaaggaggagggattccttcctaactcattctctgaaaccggcatcatcctgataccaaaacctggcagagacacaacagcaaaaaggaaaacttcaggccaatacccttgatgaacatacatgcaaaaatcctcaacaaaataccagcaaactgaatgcagcaccagatcaaaacctaagccctcacaatcaagtagggtttatccctgggatgcaagctt

SEQ ID NO: 195219 - DNA, 1000 bp, Homo Sapiens
atttcaacgtcagtggcttgactctcccacctattgaacttatcaagaaatgtgagaggagccctttgacaagccacacctccttttctttatacacacagcagtgacttccaacaaactgtcatcagctctgcagttcaccacatttctcttaccaaattcactgacaagtaaatgctgtccaactccccccatgatggctcaaggtgggaagtattgatgagacactggtgtcactcaaaccccagaaagaattagaaaggcagaggagtaaacagcctccaaaggggcttgaagctgactagggcagtaataacacaagggcacaaacttgactgttcaccaagaatggaaatacgtcagtttgagcaggtcgcacaactctttaaatcttgacatgtgtgtcaccccaattatatcctgtcttccctctgctcatgcacccacattgtttcccgatttctgaggcctgcctctgccctcctccccagcacatgtgtcctcttaccaagacagtgaatcccatctccttggtagccttctgagcaccggcagacataaccaccttcggtgttgatgcacttggaggaggcaggggggcacactgggacacccatctcacattcatctatatctgtgggcaaaattatgaactagtgcaatatttaggcaatcctgatataaatgggactagttggaaagaataagcataatcgtatattcaattcttattcagtcctttacaggtgctgttgccaacatcaggcacgccctgcatcttggacataaagttcacaagttactgctgaattagtctttacagagttcccacctatccgattaggcaaatatgtaaataaatcactttctgccagagtttcagaccataaggactgagatctttccagcaatcgttaaattataattttgaggctattaatataaaataggaacccatccattaatctattcatttgactaaaacttatgacctaagctt

SEQ ID NO: 195220 - DNA, 1000 bp, Homo Sapiens
tggtgtctatggatgggtggataggagctagaggaacatatagatagaaagataggtagataaaaataaaaataaatgtaaatgtgtgtgtgtgcgtatacacacatttatttcccaacttctgtctactgagagatatgcttagaggcatatatactgcttagatgctggcttcaaaatatcatttctctttctctttaaaaggaatcaagaatacttagatatggctgatttcagtgcttgaacagacaagtagacaataaatatagaatattttattgtgacagaaagtgagcgaaattttcccattttgaagaatttgttttgactgtgtagtagaatgtttttataaaaaataaatggttaagaaattttgggacacagggcatcaagtcaacaacttattctcaaatcatttgtgggggggatttccttgcattgtgttttgaattttttgtttgtatctttgtaaagtcagtaatcatttttaaagtattgaaaataaacaaatgtggttgtatgagagctaaaaaggatattaaaaataatccaagctttttccactcttgggaataactgagacactggtagcaaaatcaaacagaactattgtagcaaattccccttagtcatgaaaggattttttcctaagagaagaaagagcaggggagaactggaggaggtatcccaagagtagaatgatgcctgttacttgaatcaatttccctagcctcttggttcaattgtctcaaaacctaagaaagtaaggactacaatgaaacaatttaaaaagtagtttctgtgaaactgagaaaactgttgatgccactagctctactgtttttattcctttactagaactcagttaaaatatgggagtcatacttgattctcctctctttggccatatattcagctaccatgtcctgttaaatatttctgttttcaaaaaaatctttctatattttttctatccctactctttttactcacttgtgaa

SEQ ID NO: 195221 - DNA, 1000 bp, Homo Sapiens
tctttgtacatctccgtcagagctcttgggcaactaggtcaattgtcggtgtgcagtaatatttgaaagaaatcatttttcttcccccccaggcagtagatctcaatgccaggcttaaaatattcagtaaaccatgatgtaaacagatgtgctgtcgtctcggctttgttgttatatttattgagtacaggcagagtagatttagcatctatcttaagggtcctagaattttttttttttttttgagatggagcctcgctctgtcgcctaggctggagtgcagtggcatgatctcagctcactgcaatctcagcctcccgggttcacgccattctcctgcctcagcctcctgagtagctggcattacaggtgctcaccaccaggctggctaatttgttgtatttttagtagagacggggtttcaccgtgttagccaggatggtctccatctcctgacctggtgatctgcccatctcggcctcccaaagtgctgggattacaggcatgagccaccgcgcctggccgggtcctaaaatttttggaatggtcaatgagcattcatgtcttcttaaagtcatcatatgcattaatccctcatgagaaagttaacctgttcttgaaagctgtcctttaaaacttcttgtctcaagctatgaaagtcccagatggcatcttcctccaatagaagattgttccatctacattgaaaatctgtttttagtgcacaaaccttcatcacttatcttagctagatcttctggataagttactgcagcttctccatcagctcttgctgcttcacactgcgcttttttgttatggacatggcttccttccttaaacctcaagaaacaacctctgctagctttcctctattcttctgcagctttctcacccctctcagccttcaaacaattgaagaaagttagggctttgttctggattaggctttggcttaaggaaatgttataactggtttgatcacctatatggaccaata

SEQ ID NO: 195222 - DNA, 1000 bp, Homo Sapiens
acaaagatttggtctgaccaaaagccatctcttctgatcatggtttcaagtaagagaattactcatatgtgttttgattgggtttatactgatgttcactatgtcttaagataaacacttgctaaaaggtgcattgagcaagcaaggcaattcttcatttttacatgattcatatgtatttattcagtttcagtgattcctcactgaaatgtttgaattttttcctacacaacatggactgacataacatcaaattaggatgctacatgccatctaaacttgctttttcttttaagtcatctgtctactcaagagactctacaatatacaatttgcttttgtgtataccctctggctattcaactagactgtcagctccttgagggaatgaatgagaccttgcaccttacatattttgttctcacactttttaccacaatattaatagctaactttactatattccaagcacatttataatcttatttaatcttcttaagcttcccaaatgagaaaaccaaggtctcataaggttaaatcattcatctgtatattttggggtaagaagtggcagacctgaaattgataactggtaagtcttaccatagagaccaccattcattgctacttccccaagttcccccaaaggtgctaaatacctttccactgttgaccgacatataggagtggctgctgcttcctgcctgggatgaagctactgcagtcacattcctggctcaacgctcatgttctgatctcccttgatgctcaattcccttttttggttaggggcagggcccaaagtttgaaccatgtggcattgccacctgtggaataccaagatttcttttctttaatgttgctaacccaagagctgtgacttttaagggtatggttatattatttcaagagtgtgtcaatattatactcagtaagtgaatctagagcaatatctctatcaaaattatcatgattaacatgcaaagaaaaaaattttttt

SEQ ID NO: 195223 - DNA, 1000 bp, Homo Sapiens
tctcatgacaaatttgtgataaatggatttcctttaatagccaggaaggtctgaagagaaaaggcttattttaaaataaaatttgtgatattattatttataatatggattaaaaataaaactttgattaattcatatgaacactattttagagatatagtaaagatgaataaaaatcaaaagataaaatgttctgggatggatttaagatccacttttaagaactcaaattatcccagtgtaaaacgtcatgattttgatgccagagactttaaagagctagcaagggctgccctgccagaggggagttatgaaaggatagaaaacctgatcttaatcaaagatctcagagacctataaatagaaacaggtgtctaaatcagagacagacagagaccccaaataagaaccatcctttaggacacatgctcggatctggggattgttaagggagctgagaaagtagcaattgttggaaatgtgcattaagaataggaagcataccttcatatcatatcctcactctctgtattcagcaggaaagtaattcccactggagggccagggggcccttaactcaaaaaagaaaaaagaaaaaactaagagttgcatacaagctgaaataaaaacatcagcccttcttttcctctgatttcttcttttaaagagtcagggaaaatgatcatcagtttttaaggcggagttcttccaagatgatgggaatcactcatctgccatgatctggcttgggaaagcattgtaattattgttattaagtgtctaagaatccacagggagatagggcattgtacacaggacaccaaaaaagctataatctatcaccacatcctcccctggaaaccctggtgacttgcagattggaaatagctgcattttgaggctatccaatgggaatcgataatgtaagagggcctgcttccctcctgttcacatggactggaaatctcctaaatgttttctgttataaatgctcaaattt

SEQ ID NO: 195224 - DNA, 1000 bp, Homo Sapiens
atacattcctatggagattctgtatgtaattaaaaaaaaagctacacctgcaaatttaaattttctccacatttcttctttgctctagaattaattttaaagcttctgtagttaagcagtaatccaacactgtaagttaaaatcaggataattaaagtcttcaataatctttaatataaaatttaatagttcttgacagtgtggggtctgtgataatattagtttttcatgaaaatttaaagactgtaacttgaaagtaagcttgagggtccattgtatttgcatatttggatattttcctagactaatgtagtgtactagtttgtgcttgattttgtcaggtttgtaaaatttataaactttgctactttaaataaggttcagagcaaactgataactaacctttgatgtgttactgtagctttcttaggttcttttaaatcctgtatagagacaggcagctagaggtagcatattaccaacaaaatttagtaatagctagtaggaaacctcatttgttcttttgcattttttagggatagcgattatattttccaatttttatgatttgattatgattcagatattatctaggaaaaatgtcctgttttttatttgacacctttttaaagccaaagccattttaggacatctttgccaaaattgaaggaagtcaagactcattaaattatttggtgaactccaccagttattttagttagtcactgtgatcagtgctttaacttgaattgtttgttttgaatcagatactattacaaagtaatctgatactactccttccctcacccccttcctttgtttttgtctaggagttaggccagcaacactaatgcatttgggaggtattattatattgtaaaaaataaacatttgtgaattaataaaacaagaattgtcagaatacagttagagtttgggtgtgttaatcatttcttcatctgacttcttgtaaattgaggcattttcaatatggcttatg

SEQ ID NO: 195225 - DNA, 1000 bp, Homo Sapiens
agtactatgctgttttggttactgtagccttgtagtatagtttgaagtcaggtagtgtgatgcctccagctttgttcttttggcttaggattgacttggcgatgcgggctcttttttggttccatatgaaatttaaagtagttttttccaattatgtgaagaaagtcattggtagcttgatggggatggcattgaatctgcaaattaccttgggcagtatggccattttcacgatattgattcttcctacccatgagcatggaatgttcttccatttgtttgtatcctctttgatttccttgagcagtggtttgtagttctccttgaagaggtccttcacatcccttgtaagttggattcctaggtattttattctctttgaagcaattgtgaatgggagttcactcatgatttggctctctgtttgtctgttgttggtgtataggaatgcttgtgatttttgtacattgattttgtatcctgagactttgctgaagttgcttatcagcttaaggagattttgggctgagacgatggggttttctagataaacaatcatgtcgtctgcaaacagggacaatttgacttcctcttttcctaattgaataccctttatttccttctcctgcctgattgccctggccagatcttccaaccctatgttgaataggagtggtgagagagggcatccctgtcttgtgccagttttcaaagggaatgcttccagtttttgcccattcagtatgatattggctgtgggtttgtcatagatagctcttattattttgagatacgtcccatcagtacctaatttactgagagtttttagcatgaagggttgttgaattttgtcaaaggctttttctgcatctattaagataatcatgtggtttttgtctttggctctgtttatatgttggattacatttattgatttgcgtatattgaaccagccttgcatcccagggatgaagcccacttgatcatggtggataagctt

SEQ ID NO: 195226 - DNA, 1000 bp, Homo Sapiens
tcaagattggagggctacaggatatctcatgcattcattctctctccttgaatagattatctgttcttatatagctcatgtggattatgatttatgattatgattattattttgagacagagtctcattctctcgcccaggctggagtgcagtggcacgatctcggctcactgcaagctccacctcccgggttcatgacattctcctgcctcagccttcaaagtagctgggactacaggagtccgccaccacgcccggctcttttgttgtatttttagtagagatggggtttcaccgtgttagccaggatgatctcgatctcctgaccttgtgatctgcctgcctcggcctcccaaagtgctaggattacaggtgtgagccactgctcccggcctcatgtggattatttccttagcactaaatagcccaaatctcataaaaccatgtggttttggatgctatttgtcaaaacttcctgctttcctgatgaaggagggattggtaggcgataaatggttccaaacatactcacctgtgggtctggattgtccaaagatcaacctagtatagttcccaaactgatgctggaattactctccacagatgtttgaatattgagtctctgccttaaatgctgaagttagtggaccagagagagagctcattactttttaaagtgtctgttcacattcctggggcagtctcttgacatcacaccattaactcttctgctatattgtttctccagttgtcttagctttgttcccggagtcagccaagaaaacactgtttattttcactttcatacattgtgacctgtacatttattttttactgtacagactctttataggcccttttgtaaagtcccacattctcagggaatgtgtcaacattgaagatgtctcatataccagttactagaatcatgttaactttaaatgaaatataattacttctgcaactgcagagactaagatgaaaattaagcttcaagctt

SEQ ID NO: 195227 - DNA, 1000 bp, Homo Sapiens
gccaagatcgtgccactgcactccagccgaggccacagagcaagactctgtctcaaaaaaaaaaaaaaaagaatttcaaggtgataacagcagagcattaaaataagtacagagcccttttgactgtggggccttgtgccactacacaggatgcatgctctgatttaccatatcatataaattttttttttttgagtctggctctgttgcccaggctggagtacagtggcacaatctcagctcactgcaacctccgcctcccaggttcaagctattttcctgcctcagcctcccgagtagctgggattacaggtgcccgccaccacacctgactaattttttgtatttttagtagcaatggggtttcaccaagttggccaggctggtctcgaactcctgacctcaagtcattcccctgccttggcctcccaaagtgctgggattacaacatgagccactgtgcccagctcatctcacgtaacttctagatgacccacttccatcttttcttcccaaattttggcataaactgtttgaaaagagccttctttacaggacactttcatctaaccagcaaaacctgttattttcatgacagacatcattagttgcaaatccacagctgtgttccaggtctttcctgctagagagtggctagcttgtctatatatactttgtggtgggcagaagctgaagataggaagtcagttatgatacagtaatctaggtatggcataagtatggcttggtccaggaaaggagcagtggaggtgtgaaaagtggtcatattctagatgtaacttgatggtagagcagaagggatttgctgatggactgaatatgagagaaaaagaggaatcaaggatggcattgaaattttggcctaagccacaggatagagagagttctaactgtcagaaatggggagaattgtggaaggagagggttttgcgggaaaattttaaaaataaatttcagtcataccatatccaagaagctt

SEQ ID NO: 195228 - DNA, 1000 bp, Homo Sapiens
aggtgtctttaaaattcgtttatgtttctgaaatttttgaagtaataagttttataaacttaatacatactagtgagatcgtatttcctggtctttgtctaaaaatcgtctctttcattttattctaatatttgcatatgttcctcatatctattgatttgaggattttttttattctttacactgcttgataaccttttgaaaattcaccatggaagaatgactatcacaggagaactggtacttggaaaccttgaggcattacaagaaaagtctcggtgtaatgtgcaaatgcttataagcaagaaggtgatttgccatgaccttcataaccctagtgtttacaacagtgcctgttctagagtaagcaatcagtagatttttttttttttttttgagatggagtttcactcttgtcacccaggctggagtgcaatggcgggatcttggctcactgcaacctccgcctcccaggttcaagtgattttcctgtctcaacctcccaagtagctgggacgacaggcgcccgccaccacacgcagctaatttttgtattttcagtagagacggggtttcaccatgttgaccaggctggtctcgaactcctgacctcaagggatccacccacctcagcctcccaaagtgctgggattataggcagagccactgcgcctggccccagcaaggtatttttttgaagtccaatgcaagtggtgattgtccgaccaaaaaaaaaaaaaagaaaaaatctcaaatatttcctagctagaaaatgtcaccacatccctctctcaattttggagattttttatcatgcctagcaacaatattggagagtaaaatgtaaaaaccatttcattggttataaagcactggaaatatgataattagggcagtccagatgctcactcttcctgttggaattatattgacattatcatttcattttgtttgttactcataacagtattcccatcttggcacttaagcagaaaagctt

SEQ ID NO: 195229 - DNA, 1000 bp, Homo Sapiens; identical to SEQ ID NO: 114837

SEQ ID NO: 195230 - DNA, 1000 bp, Homo Sapiens
tagagatatcaactcaaagatgagaaagagcccccttcagaactctcaaaataatcttgagcagaaaaccagtagagaaccaactgtgctcaggaagaacctaactgaaacaaataagctgctcccacccttggttccacccctactcctgccttctgcctgatgacattgcccactaatttcaacattgtaccgtttcatgagctgtctaaaaatcttctcttttctggtcttagtttctgaacttctgagagtgctctgaggctagtgagatcctcaggccatattctttttttcctggagaatgggtcttcagctggctatgcctgagtgtgaggactcacttatagcagctgcaggaggctgtgcatgattcctccccttcactcctcccctgcagaggaacagaaggggtctgatgaaaatgtaaggcctttcataagagaacttgttcatgggttgtccaaatcagaaaggcaataaaagaagagacctaatcccctggaagcaagtcctggcctaagctggtgacaatatttcagtaaggttcaatctgtggtgtagctggaagagaacctccatgtgaacttttccagctcctatctaagttacaagctggaaagtaagaactccaagtgaaaacctgcctctctcaggtttgggggatagaggacaggagtagaagctggtttccaaaaagcgttctcctgacccccaagaactcactcctctcattcttactgctgcctgcctcatacccctcaccaatcattcacactgagctctccagataccctagaaagggacctggaggtattgctggcaaattcctccctacccccaagtttctgaagaggcatcaactcaaagatgagaaggggcccccttcaaagctcttggaacagtcgagcaaatgaaaactcttaaagccataaattgtccgggtgcggtggctcatgcctgtaatcccagcactttgggaggccgaggtgggtggatc

SEQ ID NO: 195231 - DNA, 1000 bp, Homo Sapiens
gagtaagcaagagtgagagtggaggggggagaaagcacccaagacagaagctacactcttttggtcatctaatcttggaagtgactttccatcactatgccatattatatttgttagaagtgagtcactagatccagcccacactaaaggaaaggggattacagaaggcatcaaatccaggaggcagggatcactggggactgtcttagaggctgctgcccagaccccttttatataacagctctgaggcttatatggttttatatttatgaagagcttaggacagcacctgtttgctctgatcatcagcatgagtgatccttctgatccaatggagcacccatttcttcatctagaccctcctatgtcaacagttctaattttttcctgcaaagccctgtaaaagagtgtaggaaaggcaagacagtaactgctgcaaggaaagaggctgaggaaacagaatagaaaggggataggatgggagatcctgaaaaactctgggggagggtgcctagagacaaaagggaaagtaggagacccttgtctcctatggtgggctttacacttttttttttttttgagacaatgacttgctctgtcacccagaacccaggctggagtatagtggtgtgatctccaatcactgcaaccttcaccttcagagctcaagcaatcctcctgcctcagcctcctaagtagctgggactacaggcatgtgccaccacactcaactagttcatatatatatatatatgtacgtatatatatatatatgtatatatatatatatatatatatagagagagagagagagagagagagagtatgtatatatgtatattggtagagaccaggttttgccatgttgcccaggctggtcttgaactcctaggctcaagtgattcgcccacttcagcctcccaaagtgctgggactacaagcataagccactgtgcctggccagctttacactgtttagagtatttccacatacatgatc

SEQ ID NO: 195232 - DNA, 1000 bp, Homo Sapiens
gccacccaaagtgctgggattacaggtgtgaaccactgcgcccggccagaagtttttcttgtgagttgaggtgaacatctgaatcccctcggggaactgaggtatgtccctttcagggaatggcccctcttcatccaaaaatggggcccacaggtgataatctgttgggtttcccagaatgaagacatctggcataattagagcgtgaaggtcaggctgacgggggctagtaccccgatccaggggagaggtggtcacaggtctcgctccacctgccctgagccccatctcatctttttttttttttttttttttttttgagggggagtttcactcttgttgcccaggctggaatgcagtgatgcgatctcggctcattgcaacctctgcctcctgggttcaagtggttctcctgcctcagcctcctgcgtagctggagttacaagaacaagccaccacgtccagctaattttgtatttttagtagagatggggtttcgccgtgttggccaggctggtctcgaactcctgacctcaggtgatccacccacctcggcctctcaaaatgctgggattacaggcgtgagccaccatgcctggacttccatctggtaattttctgtctcgaggaggaactaccctgccctgacagaggctggggatgaaggaggaagagacagccggtcccctggataaagaggtgagggggtgtgaagtctgggagcccccctcccagggccaggctacagggggacagcagggctataccaggagtgccacagagcttgcatttgggtgtgatctaatccccagtcctgccctgacctcctgggtgctcttagccaagccctcttccctgtgtgtgctagaaagtgagggtcactcccttccacacaagggagtgaattgagggtggggatctgagctctctgagcagcaaagctggacacaggccaaattgccaatcctgagtccctctgtcatgtggacctgggaagctt

SEQ ID NO: 195233 - DNA, 1000 bp, Homo Sapiens
ggcaggcagatcatttgaggtcaggagttctagaccagcctggctaacagggtgaaaacccatctctactaaaaatacaaaaattagccgggcgtggcggcaggcgcctgtaatcccagctacttggttggctgaggcaggagaatggcttgagcccaggaggcggaggttgcagtgagccccgctgcactccagcctggatgacagagcaagaccccgtctcaaaaaaataaactgggacttctcttgccccacttctctttgctctgcctgagagggagacattgatcaaaccctccaggtctgatcgggaaacatttgccttctccttttgtggggtcctggggtgaagaacaggaggggaggctggagggtgggtgacaccacgcacccctgggcggcaagagacccaccagccaagtcttgcctgtgatgcctcccatttaccagcaggtgtcaccctcggccctctcactgcggcttgtccattccaccctctgtccagactgggctttagggctgcaaggctggagacacaggccagctttgcacgtgggagcaacaacggggacccaggtgtcccggctcctagtcccagagctccctgtccctgttgcctcccagacttggttcaggcctctctgtgagtatccgtgtgtgtccacacttccatccctgggagagaggccggccagggcgtggacattcattccctctctgggaccgtgccgggccaggactgtcctggcctccctcctcccgcacagcactgcctcccctccccgcaggctgggctccctccacagagctgaccctggcctactttctcagtcctgaaccctcccatcacgtcccccttgccaacctcagctgggcagtcaccctggtcccgctcccactccccaagagaggctgggaagtgttttgagactgaagttggggtccagtgtaaattcagaaggaacatggtataggacgaataaccaggatgctcacttct

SEQ ID NO: 195234 - DNA, 1000 bp, Homo Sapiens
acaccagcgcattcagcccctctaccggcgccccatgtctcactcccctggtgtggccagaactggggatggtgcaagaataaagccctaggcagtgtggaaagcagacagctgaccctgtgacttctggggctcccctccgaggtggggaagaacagaggagctggcctctggggtctgagaagaccagccggcccgtgggcaaagggacgacagcaaattctcctccagtgaccctcagcccctgacgccctgtctaaccctctcagatccaaagctgcgagccctcaggaacatgtggctacctctaacccagctcacttgcctggttaaaagcaaccacaggtgtccagcctgcaaacatttcccggcacacagggccctgtgcaaggggcagtgggtgacgacaccaagcccagttccggagcaccctgctgttctgcggcactgctgactcacaagcgattctgccgctgtgcagtctcaaagccagccccacccggggatctctgtcttccttggtctgtcatgaaggtgctagtaacccccaggcttctcagataactccttctccttcacttgtgcactcttgctctctgtctctctctgtctctgtctctccctctctctctcacacacacacacatgcatgcacgcacacacacgtgtgcacacatgttaaattctaacccttgcagtaccatggatttccattttgttgagatgaatagaggattaaaaaaaaaagaactgatcaggttgtcggcagggtaattatcagtaaaaagaaacagaggagctgtcccatccgcaggtggtaggtggcaccctccacgcctgcaggccagggctttgtgatctggctgaccccaatcctgatcttattgctaccacccattaccacgtctccttgggaggactcaacttcctaatgagaaaaacatcccccacttcaaagaggctgcggggaggaagaattgaaatgatgtagataaagctt

SEQ ID NO: 195235 - DNA, 1000 bp, Homo Sapiens
gagcatatcaataataaaaatgtattgagaaccaaaatccaattcttaaattggcatataaaataatgcaggcttaaaatatactgtgcttgggccaggcacggtggctcacgactgtaatccctgcactttggaaggccaaggcgggtgggtcacctgaggtctggagtttgagaccagcctggccaacatagtgaaaccccatctctactaaaaatacaaaaaattagctgggtgtggtggcaggtgcctgtaatcctagctacttgggaggctgaggcaggagaatcgcttgaaccctggagacagaggttgcagtgagccgagattgtgccattgcactccagcctgggcaacaagagcaaaactccgtatcaaaataaataaataaataaaataaaaataaaaataaatttaaaaaataaaatatactgtgcttgtaacaagatatgtacttggatatagcagatgaaaaaaaaaaagcaccaaaaacaatacaagctaatttttcctcctaacctgagatagttaaccaattcaccagcataattcatcaacaccaaggaattcatctaataagagaggaacagcattcagatttcctgtaatttatatttgtaagacataccactagtaaaactcaagtcaatttcacaaactgacagaagatgtaaaacttttaaaaatcaccctagaattttagattagtagtatcactgattatacttgtattatttctgaaaatgtagaggtgataagcggccatttttatcacagcctaaatttttaatgtgttgctttgaaatatctgtgaaattgacaagtattgctttgtttgtttgtttgttttaatcaccacagcaaactacacttactgatgaattgtaaacttttccattggaaatgtaagctgggtgaaagggctaaaaggaaataaaagcgggtgagtttacaaagggaatttgttggcaaataaattagtcacagtcaatggaagctt

SEQ ID NO: 195236 - DNA, 1000 bp, Homo Sapiens
ctagctattttacattacgttaagggtttggccggatttgccttctagagatgtaatggaagatttgtgaaataatgtaaaacaaagcaaaataagaaataatgtaaaatactgcacaactacacatatttgggctaattatattggcgagtctgaaaatttgactatttcaagatatgcatctattacttctttaaaatataaataataattagaattaggctccagggctgtctgtcacatataattttcttttattgtaatgcatagataataatgatagttggcttatttatagtgagaattgtttctaaattagtatagcagtgttaaagcaatttataggtctctgcaatcctatttatttcttgacaaagccattcctcttgcattttaaatgacaaatttgcccagagtctgttgaaaatattagtaattttgatttaatgcagtgcaagtatgtgagctattgttggactcattaaggttgctgcggtaatcatctagatggtaggaaggactagagatgatcaatgatatgactggggtataagaacttactcatgtcagaactagggtcaaaacagagatggttggacacacatcctgtgttcattttctctagattccaaagttctagtttttaatcttcaagaaatgtccctgtaggaaaaaaaaatgattttttcttcttacctcataggatcttagttagaatggacttctgtaaaaaaaagcagattaacaagagaaaaacaaagagtagttaacatgtatattttacttacatttaatatgtatatttcacacatacgtgggagacacccagagaatgagtagttctcaaagaggtggtttgaattccaccttatatagcatcttcagcaaagaacagtacatttttaggtaagtgacaagacaaaggaaaaggactttgagtttctagggacagtaacagtaacttgtgggaaggcaaataactggccagttagtaaagctt

SEQ ID NO: 195237 - DNA, 1000 bp, Homo Sapiens
gcctgcaaatggccattgcttagtaaagtgaggaagtcagaatttatgaagcaacagtgagagatgtcacacagtggtatatgatcagtccaccatagtttaagaatatagataaaacacacaaacgtgcacatatttcaagaggccgatatcccaaagtctaggagcagttgcccaaaggcctggagggaggaaatgcccaaagaataaaagattcaacgcataactatgattagagtgcagggctggggtcagggtgttatcgttttaaacaaggatgagatcagtgctggtctgagccatattgaagtctgaggcaaaagggaaaaatcaataagactgatcttgcctttatttaaagttttaaagttttgttcatcctagggtttttggcattaaaacttctgaatttttaagtacattacaagttattttaagcacgttgcaagttatttattttaagtacattacaatgttatttattttgattattgaatgttggtgccttttgaaattgtgcagggagatgggtgcctctcttccccacaccagccaatccctggccctgctagagtgtaaactacctgaagggatgtattaaatgagatctttgaactcatctggcacaagcttaaatcctggctcagatctgatcccagccacatcctgaatacgttaccatgggtaatttatctcctttttaaacgtttggtttatttctcagtaaaagagccatgaaacctaactcatatgttcattcatctaccaacaaatatttattgagcacctattatgttattgaggcataggcaatataagttaacaaaacaaaacatctctattgttatgatgttttcatcttagtttgagagagcaatgatcagtaaaaataatatgaaatatcatgtagcctagttatggtaaatgcttagaagaaaaataaaccagggtggagtgacagtgatggcagcagagaggggtaagaaagaaggacaagctt

SEQ ID NO: 195238 - DNA, 1000 bp, Homo Sapiens
caaactctctgtgtggcatttaagattctaatctacttgtctagcctcatcttcagtcaccctgcttcctttcccatatctccattatccacttaccatgtcacactgtagttattttttggcaactttgtctaccccagtggacagtgaacttcttgaggtcaagagttgccttatttcacttttgtacatccagtgtttatcaaagctgcatacagtaaacattgtataacagtctaatgttagaatatgcttgaaatttattcaaggcatttagagtggctactattttgagcagaggaactgaagtagaataaaaaactgaatagatgttttatgcttgtgaaaggtatgcataccaactaaaatgcaaaatatcaggaggatgatattctgtcaaggtgatcatagttagcatttaaggatagtatttcagttttttaaaataaagttttaatgttgtttaaataataattacattttttaaaagaatactttagatctggcctttataactttaagcctgtaactgaatgacctaccacatggaccttgaattctgtctttcatcatctatatggctgttaccaattttctacaggctgtcattctatttctataaaccattaagtccagtctcatatatttgacatggcaatggaaagaggactagaccttattttgacaaaacggtatttaaattccaattctgacatttaaaagctgtgtaacataggtttattatatgtgctgccacatttatgaaaatatccgtataatacctgtcttgcagttattgtgattatttcatatttatatatttatgaaagcctagcatatttcctgttataaagtcagacctcagtaagtattagttgctttcattataaagataggcccaattataaagatctgcctgctctatcaagaactgcctgctctttgatactgtattcacttaggaagcaatctaaattgtggagtaaccctggggaagctt

SEQ ID NO: 195239 - DNA, 1000 bp, Homo Sapiens
tgcctctgggtttcaagcgattctcctacttcagcctctgagtagccatgataacaggcacatgccaccatgcccggctaatttttgtatttttagtagagaaggggtttcaccatgccacctgcttcggcctcccaaagtgctgggattacaggcttgagccactgcagccagcctctgccatattctattcattagaagtgagccaataagtccagcccacactcaaagaaggtattacagaagggcatgaatatcaggcagcaaggatcattaggagttatcataaacacttcttacaacaatggtattggagttttatattttggaaatgatcatttggcagatggtcttggttataataaattattttgtttttacatagcagctaatatcagattgttaacaaagtgagaccctgtgagtttagaaatttggtgataatatcctagaaaatgcttagtatcaggtcaggctttatgacctacttgcaggtactgatcctataaaatctacatactattttcataggttcaatgtatttcatctagtagactctctttcagtgaattaaatagtaaactaatttctgcttctccgaattctttaaactaatgaacagaaagtcaattttacaggtgagaattgagtttattgtttatttggcaaaattgggctgttatacataccttctaaaatgtaagagatgtgtgtatgactttaatctctaggagtttatatcaattcatagaagatatgctttgctaaaaccaatgaatattattttctttatgcctgtaaagcttcacttaatatttcttttataaattcactggcaatgaattctcttagcttttcattatctgatattctctttgggtaaatgattctagcttgaaagtttattctgtcagtactctaaagatactgttccagcctcttccagcttacatgatttctggttagaagtttgctgtcatttttatctttgttctttgta

SEQ ID NO: 195240 - DNA, 1000 bp, Homo Sapiens
cactacggatatgggccactgtattctcttttttgctcattaaatatggactctgtgtgcacttattctcaaccagcaccaaatggtatagctccaggagtatttgccaccaacaataatgtgcatgctgctagaagcaaattgcgatttcagcagcacccataaacatttaccagcacctaccatgtgcaggcactatactcagttttagagtttccaatagatatgacagatattgtttttaaaagctttactatctagttgtgggaaagaagacttacaagtaaaaatgcaggtaatgatgtatggctatgtattagtaccaaataaattctataaacactatgtacaactttatatatcacatcaagtaaatttattctacatcctattaagtaaaccacagatggtctctgcctttccatccatttacctctcctggaagccacacccttattttctgttgaggaactactcctgtcctagaatctggcaatctggttttaacagcaggggcccacggatggcatgtgaacaaccctggattgagtgatgatgaatgattcagaggtggacaggagcataataatcagtctcagaaattttgctaggacttctgggagagtaaaactctacactgggattatgaaactggcaaagtctcagcctgcagctactgatggctgtctttgccaccattttagtgaacctactatgggatgcagaagagggccagaacaagggacagtgggcaagagattccggaagacattatttccacacctgggcccagtgtgtttgatctacccctggatttattaattatgtgagtcactaaagtcagtgttttgcttatccagcttgagttgggtttttattacttgcaacaaaaaattgtcctaagacatctataaatattttgaaatgattaaatgacttaaaaatgtcaatatctggcctcaaatacgtcttacagagtagacacaatgagtgaagctca

SEQ ID NO: 195241 - DNA, 1000 bp, Homo Sapiens
aagtatacagctatgtagagagtattcttcagtgcctggctataaatcatccatgaaaaccaatagagacccagtccagaatgttagaactgagagggaatataggaaggacccagagggaagaggaataccttgcccattccctgtcagctcccagagggcaatccacattgtggaactaatttccacaaacacacagaagtccaccctctgcacatccccaagctcttcttctctgttcataccctcctccttgtaaggggtgtctgctgtgttatttaacaatattcaattcttttgtaaaagacaagaaaagcaaatagagttgatacaactcttaagaaatactcaatataaatgtaagtataaaaggagcttgtgagacacagaagcttatagtaggtattaagcatagatagcaagttaatgacctgtgaactatgtcagacatagggaaagaaagaagcacatcagtgtgttaaacaaaggtgaggatggaaagcccaaaggcagcaaaaattcatggtctgttaaatgttgatgagttaagagagaggccaaatataatattcatgggacactgaataggcacgagagtttaaattgcctcaactcactggtgacacccattctggccaggtatcctctgcctgagatgtgcagatagaatccacagctgctcagtaagttaatgtggaagctactgctgagaccaagccgatttgcccctgtgtgtcttctacagtgcaagtgttgactccaggcactgtccatctgctgagtcccttgctcacaatcaaacctggtccttgtaatcatgcagacaatggagagagctgataaggtggaaagagagataggacctagaaacattgcgtgatgcagaattcacatagcatggttcttttaaccctctaccctctccggtgtcttcacctacaccatatcttttttcttgcatctcactctgttttacgttgattcaattaaccacaagctt

SEQ ID NO: 195242 - DNA, 1000 bp, Homo Sapiens
ccacctcccccgtgcgcgccacttttgaatcctgcaacgggtttgcctctgagcccgtggtgagcttcccgcagggccctggaagtggcctgcagtgaagcacaggggccacagggtggcagtgtttcctgcggatgtggctctcacccagttcaggggcgctcaaggcgtaattggttaatgcaggtctgtttctctttgtccttgaaaagacagcaactttgagctccaaggagcagtcttctttgtgttttacggctttttgagtctctactttccgcctccccgggatgaggaatggtgtgggaggagagtaggactctcccgcgggggactgctgagatgatcacagttttagggtatggggtgtgataaggcacttgagactcagagaggggaagtaagtaatccaaagtcacacagctgagtggtacctgaactgcatcttctgatccttgcatcagttcctgtccgctatgccacttggtcagccttcacaggccgggatgcaaatggagacattggggttgggattttcactcgcgtccgtgtgaagagacgcgagtgtgagaacaaagctgtttatttcacctgggggcaggcgcgctgagtccgaaaagagagtcagcaaaggcagacagatgtggggctgttttataggatttgggtaggtagtggaaaattacagtcaaagggggttgttctctggcgggcaggggtggggatcacaaggtgctcagtgggagagtttttgagccaggatgagcctggagaagaaatttcacaaggtaatgtcatcagttaaggcaggaacaggccattttcacttcttttgtgattcttcagttacttcgggccatctgggccatctggatgtatgcgtgctggtcacaggggatatgatggcttagcatgggctcagaggcctgacagggatggaggatggggaagggaaagatgctgaatgagcactgggtcaagagtccagaaatataagctt

SEQ ID NO: 195243 - DNA, 1000 bp, Homo Sapiens
ctcctatatctccctccagttccccaaaagagaaactgagcagcaaaataagattaataccttgggtagaataaggtcagaaaaaaattaatagggtcttaattcaaatggctctctgggaagctaaattagtttgtaaagtcactaaacccttcttttcacaaagtgggactttacaaagctcagtgctcatagtgaaaaactggccaaagttaaccaaattataaagcagaaatgtcattccagtaatcttttattataaaggtgagaggtgccaaattcatttctaatcaaatattcagtaataatgcaaagacaatagcatcatcaggtattaccttgctcataagaaattatgagacacaaaagctaaaatcacctgtgatttctatttaaacataacagactacaaagtagcttcttaatattataacgaagcaaaggagttcaaaagttttacatctaattcttaaccaaaataacattaaactctggaaaacctaaggctagaaggaaagaaaggacaagagaaaggagaacgtgccctatttaatatattccttgctcagcttcgttcaaacctgtgcctaaaaagttagtatttcaaaatatggatcttttaaggaaagaaagaatgaaagaactggacttccttgagtttcttcatacacagtcagaatattagatttatattgattttaccacccagcttttagtgaggatgtttgcattatacatcatcctttctgcttccttgaaagtttcaacggctaagatactgcaaacagttctcaccttaccagcacgcttagtcatcactggaatgtcttaacacgttttcttatagagctgcacctccttcatctgctgctttctattactactttgtaagtgtaccctgaggctaagcaattgaagtatacaaggaaggtaactaatcatttaaattgattctcattgagaccaccttctttcttagtcattctgcctttctaagctt

SEQ ID NO: 195244 - DNA, 1000 bp, Homo Sapiens
aacatgcacatatttacattttaatttatttttatttattctttttattatttttaaaatagagacaagctctcactctgtcacccaggctggaatgcagtggcgccatcgtagctcactgcagccttaaactcctgggctcaagcaatcctcctgcctcggtctcccaagtagctggaactaccggtatgtgctaccacgcccagctaatttttaaaaattctttgtgatgatggggtctcgctatgtcacccaggccggtctcaaactcctgggctcaagtgattctctcacctcagcctcacaaagcactgggattacaggcgtgaaccacggtgtccagcctacattttaatttacttatttatttttgttttataattttttaattttaaatttatatgggtacatagtaggtgtatatacttgtggggtacatgagatatttagatacagacatacattgtgcaataatcacatcacggtgaatggggtatctatcacctcaagcatttatcatttcttgtgttataaacattccaattatacattttattttatttattttattttattttattttattttattattttattttattttatttttatttttttgagatagaatcttgccttgtcgcccaggctggagtgcagtggcgcgatctcggctcactgcaagctccgcctcccgggttcacgccattctcctgcctcagcctcccgagtagctgggactacaggcgcccaccaccatgcccggctaattttttcttttttttgtatttgtagtagagacggggtttcaccatgttagctaggatggtctcgatctcctgacctcgtgatcggcccgcctcggcctcccaaagtgctgggattacaggcgtgagccaccgtgcccagctaatttttgtatttttagtagagacggggtttcaccatgttagccagtccaattacactcttttagttgtttttaaatgtactataaatta

SEQ ID NO: 195245 - DNA, 1000 bp, Homo Sapiens
ggtttcaatgtctatctcatgagtgtggcacaggtgagtgaaccaggaagtagggatagaaaaataaaaccgtatcttcagcaagcactgcagaattatttccagcaagtgcacttcctcctccccgctcaatgttgcaagcagaaaatggaattactcttgtagcaacagctttctttttatcagttataggtgaagtggccagaagagaatcatagaatattgaggctagagaaactagataccatcttacctagcttcttcatttatgacccaggaagctgacatacagagaagtcatgccacccctcagtgacactggagcagcaaggacaagaccttctacttagtttccaagataattatttggttgtagttgtgggaatatcatttactggatttccttaaacccaggaaaattcagatttagaatttgatttcatttctactgcagcagaaccaattaccaccaacttggaagctgaaaacaattctcatttcttagctcacaattctgtagtttggaagtccaagcatgccatggagggtactcagctcaggttttctctaggctgcaatcaaggtcttggtcagctgcacttgcacctggagctcggggcttcttccaagctcatgtggttgtggcagagttcagttccttgtggttttaggactgaagtctgtttccttgctggctgtcacctgggagatgctctgaactcctagaggctgcccttactcctagccatgtggtccacagccaacaacggagccaaatctgtctcgaattcaatcttctcatgcttcaaatttcccagacttccaatcgctctccaggaagagcccagtctcttttaaggctcacctgattagctaggtcaggtttatccagagtaatcgccctcttttaaggccacctgtgccatattgtattacctaatcatgggagtgataacccatcatatttacaggtcccttccacactcgaaggttggagatc

SEQ ID NO: 195246 - DNA, 1000 bp, Homo Sapiens
caagtttttatagtccaaaataaaatggtgattactacacaccaacactgaaggaaaacatattgcttgaaattttctaaaaggttataatgacttttatctttacaacaaattgaataaagagtctcaacccaattacaggaaacaaactcctaccaatagttttagacgatcctaattgtaagtgagagaccttagatttaacataatatccaacctaattatatttcaaacacattagaagacataacattctacaggaaggaaactttgttgacttattgcttaaattatggaaaaacgattcagttataggatggattcttgcatttaaaagaagttttttctacataatggccttgtaatttgtgttaagaagtagattccagttccaaagaatgatcatgcatttgaagttgtgctctcatctagttccatagatatttgaattgatctgaactcaaggttctcaccaaggtttcagaagcaaatcttatttaggtgagtttccattctataaatatattttaactttttgtctaccactctcccttgtacattacaatgtccttgtttatcattaataaatgataaaatatggcacaaaaggtactcccctgatagaaaggcacaaaaatatttataaatgtgctcttccattttaagttattgaaaagatattctaacattttccaatattaaacaatcttaatgtctgctacttgggagtcttcaggttttccagccttctgaagctcctttctgcattaaaattcaaatagaattatttcaatttcattgggaatccaggaacctcctaagtggcagcggactggaaaactgcatattctcgtgggcccagaagacactgtttaatcgggtctttggttccttttagtttatacaacatttatattccttaccacataattggatttcgttttgtaatgggtagtgttgctggccagtttggatcccatgtgatccctttcactggatc

SEQ ID NO: 195247 - DNA, 1000 bp, Homo Sapiens
agtaccatgctgttttggttactgtagccttgtagtatagtttgaagtcaggtagtgtgatgcctccagctttgttcttttggcttaggattgacttggcaatgcgggctcttttttggttccatatgaactttaaagtagttttttccaattctgtgaagaaagtcattggtagcttgatggggatggcattgaatctgtaaattaccttgggcagtatggccattttcacgatattgattcttcctacccatgagcatggaatgttcttccatttgtttgtgtcctcttttatttccttgagcagtggtttgtagttctccttgaagaggtgcttcacatcccttgtaagttggattcctaggtattttattctctttgaagcaattgtgaatgggagttcacccatgatttggctctctgtttgtctgttgttggtgtataagaatgcttgtgatttttgtacattgattttgtatcctgagactttgctgaagttgcttatcagcttaaggagattttgggctgagacgatggggttttctagataaacaatcatgtcgtctgcaaacagggacaatttgacttcctcttttcctaattgaataccctttatttccttctcctgcctgattgccctggccagaacttccaacactatgttgaataggagtggtgagagagggcatccctgtcttgtgccggttttcaaagggaatgcttccagtttttgcccattcagtatgatattggctgtgggtttgtcatagatagctcttattattttgaaatacgtcccatcaatacctaatttattgagagtttttagcatgaagggttgttgaattttgtcaaaggctttttctgcatctattgagataatcatgtggtttttgtctttggctctgtttatatgctggattacatttattgatttgcgtatattgaaccagccttgcatcccagggatgaagcccacttgatcatggtggataagctt

SEQ ID NO: 195248 - DNA, 1000 bp, Homo Sapiens
tcattcaggagaaggttgttcagtttccatgtagttgagtggttttgagtgagtttcttaatcctgagttctagtttgcttgcactgtggtctgagagacagtttgttataatttctgttcttttacatttgctgaggagtgctttacttccatctatgtggtcaattttggaataggtgtggtgtggtactgaaaagaatgtatattctgttgatttggggtggagagttctgtagatgtctacaaggtccgcttggtgcagagctgagttcaattcctggatatccttgttaactttctgtcttgtttatctgtctaatgttgacagtggggtgttaaagtctcccattattattgtgtgggagtcttaagtctttttgtaggtcattaaggacttactttatgaatctgggtactcctgtactgggcgcatatatatttaggatagttagctcttcttgttgcattgatccctttccctttatgtaatggccttctttgtctcttttgatctttgttggtttaaagtctgttttatcagtgactaggattgcaatccctgcctttttttgttttccatttgcttggtagatcttcctccatccctttattttgagcctatgtgtgtctctgcatgtgagatgggtttcctgaatgcagcacactgatgggtcttgactctttatccaatttgccagtctgtgtcttttaattggagaatttagcccatttacatttaaagttaatattgttatgtgtgaatttgatcttgtcataatgatgttagctggttattttgctcattagttgatgcagtttcttcctagccttgatggtttttacaatttggcatgtttttgcagcagctggtactggttgttcctttccatgtttagtgcttccttcaggagctcttgtagggcaggcctggtggtgacaaaatctctcagcatttgcttgtctgtaaagtattttatttctccttcacttatgaagctt

SEQ ID NO: 195249 - DNA, 1000 bp, Homo Sapiens
aaccagtcagaacattcccttaaaccaaagcctaattgagcaagatcctatcttcagctctatgcaggctgagcaaggtgaggaagctacataaaaaacgttgcaagctagcagaggttggtttggatttaaggaaagaagctgtctataacataaaagtgcaaagtaaagcagcaagtgctgatatagaagctgcagcaagttatctcaaatatctagttaaggtaatagattaagatgactacattaagcaacagatttttcaatgtagatgaaacagccttctgttggaagaaaacaacatctgggactttcatagctagagaggaaaagtcaatggctggcttcaaaatttcaagggacagattgactcttttgttaggggttaatgcagttggtgactttaagttgaagccaatgcccatttaccattctgaaaatactagagcccttaagaatcaagctaaatctactctgcttgtgctcaataatgaaacaacaaagcctggatgatactgcatctgtttatagcatggtttactgaatattttaagcccactgctgagacctactgctcagaaaaaaagatttatttcaaaatattagttcttattgacaacgcatgtagtcatctaagagctctgatggagatgtacaaggagatgaatgttgtttgcctgcctgctaacacaatatctattctgcagcacatgggccaaagagtaattctgacttacaagtcttattatttaagaaatgcattttgtaagactatacttgccatagttattcctccaatggatccaggcaaagtatattgaaaacctctggaaaggattcaccaacctagatgccattaagaacattcatgattcatggaaggaggtcataatatctaccttaacaggagtttgaatgaagttggttctcatggatgactttgagggggttcaagacttcagtggagaaagtaattgcagatgtggtagaaacagcaaga

SEQ ID NO: 195250 - DNA, 1000 bp, Homo Sapiens
cggtgccctgtcaccccgttctgcaaacctccagcgctgcaaacattgcttcccaccaaagggcctcttctgccactcttaacatgagccagggtgtgtgttcactggcagctttgatagttagaagctagcagctggccatggttcagtggatgctgggtctttcctgggagggcaggggatggcttgtaaatgacatgagccagcagagttccttgttcaatgtgaacgttcttaagagattcttggtctgagcacagtggctcatgcctgtaatcccagccctttgggaggctgaggcaggtagatcgcttgagcccaggagttcaagcaggttgggcaacatggcaaagccccgtctctacaaacaatacaaaaattaatctgttgtggtggcacatggctgtggtcccagctactcggtgggctgcggtgggaggatcacttgagcctgggaggttgaggctgcagtgagccatgattgtaccactgcactccagcctgggtgatagagcaacaccctgtctcaaaaaaagaaaaaaagaaggtcttggctcaaatggatgcagtatgtctgtgtggcagacagaggggttgtatatgtgtatattccgattttttacgtgtgtgtgtgactgagtctcgctctgtcaccccggttggagtccagtgacacaatctctgctcactgcaacctccacctcccgggttcaagcgattctcatgcctcagcctcctgagttgctgggattacaggcacgcaccaccacacccggctactttttatatttttagtacagacaaggtttcccccatgttggtcaggctggtcttgaactcctgacctcaagtgatctgcctgccttggcctcccaaagcactgggattacaggcatgagccaccgtacccggcctcttttaagtatttcgtgagcactgtgtgcagtgctaggtgtcctgacagattcagaataacgttagaagcctctgggtaatgggt

SEQ ID NO: 195251 - DNA, 1000 bp, Homo Sapiens
gggtggatcacctgaggtcaggagtttgagacaagcctgaccaatatggtgaaaccccgcctctactaaaaatacaaaaattatctgggcatggtggcaggtgcctgtaatcccagctactcagcaggctgaggcaggagaatcacttgaacccaggagacggaggttgtagtgagccgagattgccacactgcactccaacctgggcagcagagtgagactccgtctcaaaaaaaaaaaaaattaaattgtatttaagaagcattttgaggctgggtgcggtggctcacgcctgtaatcctagcactttgggaggccgaggcgggcggattgcttaagcacaggagttcaagaccagcctgggcaacatggtgaaaccctgtctctactaaaatacaaaaaattagctaggcgtggtggcatgtgcctgtagtcccagctactcgggaggctgaggcaggagaattgcttgaacctgggagatggaggttgcagtgatcagagatcgtgccattgcactccagcctgggcaacagagcgagactccatctccaaaaaaaagcattttgaggtactattgaacaatttataattttcagtactaattaatatttctctactattaatatttctctactatttttataaaagtttggaaaaaaattatggactgcagaaaagagtagacttgacaggctgtgaaggatgggtggggcaggattaggataagtagactggtgagagtatttcagctaaggggagtcaaaaagaatcacttcttgaagtagaggagtgtgattcagaaaaaaattatttcctcttttgccaaatgctgatcatgatcatataatttttttttagaaaaagaagatgacttgaaaaatagaaataaaaccttttaaagaaattttcgtcatgtctatataaaatcctaccatgttcaaggaatgcctctcacttcatatctcatttaaacacacaggtttccctatttggatcc

SEQ ID NO: 195252 - DNA, 1000 bp, Homo Sapiens
atgaaaaacaagctgtacaagtgacgtgaggacacgaggtaagatgaataaaggaaagttatggggttaatgaattagtgctagtaatgaactggtgaattgcatgagtagagtactagagtaagtaggctagaagaataggaaatgacagaatgagatgtttaaaagagaaattcaaagatggtacagggtgatgacaatgtctagatatgacacatgagtgggtcacggaagagtgatagaggacaagattattagaggtaaggaaacaaagggattgaggtcaaggtgttgggtcatctaattggattttgaagtagatagccatgatgacagaaaatatataaatgagtgaagagcagtgactcagaggtccctacgttgcttaacaagaagggaatccatagtggcaaagaatgataacgtgtgtttcaaaagacagagttttgaagtgtgaaataggagtgacagtttggaagtagcaacagggagcagagaggacgctacctcaagctctaagcgtatgtagtatgtagcatataagaggaaaataataggctgggtgtggtggctcacgcctgtaatcccagcactttgggaggccgaggtgggtggatcacgaggtcaggagttcgagaccagcctggccaacatggtgaaaccccgtctctactaaaaatacaaaaaattagccaggcatggtgacatgcacctgtaattcccagctactcgggaggctgaggcaggagaatcgctttaacccaggaggcggaggttgcagtgagctgagatggctccactgcattccagcctgggcaacagagtgaaactccatctcaggggggaaaaagaagaaaaaataaagacattttccacttgaagggctctagggaaagcagggtttgctggagtcaggttaatttcaacaagaatctgaaggaaatgttcaataaaaagattaaggaagtagaggaattttctgataactggaaacaagctt

SEQ ID NO: 195253 - DNA, 1000 bp, Homo Sapiens
tgacaattatttgttactactactaataatgatttagcaaaccagcatttatggaacacctgctatgcaacagattctatattaggatccaacatgtggactgtgaatgaagacgaagatgctgtcctcatataaaaccttatgttagtgtccgcaagacacagtcacatgcatcatctcagtcttcaaaggttctagcctctgggagcaggtcttattcatcctgttttacagatgaggaaattgagacaaggggtaaaggctgcatataagacgtagcacattagaggcaggactctggtcttcctgaccccagacctaagctctctgtgctgtgctgaagctgggaataaaactgaaccacatttgagcttcatgggtgtaaagtgctcatatgtattagtctgttttcacgctgctgatgaagacatgctagagactgggtaatttataaagaaaaagaggtttaatggactcacagttccatgtggctggggaagcctcacaatcatggcagaaagtgaaaagcacatcttacgtggcagcagatgaaagaatgagagccaagtgagaggggtttccactcataaaaccatcagatcttgtgagacttattcactaccatgagaacagtatgggggaaactgcccccatgattcagttatctcccactgggcccctcccacaacttgagggaattatgggagctacaattaaagatgagatttgggtggggacacagccaaaccatatctgaggataaacctgggtgggaggcctactttattattacgaggtggtatgacttcggtaagttgagttcctgttttagctccagggtttttttctagcaggagtgtaggggggttggaatacatgatccttaaggtcttttctggagcaaaccatcagtgacatcttccctctctcgaaagtgggcatgccttccaatggtgcctttaagctcatgagaaaaggaacactggatgcttgggaattc

SEQ ID NO: 195254 - DNA, 1000 bp, Homo Sapiens
ctcaggccaggcgcgatagctcatgcctgtaaccccagcactttgggaagccaaggcagatggatcactttaagtcaggagttcaggaccagcctggccaacatggtaaaacctagtctctacaaaaaatacaaaaattaacttggcatggtggtacatgtctgtaatcccagctactcaggaggctgaggcaggagaactgcttgaactcaggaggcagaggttgcagtgagccaagattgtggccactgcactccagcctgggaaaaagagcaagactttgtctcaaaaaaaaaaaaaaaaaaaggccaggcatggtagctcatgcctgtaattccagcactttgggaggccaaggcaggcagatcacctgaggtcaggagtttgagaccagcctggtcgacatggtgaaaccccatctctactaaaaatacaaaaattagctgggcatggtggcatgcacctgtaatcccagccactccggaggctgagacaggagaatagcttgaacccaggaggctgaggttgcagtgagctgagatcacgccattgcacttcagcctgggcaataagactgaaactccatctcaaaaaaaaaaaatagatcgttatcaatcagcatggagctcaaaaaaaaatttttaagttgcaaaatgatacatacattataaatccatgtatgtgaattttttaaacacacaaaccaactttatattgttcatacacagtacaagtgcagtacaactataaaaacacgttcaggaagaatatatgccaacctcttggtggtttcctctggggaaagagggagggaaacgggcctgggcagggaagcaaaggggaccacaacttcctcagtcatgttttacttgttgataaaggaaagtgatctgaagaaactcttaacaagtatttttcttattaagaagtcaacaaagtctgagtgtggtggctcatgcctgtaatcccaacactttgggaggctgaggcaggaggatcc

SEQ ID NO: 195255 - DNA, 1000 bp, Homo Sapiens
cctgtaaataccaatgactgattgcatccaaactagtatcagttatacctaaaaaaatcgggaaatattagttatactataatgacaccaatgcctggttataattgtattttaaacaaatgtttttgcagcctttttatttgtagatgttgtttttgtttttcttttacagtctaacagtatattttctgttttgaagttggtgatatatgcggggcctaacacaaacagtaggaaggttgctgaatatggaggcaacacactgggatatggcagccgtagtgtcttaggaactggttggccgaaagacttggtgaaggtatggtattcagtcataatcgcttcctagaaaagaaaatgaacttgcagtcctcacaggtccaagtactaactgtaatcccagaaaaacatttgccctgggggcttttgttgaggtggagccaccttaccaggcctgtcagctcactccttctattcagaatgaccctcctttcacttgtaggacatcagacccctgttcactccctttcacaagttactccatgcatagaagttgtcacagcattttcttccttgttgattaaaagggttgctagatcttccagcttagttctcctctacactccctgttgacaagtaccctagaaccacaaggccattgcagtgtaaaagtattgagttaatgtgttcagatgaatttgggcctttggagcaaaaacaattatccattctcaaactgatgaaattagtgccatgctttgtaatttggccctcaaactacttaactgtgtatctgcctggaatatgaatataagactgaaatgtctgttaaaacccaaaaatgtctccaaagtctgttcccggggcctttatttcatatatgttatggactctctttaattcagccatagatggcaagccatttgttagaaattatggccaggtgcagctgctcacgcctatagtcccagcactttgggaggctgtggcgggcagatcc

SEQ ID NO: 195256 - DNA, 1000 bp, Homo Sapiens
cctgcctcagcctcccgagtagctgggactacaggcgcctgccaccacacccggttaattttttgtatttttagtagagacagggtttcactgtgttacccaggatggtctcgaactcctgacctcgtgatctgcccaccttggcctcccaaagtgctgggattacaggcatgagccacggtgcccggcctcatttccggcctcattaataatttttaaagtgcaaaatgaaattagaccacatttgtaaccatatttttcacaaaaaaagtaatactgaaacacatataagaaaataattatgcctagaatgaggaggaaaaaaccttgagcaaaatttaaaatatgaggtcattgtatttgagaggtaagaataaggtgattttttaaaatttttacttttatgagtttctcttcttttcagttagatacattactttcacacaattgaggaaaaacactttttaaaaacatttcttgctatattatagaaatctttgggtataatggaagaaatgtaaagctaaactgcatgaagaaatataatcaccttttaattatgatctctattaacaaactatcagcaacttaagatgtaagatttcaacaaacaagaggatttagcaaaagaaggcataacattaagcaaagcactctgtgaacaatggttaatttgtttctagtttcacttagaaaattcttcaaaaggtcacaggctaaaatttttgcctctgtgtacattctactcattttctaaaaggccccttagaccataatgggggtagggtttacattaaaattcacctaagttttcacctaaatgagagaaaaaacaaagaaaataaccatgctagaggggaagtacccaatacatcagctctagacaccaggtaacaaacataaaccaggaagaagcccacaagaaacggaattaagtcctcctcccaacaatcatgggagtgaacttggaagtacatcatcccctgccccagtaaagctt

SEQ ID NO: 195257 - DNA, 1000 bp, Homo Sapiens
ttcacaaaaacctaattaaatatgtaggacagtaaattttctaactagtcaaataggatgggttcttctggcctcctaggagcagaataaggggagaggaagacagatgccaaagtgctctgagaaaaactggctacataatttgtggagtacagtgcaaaatgcaaatgcgaggccccttgttcaaaattattaagaatttccagatagcactacagtacagcattaaaccaagcatgggatcccgggcaactatacagctcacatgcccaggaaggcagccatggccttgagctctccggaggaaaggcctattcaggatgctcatgccacacctcctgctgagcctttccgaaggaagtcctggatgatctgggtcttcgtgttgtagctaggattatcggccaccatggcgcataactttcgaaactcccgtagcagacagtccttatgcctggggtcacatttgcttgaagacagacttctcttaggggtggggctcgagggggcttccccagagttgttgggcttggctgttggagaaacaacagagatgaattcattctgcctttctgagaagaaagaaagggaaggaaggaaactaacagatattctgctggtatttagctttatttaatctccccgaatagacttttggggtagatgtcattatatccatcttacagataaagaaatggaggccaagtaattttcccaaatcttacagctaataaataatgttaaaggaacaatggcctccttagacccaagcaaaagaccagactgatgtgcatctctttatgtgagcactttactgaagaataaagaccaaagtcatgccaagaatgatcaggactggctgggcacagtggctcacgcctgtaaccctaacactatgcgaggccaacgcgggaggactgcttgagcccaggagttcgagaccagcctgggcaacatagtaagatcctgcctcaaaaaaaaaaagtggtcagaaggatcc

SEQ ID NO: 195258 - DNA, 1000 bp, Homo Sapiens
ctctaaggttacaattatgatggttgacattttctaggagcatccattctgatgagagagatatttaaataaacaattacactgcaatatagaataattgtaattatactcagcataatgagtgcttacaggcacataaacaagatattatgggagtgcagatatgtgcttaatccttcccaagaaagaaatcagagtcctccatgacatgatgtgaaagtaggtcttgagacttttgttaagaggacaaagaataaaagtacatcttaagtaaaaggaattgtatatacaagagatgtacataaacacatggtttcttcaagggtcagcaaatttgttcagtatggccaaaaaataggaaatacatagaaaacaggtaaaagagaaagttggagaactgaacaaagtccagatctgtgctgtccaactagggacatgtggttatttacttgtacattgtgatcaatagctcaatactatggctagctagctgctatcaatttcgatggcacagacataaaatatttccatcataacagaaaattcaattaaacaggactggtctagactatgaaggtacttatatgctagattactggaatttttctgtaactgatggtaggccataaacagatttaagagtttaaaacaagtgacattgttagagcttcacttacaactcacagaagcaaaataaatggactagttagtggcaagggtataggggaggatgtagaaagcagggctagcgatagggcaacaagttcagagagaagataaaaaattttaaatcaaataaactgattaagtagatatcttctgataaagaaattaaataatacttttcacgttttctaatttttcaaaatctcttaaaatgaaaaaatactgcgtttacagtgaaaggtggctgggagaatttgagagatgctattacaacagtcctataaagaaaaaagtgaacactaaagaaacgacatgggcaaattaagtgaaaagc

SEQ ID NO: 195259 - DNA, 1000 bp, Homo Sapiens
gctcagcctgtaatcccagcactttgggaggccgaggcaggcggatcacgaggtcagcagatcgagaccatcctggtcaacatggtgaaaccccgtctctactaaaaataaaaaaaaatagctgggcgtggtggcgtgcgcctgtaattccagctactcaggagcctgaggtaagagaatcacttgaacccaggaggcggaggctgcagtgagccgagatcgcgccactgcactccagcctgggcgacagagcgaagactctgtctctcacacacacacacaaattaaaaacccccatgcaaggtggcaaatgtggacagtatgttgatgtaaacatacttttataatagttatatcacaaaaatttgattttcagttttagacatttgatgtagtcaagtgtttgtgaaaggcagtgacagtcacagaaatacaggcctgttttcaaatccatttggaacacatttattcttgggatagtttggacaatcacaaggcaattctaaggaagactcccacgacactgcctaagaccaagatttgggaaaattgattccactgatcactgaaaaatttcttgcccagtaactgtcggtggactttatccaagaactgggggttcaattagtaggccaaactccacacctcttacagtaagatacataaaagataaattaggtcccctaggcgcaaggtcaggtgacacttcggtgactgcagaaggggcgattcctagagatatgcttcaaagcaagtgggacttagagataagcagagccgagaggtggatacggctgctcgagagggatctacccacaagataagccacctcccgccagcccccaaggtttgctattcgacaccgttacccagcagctccgccacacacaggcggacgggagctggatacctaagcaaaaaacgctggcatttagggccaaatgccggaggcagaggaaaagatgggaaagcaaaactccaccttcctaaccgcaggatt

SEQ ID NO: 195260 - DNA, 1000 bp, Homo Sapiens
aaaaacagaggaactattacagacgaaagagaaactgtaacagtccattgacaggacagctgaccaaattagagtatggactgtaaagtctgtaaaggtttacatctgtgtcaatgtaacatttcctcaacttgataatggtactgtggttatacactagaatacctttacactagaatacctttgttcttgcataacacacattgaagtattgaggggtaaaggaatgtgatacatgcaaccttctctcagatgattcagaaaatataaatagagagtgtgtgtgtgtagagaaagataaaaataatgataaaacattttaaaactcctgttgcgggggcagcaggcatatagaaactactttctgctcacttttgctgtgaatctaacactgctctaaaaaataaagtccatttttttttttttttttttgagatggagtctcaatctgtcatccaggctggagtgcagtggcgcgatctcggctcactgcaacctccgcctcctgggttcaagctgtctctcctgcctcagcctcccaagtagctgggactacaggtgtacaccacacacccagctaatttttgtattttttttttagtagagatgggggtttcactatatgttggccaggctggtcttgaactcctgacctcaggtgatccacccacctcagcctcccaaagtgctgggattacaggcgcgagccactgcgcctggccctgtcagttcattttcatcctatctaatactcatccatattcacatctctccaattacaataaactctttcaggtaggtcctattatctgcattgtagatgaggaactaagacatggagagctaaaggacttgcccacagtcacatggccattctcatggacttttcccagctgcctccctgggacactcactcacctggggctcttccaagtcacccagatccaagaagaggtcaagatcacagccatggacatcgaagctatttatggaagagcca

SEQ ID NO: 195261 - DNA, 1000 bp, Homo Sapiens
tagaaacagaataaaaggtaataaagagtcagggaggctggatgcagtggctcacacctgtaatctcagcactttaggaggctgaggcgggtagatcacctgaggtcaggagttcaagaccagcctggacagcatggtggaaccctctctctacaaaaataaacaaattagctgggcatgatgaccggtgcctgtaatcccggctatcctcgaggctgaggagggagaatcatttgaacctgggaggttgcagtgagccgagatcgcaccattgcactccagcctgggcaacacagcaagactccatctcacaaaaaaaaaaaaaacaaaaaaaacaaaaaaaaaacgggccgggtgcagtgactcacacctgtaattccagcactttgagaggccaaggcagacagatcccctgagcccagcctgggcaacatggtgaaaccccgtctctacaaaaaacatgaaaattagccaggcatggtggcacacacctgtggtcccagttacttgggaggctgagtcaggagaatcacctgagcccaggaggtggaggttgcagtgagctgagatggcaccattgcactcccttgggtgacagagtgagaacctgtcaaaaaaaaaaaaaaaaggcagatccacaaggagaacacaggaaaacaaggacacttaaagaaaaggagaaattggccaggttcggtggctcatgcctatatttcgaacactttagggggtcgcggtgggaggactgcttgagaccagcctggggaacatagtgtgaccttgttgctatgaaaaaaaaaaagaaaataagccaggctgatggcacatgcctctagtcccagcttcacaagaggttgaggtgagagaattgcttgacccagaagtttgaggctacagtgagttattattgcagcattgtactctggcctgggcaacagagtgagaccttgtctcttaaaaaaaaaaatgttttaggccaggcgtggtggctcacatctgt

SEQ ID NO: 195262 - DNA, 1000 bp, Homo Sapiens
ctccggtgacggctttcgaactttgttgacccacagccgacactgagaaatgccttttacgcgtgtactctgtgcctgtgggtctggatgactgaagcacaagtttaaagggagacgcttgtttaagctcacatgacgcagctggatctgttcggattaaattccgttccattctcttccaccccgttccaaaaggctgctgctaacccatggagcctgcacataacgggtctgacgtagttgaaaccctcgctctaaaccctgcctgttgttcctttattccttgtactggaagctgaactcccatagtcagataatcatgtgcaaactccaattccaacgaaatggcttatttttatttgcatatttctgctttccaagggccaatatgatttccagggcttgatctagattttctcgtgtgattatatcatgtttctcttgttcctttcccaagtgctactggcgggacgtgtggaaggaacaaggctgaggttggggctagattgcggagtgtttatgacgcccagctgatgatgcactaaggctggagatggagatgatttaattggggagagacatgctgaaagttaagctttaggaagagtgacctgtcagcaccctatgtggagaattggagtggctgcttgccaaagctggcaagatcgttcagaggctttggcttgggctaaagaggtcgtggtaagggatcatgtcctgagttggtgggagtgggaaggagagggaagatgggtatatcaggcatagagggagagagatttgaggatgcattaggctgtgggaaggagtaaataaacttatattatgatggagggtgactggggaataccgggctgggggggtctcattggccaagctctccctttctgtgcgctctaatttctaagttgctttggagctgtggctcttgggcaattctgcaccccagggaacgttctgcagtgttggtggtcacaacgtgtggtagggcatgacagtg

SEQ ID NO: 195263 - DNA, 1000 bp, Homo Sapiens
agagatgggttttgccatgttggccaggctggcctcgaactcctgacctcaagtgatccacccacctcagcctcccaaagtgctgggattacagccgtgaaccactgcacccggccatggctattatttttaaaagattgctccagctgcttggtggagagaggattagagggggaaagacgaacagaggaggaccagttaggaggctgctgcaggtaggtaggtggtgatgatggtggctggactagggtggcagagggaatggagagagaggacagggcaaatccaactgtattttgtaatgaatttgttgtaggagcagaggaaagggaggactcagagataacacctaggtttgggtctgagccacagtaaacaaagacatgccccagggacatcagaggtctctctgcatggggattaacaggagaggaggaagccctgacatgtccaataaactcaatcatctggaagatagctcagtaggtgtatccttgacccagcattgtgggagaagatatgtctggaatgtgtatatctgcggggagtgagaaaggaatgtcagcagtcaggatgtctgcagatggggaattagaaatctgtcttagtgttggtgggacccagttcaaaagagacttcagaaggattgatggtttagacgggtaatctatataggacctgtttagatgaacttcagtggaatgagggatgatgtattaggataataaggttagctgtaacaagcaactgagctgtaacaaagccactgacacttctcactcatattctatagtccagtgagggtctaggggacaggggtagctctgctccatccattcattcaagcctaggttctttccattatgtggtacatatggcctctaaaattgtcacagaatgggaagagggaatgcaggttgtatggaagatttttaaatgagcccagcctagaaatggcgcacattgcttctgccttcattccattgttcagaacctgatc

SEQ ID NO: 195264 - DNA, 1000 bp, Homo Sapiens
cacattctgaaaaggtaagaaggctggtggaagacttcagttcatatctagtccttaaaatctttgagaatcaagatttcagtcaccactaggctatatcaatgtataatccattcacctaacttagcatttgcatatagccggagctttccttctcatttataaaattattttgactataattgtaagttattattattattattaatattgtgagacagggtctcactctggcacccaggctggggtgcaatggtgtaatcatggctcactgttacctcaaccaccgggctcaggtgatcctcccacctcagcctctcaggtagctgggacatggtggcatgtgccaccatgcctggctaattttttgtactttttgtattttttgtagagacagggttttgtcatgttgcccagtctggtcttgaactcctgggctcaagtgatctgcctgcctcagcctcccaaagtgctgggattacagcttgagccactgtgcctggcaagttttgattaattgtaacatggcaacatattgacaaaacattactgatacagacttttcagtctgctagatattatgaattgtaagtgtaatgaagctgcatttcattgacaacagctgcatttcattaatgtcgtgtgacccatgggcaaatgaatccactggtcatacgatgtctctcttttttttttccccaagacagagtcttgctctgtcacccaggctggagtgcagtggcatgatctcagctcactgcaacctctgcttcctgagttcaagcaatgctcctgcctcagcttcctgagtagctggaattacaagcacccgccaccgtgcctggctactttttgtatttttagtagagacagggtttcaccgtgttggccaggtttgtctcaaactcctgacctcgtgatccgcctgcctcacctcccaaagtgctgggattacaggagtgagccactgcgcccagctgatgtctgttaaagtaagctt

SEQ ID NO: 195265 - DNA, 1000 bp, Homo Sapiens
aaaaaaaaaaaaaaaaaaaaggagggggctgtcatatgagtttccccgcctagtagatcctacagctactgactttcgctgttgctggagctactactccctgtgtactaagttaaaaagaatcggccaggcgcagtagctcacgcccgtaatcacaacactttggaaagcctagagcccaggagttcgagaccagcctgggcaacatggtgaaaccccgtctctacaaaaaaatacaaaaattagctgggcttggtggcccacctgtagtcccagctactcaggaggctgaggtgggaggatggtttgagtccaagaggttgaggctgtagtgcgcagtgatcgtgcctctgaactcccgcctgggtgaaagagtgagaccatgtccccaaaataaaaaaataagcttttaaataattaaagtggcagggcgcagtggctcatgcctgtaattccagcactttgggaggctgaggcgggcggatcgcgaggtcaggagttcgagaccatgctgacaagcatggtgaaaccccgtctctactaaaaatacaaaaattagccgggcatggtggcgggcacccgtaatcccagctactcgggaggctgaggcaggagaatcacttgaacccgggaggcggaggttgcagtgatctgagatcgtgccactgcactccagcctgggcacagagcaatattccgtctcaaaaaataaataaataaataaataaataaataaataaatagccgggcgcggtggctcacgcctgtaatcccagtactttgggaggctgaggcgggcggatcacgaggtcaagagatagagaccatcctggctaacacggtgaaaccccgtctctactaaaaaaaaaatacaaaaaattagccgggtgtggtggcgggcgcctgtagtccggaggctgaggcaggagaatcgcgtgaacccgggaggcggagcttgtagtgggccgagatctctccactacactccagcctgggcgac

SEQ ID NO: 195266 - DNA, 1000 bp, Homo Sapiens
tttttgccatacttaatggcaatacattaagtatggcaaaaacttacttttgcaccaacctaacagatctgttttggtttgtaaacttttagacaagttcttatcccagtaactccccaccactgtttaatacaatttggcacagtatatagtacatgaggccatcgagtgtaactactatgggactccattttggcaccagcccctagagaccagtactgcttcaaagactaatactgtgtggcttaatcctttctccctttccaaaaagactagtttgtgctttccttggggaagtttaatattgaaaacactgccttgtacattttcaattgttattttcctgggcccaggggtttggttaaaatttagatcttcacccagctctagattcatcttcccttatcagaagggcagacatggtttcctggacccaactcacacaggtgggcagcacttcagctgctgagacaaccagctgaagcatagcaaagccccttacaggaggtggggttaagaacgatacattgagatttggcaaagatgggggaaagagcaattcaatgaagcagcacgtcatctcataccatctttccaataaactgctaaagaaacatcacaaaagctgacaaagccagttgtcaaaactgagttatttcttatttcccaacacacttgtttgttgttgccctcagatgttgccgatttccaaagtggcgtccacatcctgcccctctccacatcaccctgatgttctgttgctaagcaaggagtgtactggcttatctgaggggcatgcattcagcctcttacacagacttactgctcactcattaagtggcaaacctatttctaggttgaaaggaacaagacttttcacttcccagaagtataacttcaaaccctacacacacctcaccttggatccctttgcagaaaaactgcatttcttgtggtcatgaaagagtcaagcattggcccagagctactgcagaagctt

SEQ ID NO: 195267 - DNA, 1000 bp, Homo Sapiens
tcttttacccagttctgccagccatgtgctcatccctgacccaatcgctataggcagaaggagggagggccctgcttgaccaggcctggcacccctttctgcacaaagagggcaaagtggtggaaccccacaggtgcatagggagtgggagaagggaggcactcatagaagaagagggagatgggagatgtggagggggcaaaactgactgtatctgccatggccttgttcaagccaggtccatggctaggcttgtggggaaggggacttggagaggaggcctcaggaggtccctctgactgaggctgggaggaagggcgatactatgcttctggcctccagcccctcttccctcctgcagcaactctccccagccctggtccctgcagagttgctggcacctcttacgtacatctccctcgtgggctgcagcatctccatcgtggcctcgctgatcacagtcctgctgcacttccatttcaggtattccgctgccacagtgctgggcctgccctgcactgtggcacatcacgcttccttgtgtcccatttagtccactagaactgggtgtgcttctccagagggtggggaccaggaggcgggagaccagccttgtggtgcgactgctgtgggatccctgccccttcttcgcctcagtttccctgtcggcatgcacctatgcacccagtgggtagtgctgcctgggtgatgtccctgggccatggaggaccattctctcacctgcaggaagcagagtgactccttaacacgcatccacatgaacctgcatgcctccgtgctgctcctgaacatcgccttcctgctgagccccgcattcgcaatgtctcctgtgcccgggtcagcatgcacggctctggccgctgccctgcactacgcgctgctcagctgcctcacctggatggccatcgagggcttcaacctctacctcctcctcgggcgtgtctacaacatctacatccgcagatatgtgttcaagctt

SEQ ID NO: 195268 - DNA, 1000 bp, Homo Sapiens
ataaaacatttcattttgggaatataaactgtatttcctttcttccctcataaacacatatgctcttttaattaagttcagaaaaatgccagtgtttatgtttaagagctatctatatcagtcactgacagtgatacaatctgattagcaaagccagactgagatctcgtagtacttgtgaaaccaagacagcccttttcttcttatagacaggaagagaatggattggccaaaacaaaaaaaggaaagaggaagaagagctgccacttaactcccccatcgttaaattttttatgctgaaaatgctgcttataaagttcagcagttgttttgtttttaaattgacaaataaaaattgtatatatttatgggatacagtgttctatgtatacatgtaacaatgatctatgtttacattgtggaatgattattttagatcaagctggttaacatgaccattgccttactttaagaagtagagagtagaatggtggttattggggtggagtggaaggggtaaggggagatactggtcaaaaagtaaaaagttgcagttagacaggaggaataagttctagtgatctattgcacagcatggtgagttcagccaataataatatattgtatatttcaaaatggctaagagggtagattttaagtgttcttaccatgagctctatttcttaatgttttataatgaagagattgaatattggtctaagcacagagcatttttaatctcaggaccccaaaaaaatccttttaaaaagagacaaaagctgaagtccaaattagttttgtgacgttagagagagaattgagaagtgtaagagaaatcgctttgaaagcagacaggattttttgcctccccatctcctctgatgtcgttagagacacgtatgaactctttgcatgaagaatgggaaggggaattagctaaacatttccacatctggttttggaacggtttggaaaaagaattcactccataggctcctgg

SEQ ID NO: 195269 - DNA, 1000 bp, Homo Sapiens
agcatttttcatatgtttgttggccatttgcatatcttctgttgagaattgtctattcatgccctttgcccactttttgatggggttatttgtttttttcttgctgatttgtttgagttccttgtagattctggatgttaatctttcatcagatacatagtttgtgaatattttctcctaccctatgggttgtctgtttactctactgataatttcttttgctgtgcagaagctttttagtttaattagatcccatttatttaaactttgtttttgttgcatttgctattgggttcttggtcatgaattctttgcctaagccgatgtctagaagagtttttccgatgttatcttctagaatttttatggttttaggtcttagatttaagtcttcgatccaccttgagttgatttttgtataaggtgagagatgaggatccagtttcattcttctacatgtggcttgccaattatcccagaaccatgtgttgaataggattgtttttctttttttctttttttttcatttcttagctctagtcatttaagggaactctgaaaacaccaaccaaacagtaggctaatagaacaaagaactcagtggtcacatacaacaaaaaatactaaagtagttggggaaagtcactaaagaagcatacaatgacagcccacaatagccaacagagacaaaccttggggagggataagaatctggtttccagagttgtcattttataatacccaaaatgtcctgttttcaaaaaaaaaaaatgatgaagcatgcaaagaaacaaaagagaaattaatagaaaatatccatgaagaagcatacacattggacttcctagacaaagactttattttttttgcactttaaccataataatttcatttacatttttaaaaaccctgaaggtaaaatctaaaagagtaacatttcttccttctgttggatgtatatacaaaattttataggactgtgtaaactttgacatatttt

SEQ ID NO: 195270 - DNA, 1000 bp, Homo Sapiens
ttgtcaatgaaaattcagaacacaatctgaagattaagctctgaataaagcccagtttattttaaaaaggaaggaaggaagataggaaggaagggaggaagataggaaggagggaaggaaggaaggaagaaaggaaggaaggaaggagggaaggagggagagaaggaaaaaagaaaggaagaaataaaggagaaaaggaaggaagagagggaggaagcagaagtaagaagggggataatcaatattaaaaatatttgtataaatagtggcatggcaattgggaaaatctgtaatatgtggacaatttttgagaatttgggcaattgtcaagaacttgtcaagaacttggaatatttagtttagaaaatgtgagcaattttggggaatttgctgtgatatatctacttgtataatttaccattttatttttccttgcataaaatatgagaaatatgacaacaacataaagacctattgcctttctcttttttttttttttttttttttttgagacagagtctggctctgccgcccaggctggagtgcagtggtgtgatcttggctcactgcaagctccgcctcctgggttcaggccattctcacgcctcagcctcccaagtagctgggactacaggtgcccgccaccaagcccggctaattttttgtatttttagtagagacgaggtttcaccgtgttaaccaggatggtctcaaactcctgacctcgtggtctgtccaccttggcctcccaaagacctttctcttatggaaagtttgcctctctcaaaataagcaaggtgaagatctggagtagatgagtaaatcttctaacttccccaattcattccttcattctaattcattatgtcaaggtggaatgccaaaatggtgtactagttttttatatatatatataaaatatatgtgtgtgtatatatacagtatatatattatattatatataataactagtatacataatactgtgtgtgtgtatata

SEQ ID NO: 195271 - DNA, 1000 bp, Homo Sapiens
gtcataagagaatgcctgattcataatctctatttacttcttaactagtaaaacaaggtaatgatttttttttttttttttttttttgagacagagtctcgctctgttgccaggctagagtgctgtggcgcgatctcggctcactgcaacctccaactccctgattcaagggattctcctgcctttgcctccagagtagctgggattataggcatgcaccgccatgcctggctaatttttgtatttttagtagagatggggtttcactatattggccaggatggtctcgatctcctgacctcgtgatccacccgcctcagcctcccaaagtgctgggattacaggcgtgaaggtaatgatatttaataacaacttcaaaccattgttgaaaaatcaagatgtttatgccttatttctgggaaggactcaaatttatataaacccaaagagaagttcttcaacatggtttttatacgtaacctgagtacatgctactagttaaagctcaaggaaacaaaatacagttgtgattatttgcatcagcttagggcttgagcactcatgaaaatcaaagaaatctgttctcaggtttcttaactaaataatattacttcttttcaccatttctattcatatttgttactactttgcagtggtattttggtaaatggttagtaaccagctctttggaggaaaaaggtataaatagttataatcagttttacttatataaaggataagtagcacaaaatttataagtaataataaaatgcataatactattttttgtaaattctgtattaccagttgattctcatagaatgctttcattaatttttcccagattctttaacctgtagccagtcaattattaccgttaacaaagaagtataacttcaacatgatggcatcagacagtaagatgagaataaaaccagaaagatatatgttggaattttactcatttgtcaatcccatgaatgacttggctgaattgatc

SEQ ID NO: 195272 - DNA, 1000 bp, Homo Sapiens
gctctgatttggcttcaggacctttcattagagcatcagtaattcttagagtccagaatctttccaggtgtggcttctttggacagagccatctcttggtatcggagggaagcaaatggctgctagtggagggaacagagccctgtccttggctgcataggcacagggaagcagaacagcggatcgggcttctggaagccttgttctgaggcaactcctttgctaccaatttgtttggggactttagacaaaccacccgcttctctgggcctcagtttcctcatctgtaagatgagagggttgcttagatagatgcttaaaagaaatagtaattggtcttgtctcacgatgttgttccacatcacaataatgattttctctactttgtgctgtgtagcataaatggttatcatcaattctattctcatgtagggtaactgaagccattctcctccatctgtattcctggccaaagtaataaatggcagggaaaccacatgttttgagcaaccaatcaagtatgtatttctcaaggacatgcccttagtttactcatttctctattcatttagaaacatgtaatgtatgctacacagccaggcagtgtgctaaagacaggaatacagtgattagcaagacagtcaccaccatgtagaacttagggtgaatagagccaaaagaaagagtgggagacccaggggaggatggaggggtgactaggagttaaccagatgaacaaagaaggatgatatcagatgagatggactgtattctaggaaggtccaagttgttagagtaatggtcccaacttactgggattttatacacatacaaactcaaaatttaagctatatactgagcagaagacttgtttattttcaggcaataaatgtttatattctcgggatctggagaatagccaaagactaaaaaataggcctagaggaaggggccttcatgtttcatgtgtgaagcacagtaatgatgaacagcaaagctt

SEQ ID NO: 195273 - DNA, 1000 bp, Homo Sapiens
tttaaagatttttctggccaggtgctgtggctcacgtctgtaatttcagcattttgggaggctgaggtggtcggattgcatcgagctgaggagtttgggaccagcctggccaacatggcaaaacccatctctacaaaaaatacaaaaattaggccacgtgtggtggctcacacctgtaatcccagcactttgggagcccaggcaggtggatcacctgaggtcaggtgttcgagaccagcctggccaacatgatgaaaccccgtctctactaaaaatacaaaaattaaccgggcatggtggcaggtgcctgtaactccagctactcaggaggctgaggtaggagaattgcttgaacccgggaggcagaggttgcagtgagccaagattgcaccattgcactccagccttggtaacaagagcgaaattgcatctcaaaaaaacaaaaaacaaaaaacaaaaattagctgggcatggtagtgggtgcttataatcccagctacttgggaggctaaggcgggagaatcacttgaatccaggaggcggaggttgcagtaagccgagatcatgccactgtactccagcctgggcaacagaatgagactcagaaaaaaaaaaaaaagattttctgattgaaagagttatctaaagacctagaatcaatagaaaggaatattttgcttaagacgggttgtggagatcaagggtttatcaaggaagcctccaggtagcaggcttcagagaaaatagattgtaaatatttcttatcagacttaaaaaggtgccagactcttagttaattctctcctgaatcagggaaaagacctggaaagggaatctctgtagaatgtagcttttccccacaagagatagctttgcagggccatttcaaaatatgtcagagaaatatattttagggtaaaatactttgatttctttccatactgtattagttaggctggaacttggtgtcttattgctacaaaaaagtcttacgatgatc

SEQ ID NO: 195274 - DNA, 1000 bp, Homo Sapiens
tcaataagtgtcattcatcacataaacagcactaaagacaaaaaccacatgattatctcaatagatgcagaaaaggcttttgataaaattcaacatccattcatgttaaaaactctcaataaactaggtattgaaggaacatacttcaaaataataagaaccatttatgagaaacccacagccaacatcatactgaatgggcaaaagctggaagcattccccttgaaaaccggcataagaggatgccctctctcaccacttctattcaacatagtgttggaagtcctagacagagtaatcaggcaagagaaagaaaggcatctatataggaagagaggaagtcaaactattcctgtttacagatgacatgattctgtatctagaatgtgctgctggatttggtttgcaagtatttctttatctagaaaaccccacagtctcagccctaaagctccttcagctgataaacaaccttagcaaagtttcagtatacaaaatcaacatacaaaaatcactagcattcctatacaccaataacagccaagacaagagccaaatcaggaaggcaaccccattcacaattgccacaaaaagaataaaatacctaggaatacagctgattggggaggtgaaagatctctgcaatgagaattacaaaacactactcaaagaaatcagaggagatacaaacaaatggaaaaacatcccatgctcatggataggaagaatcaatataattaaaatggccatactgcccaaagcactttacagactcaatgctatctctgtcaaactaccaatgacattcttcacagaactagaaaaaaagtattttagaattcatatggagcccaaaaagagcctgaatagccaaggcaatcttaagcgaaaagaaaaaatctggagacattactttacccaacttcaaactatactacagattactgtaaccaaaaaagcacggtactggtacaaaaacaggtgcatagaccaatggatc

SEQ ID NO: 195275 - DNA, 1000 bp, Homo Sapiens
aatttttgactccccttctctccttcctaaactgactatgtgaggcccgttgccaacctgggcctcaatccataaaaatacagagcagataatatcaaatcctgtcctacataacatttttctaccaaagcatgctttaaaatatgttaatgacctctcacagtgatgttatttaaaatagtacgtagaaatatattaatctgtttcttttctgataatgttcttaagcaatgtatgaatgaattaacttggataaataaaagaaaatatccttagcatatagatgtatccattatttatttccagtcatgatgctagaaagtttcatcatttattacaaataaatatagatctaattaattatcatgaatctgtctttacattagcaaattgattcaaagggaactacaccaaaatctaggatatgtgataaaacgcaatttcttatagaaattgagcttattcatcaaattttaatttctctaaaaataaatttttttaaatgttaattcttattttatgactttttaagcctatatttacctatttctatttagcaacaatcttttaattgagaaaagaacatgatatatacaatatgaggaaataaatcttcaagagacagctgggaatgttatctgatatagatattctatactgtgtaactgttttatgttcaacaaccacatagtgtaaatagcatagatgtaagtgaatgaatgagtgacttactaacacctcgttaattacagagaagggtctcttatttagcagcatctgaaaattagatctgagtaacatgcagctcatttaagtatatggagtctgtggaacatctcagtctctcaatgctacgtaaatcctaatacagtagtgaagcctggaggtattcccctcaacacgggttgtgaagggacgatgctcatattgtaaatacaatacttcagatttagccctcacattcaaaccccactcaagcacaatgttatggtctcagatc

SEQ ID NO: 195276 - DNA, 1000 bp, Homo Sapiens
agtattttataatttttaagaatggggacatttttattgttaattttaagctatcatccctaccaagtatttgtttattaattttcaaagtaatacctgtgcacagtttaatattaaataataaaaaagagttctccttggattgaaaaccctggtgtgcgggagcaagcttgtgtggatctcttcccaactctgtgttcagggatgacaaattgttatttttaaattggccatggtgggagtatttctactacagaaattggcatgtgctataaatctgaacttttttttttcctggagagcaaattttaaacatttatcagcctaacactgcaacaacactactccactccaattcccacccccagagacaacaattttcaacatttttagcagtctcttcagctatgtgtatctgtttctaaatatgctttgttggtttcctttttcttttttaaaaatttcattagccattgcttatggtatttacttcccaccttgagggatgagaatttccaccactcctctttctataatagtttctataatagttacatctcattttattcaggcacactattttgattatgtccatatttttcatgagttatatactataatttagttttcattcttatacaacctttttgtccttatttgagttaataattgcctaatttttcttagcttagttttctgtgaatatatcactaattatcctcttcactcaatgaatgtgtgaaacttctacaataaaatcaaatgccagggagtttacctataagcttcatttcttcccctttggagacattcctggagccctgcaccttcctattccattctgctctcgatgttactatggaagtgtcatccttgggctttccttcaccatcattttgggaattccttttacttctgttcactggaatttattttcctgggctatttctatatgttgaaccacccaattagcttccttaaaaagggtgttttgaagatc

SEQ ID NO: 195277 - DNA, 1000 bp, Homo Sapiens
tttatataacacttgtaaaagccggacactgttccaagcactttatatctactaatgcaatcttcataacaatcctatgacatgtaagtgctctcaccttcataatatacatcgagaaactcatttgtacagagtagttaagttctttgaggtacagagagattacataacttgcccaagatcacatggcttgtaaataggagagctatgatttcaacacaggcagcctggctccagagcccaagcacataaccagtgtgctgcattgccctctttaatttatcttgctatgcagtgtggcttctgttgcctgcagaataaaatttaaactctttagccagctaaaatctccttggtcttggctgcattttcaatacttttaatttagtactttcccagtattaccccagactcattcgattttcatattcttcacagcagtttgtgaacgggacataacaacctctgttcatatttcttgccataaagctatggcaacagggtagcaggataaaagagagcctgtttatttgtttgtttaacatagaggtcagtcagagacagaaatgtttctttttttttagcctttgtcagaaagaaatacttcttttcatttctctgtattggtgggcagatatatatatatttgtctgagttcttctcttcagttttcagaaggggttgtggttctattttcccatttcttgaagtccctgtaggaatgctaaaacccatgtcctaagattacagtttttatagttggtttgttctaatcaatattcagatatagtccacacatggctggttgatacgtcttttaaatcttgttaatctataggttttcctgccccctttttggttgtttccttgcagtttatttgatgagggaattgggtcgtctttcctgtaatttcccacaatttggactttgctgattacgtctttgtggtgttgcttggcctcagtatttcctgcaagtgacagtttaatctaaaagctt

SEQ ID NO: 195278 - DNA, 1000 bp, Homo Sapiens
aaagatagtacagcatcatcaagtgggttttataccacatatacaaggatcatttaccatatgtgaaccaattaatgggcttcatcacataaacataattaaggaaaaaaacatgatcacctcaatagatgcagaaaaggcatttgaaaaaattcatccacacttcatgataaaaagcctcaaccaattaggcatagaaggaatatacctcaaaataataaaagccatgtatgccaaaccaacagccagtatcatactgaatgaggaaaatatgaaagcattctctttaagaactagaaacaagacagggattcccactttcgccactcatattcagcataatactgtaagtcttagccagtgcaattaagcaaggtaaagaaaataaaaggcatccaaattggaaaagagaaagtcaatatatctctgttgatgatatgacctcatatctagaaaaccctcaagattcgataaaaaaaaagcttagatttgataaatgaattcagtaaaatttcaggatagaaaagaaatgtacaaaaatcagtatcacttctatacccttataatgatcaaggtgagaaccaaataaaaaaaggcaatttcagttacaataactatgaaaaaatacattccctctcacttggctgtggcatggcactgggaccacccctccatccctgtgctgggaccttggggcagcagcattgcaccactcctcacctgggcatttctccagggacctggggactgccctctgatccccattggggctggaagccaccattgaaggaactgagtgcaagctttactggtccagctctgcccagctgtgcatccctctccctcagacagtatggtatccagaccactgagcatttcatggaccaatcaatcatctgggacacctaagcacttctctgggataatgaaggttgagcataaactgtactcaacaggtgaatggttaaaacactgtgatacactatacaatggatactat

SEQ ID NO: 195279 - DNA, 1000 bp, Homo Sapiens
ctacaatgagctatgaccacactagtgcactccagcctgagtgacagtgagacctgtcacacacacaaaaaaaaactgaatacatgacagcaaacatgaaaactcataaaagatttggcagaagttatagaaacctactaaaagtaaaataatcaaagagatggaaaactgcagaggagaaaacgaaaactgggaatcaatccaagagctccaattcccaataataaagagttccagaaaaagggaacagagaagaaaacagaatagaacagagaacaggaaagtgacccctttccctaagctgtaaggcatgagtctaagatgaaaagacccactgaggaggcagtgcaatggttcaaaagatacgcaaaatttccaggaagaaaacaagttatgttcaaagaatcaaaaattatgtcaccagcaacactggtgttggagtaaaaatggagtaagcttaaccttcaaaattatgggaaaaacttatttctagcttatgattctaaaaccagccaaacttatgtgcaaaggtaaaataaggacacttcagacatgcaaacaaggaaacacaaacctttgtctcctatgttccttttccacataagtggggcagtactcgactaaaatgaaggaataaaacaaaacaggaaagatataaaaaccaaacaccagaggttccaacgcaaggagacacaggtgagagtgactgattctcccacactgatggtgaacggggaagctggcccagcagcactgacaggtgaggaccaccaggggcgtctgggaaaggaggggccaaagaactctgactgatagagatctgtaactgaggggacatcaggaaagagacttctaggtacttaaaaagaaaagatatatatgaatctacaggattcacaccaaattggaaaacggcttggcaatttcttaaaaaattaaacatggctcggcacggtggctcacgtctgtaatcccagaactttgggagaccgaggcaggc

SEQ ID NO: 195280 - DNA, 1000 bp, Homo Sapiens
atcaagaccatcctggctaacacggtgaaatcccatctctactaaaaatacaaaaaattagccgggcatggtggcgggcacctgtagtcccagctactcaggaggctgaggcaggagaatggcgtgaacctgggaggtggagcttgcagtgagccaagactgcaccactgtactccagcctgggtgacagagcgagactccgtctcaaaaaaaaaaaggttaaaatggggctgggcatggtggctaatgcctgtaatcgcagaactttgggaggctgagacaggaagatcgcttgaagccaggagtttgagaccaccccagacaacatagtgagacctcatctccacaaaaaatagaaaaatttgccagacacggtggcatgcacctatggtcctagctactccggaggctgagataggaggatcacttgagcccaggaggtcagggctgcagtgagttatgatttgattgcaccactgcactctagccttgacaacagagtgagaccctgtctctaaaaaagataatatggtaaattttatgttacatatatcttaccacaatttaaaaaagaaatgaaatactaacacatgctataacatggatgaactgcgaaaacataatgctaagtgaaagaagccagacacaaaggacaacatattgtatgattccattagtatgaaatatctagaatgggcaaatctatacagacagaaattgccaaaggctgtgggcaggggaattggggagttactgtttaaaaagtatagagttaccgtttgggatgataaaaaaaaaaaaaagttctggaaatgggtagtggtgctggctgcacaacattctgaatgttcttaatgccactgaattgtgtacttaaaactggtaaattgtatgtgtattttaccacaataaaaaaagttcttttttttttttttttttttttttttttttttgagccggagtctcgctctgtcacccaggctggagtgcagtggcaaga

SEQ ID NO: 195281 - DNA, 1000 bp, Homo Sapiens
ttcctggtgaaggatgttcatgttcatttttccagatttagggggagcaaccccaaaccaccggttagcctttcctggggagggaaaaggagtacgtcggaaatcacccttactccacaaacaccccaagaagctgtgacaggccagagagcaactgatgttcagattaatttatatgtctattagttcatttattcagcaaacacttacagagtgcctgctgcataccataccctgtacttactacgtgctatgcaagagaacacaggtctctgcccacgtgggactcgcttcaggctgggaagacaatagacccataataaaaaagtaactttcgggctggtgcagaggctcatgcctgcaatcccagcactttgggaggcaggggcaggcggatcacttgaggtcaggagatcgagaccagcctggccaacgtggtgaaaccctgtctctactaaaaatacaaaaattagctgggtatggtggcatgtgcctgtaatcccagctactagggaggccgaggcaggaaaattgcttgaaccagggaggtgaaggttgcagtgagccgagatggtgccactgcactccagcctggcaacagagcaagactctgtctcaaaaaaaaaaaaaaaagtaagtgcacaatgtggtaagagctctgctgaaaaccaaaaaagggtgaaaaagtaacaggagagtacatatgcaggtaggacaggcagaaaataaacactagaagaggagacatttaaaccagaaaaaacaaataagaagccagcgtcatgaaaagccaaatgggagatgatctgggcagaagaaggagcagatgtgaaagctcaaggcaggaagaagcctggtacatccaaggagcagcaagtgcccagtgtcagaggggcctgctccagggacaggcagaggtgaggcatgtcagagcatctgtgctttattataagggctttggggagtgatggagaagcactaagatgaagaatgcaagatc

SEQ ID NO: 195282 - DNA, 1000 bp, Homo Sapiens
tctcagaattcatatagcttttgctgtactcaagacaaaaatatgggaatcagctctgattcctcatcctccatatccagtctctcactaaatcctggtaattttatatcttaaatatcttccaattcatacttttttccagccccactgctgctgctctattcgaagccaccatcatctcttgcaatgggtaactcctgatccaattcattttcaacactagccagtgatttcaaaatgaaaatctatctcttcacatcattatctgtgggcatttgagctgaaggcccctgcacctacacctatcaatcatcattaccttgcgctttgcccaacttttcacttaaccaatttccttagcttaaatgtcacttccttagaattccttccctagagccccagactgggttaactctgtatgaacatgctcctattgtattcattcacataacaattatctactgggcacctattacgtgtaaggtgctggaaaaatggggtagacaagacagacaaaatccttgatctcttagaccttattattctagtgcagacaagtgagtgagcactattgagtgtgtgcacacatgtgtttgcaaagcatggcacagacaataaacaagaaaatattactgataaatgttacaaagcaaatttctttagaataacatttaaacagaaacccgaactacaaggagacaactcagccaaaataagaaaagcactccaaggttagggaatagttggtttgaaagtcctaaggtgagaatgagcttgctttatctgaggaaaagaaacatggccaggtggaaagacctcgactagactgagggaatgggaggcacggagaagatgacaattattttgcatatcacttcttacttcattcctttttccatctagttctttttaccattccattttctttccccctcttttaacccgtttaggttgaagatctagtcagttaatggctatcaaagttcataactgcagatcc

SEQ ID NO: 195283 - DNA, 1000 bp, Homo Sapiens
acctctgtctaattcaggacattttcttcacccgggaaaaagcgttgcccgcctcagcagtcactccctagtcgtcccccagcccccgggcccccgaacacgctcatgtctgggcctgtcccttctcttggcacgtgagggcattccctgtgtggatggagtgtgccatcttcatccgtgcccagttgatggaccccggcttgattccctgttttggcgattgtgaatcgttctgctgtgagcgctggggtccaggtttctgtgtggatgtaggtttgctctttggcccatgtgggagtggagctactgggttctgcggtcactctactgacctttgttggacttggagtgtggtgtggggaagtgcagtgggtggtggccggcaggtgtgttctcgcaagcgccctcctcaccccacccgactgctggcatttgtgctgcttggagaacacagccgcttcccggtgagggcgggctgtgggttgcttgggttgtgcccagtaccccctccccacagctggaccccgggacccccgcctcctgacctccctgcctcaggcccgctgcccattcacacgcaggcaccgcgcactctcgctgcgccactcgcctggggccccgctcaagttcccccgctgccctcttcccacgcggtactggacggtgaccccggcggcctcccccagccagctgcaggcctcaacactcactgtttccagctgggttctgggtctcctggggcacctgctgcccctgacacacagggttttctctctgcagaggagcacccccagtcccgtgctgcagccccgtgacccctcgtccacacttgaaaagcagattggtgctaatgcccacggtgctgggagcagaagccttgccctggcccccgcaggtaacgcccctcctgtgccctaccctcaggactctgctgctgctgctgctcttcaggcaggagggctgggttgctgggagtggaacagggcttcctggggtgatc

SEQ ID NO: 195284 - DNA, 1000 bp, Homo Sapiens
ttgcttgaacccaggaggtcgaggttgcagtgagccaagatcatgccattgcactccagcctgagtgatacagcaagacttcatctcaaaagaaaaaagagagagagagagagaaggtctcactctgtcgcccaggctggattgcagtggcatgttacggctcactgcaacctcaaactactaggctcaaatgatcctcccacctcagcctcccaagtagctgggactacaggcacgcaccaccacatctggctgattttttatattttttgcagagataggggtctcactgtgttgcccaggctgttcttgaactaccagcctcaaggtgtcttcccaactcagcctcccaaagttctgggattacaggcgtgagctaccacacctggcctcctagatattttccaagcgggtggtttcacgtctgagcagaaagaccacacactgccccttcctactggcctctctcctgaagcgcaggcctccaaaagcccaaagacaggtcttacctctttgccagccactggactgtagccatggccctggccagtccttggtccagtcttgtctgctactcggaactgggctggctcatgggcacgatttctactgaggaggaagggctcatgtctgttgttgagttggcagccatgggaaacaagctggtcaggattggttgtcacccaggactggttgtcacccaagtccacatgagaagctcacacagtcctgttccactagcagggggagtggccacacttccaggctcctgcctgccaagaactgtggtgcctccagaccatcagcccctaatgcttccctgacaagcctcagctggtccccttctctccagcgcgtctcctccccacatctcccagcaggctcccctcctttccctgggggatgtaagcaccagcgttctgagactcagggcgttccatgacaagcatccaactctgaaagacaacgttccacattgcaggtctccatacgcaagctt

SEQ ID NO: 195285 - DNA, 1000 bp, Homo Sapiens
tagttcactgatttttttttttttcttctcagggttaaatctgcatttaatttcagatactatatttttcatatgtggaggttccatttgattcttcttgatactgtccatttatctcattatatgttatttttaaaatatttgagcacatttataacatttataagaagtgttttaaaattcctagtctgcttatactactgatacttcagcttctctgtttctactggttatggtctcattttcctgcttcttctcatgtccactcattttaattggatgctgaatatgtgatactatattgttaagtgacagattttgttgtaatcctttaaagagttctggaatcagtaagaatggcagactatatattgattcccatttttttgtgtgtgcagctgtctggaaattgccaggtagaaagctgcggtgattttagcgttcaatttgttttggtttatctgagatcacagttctatattgcctgttgcccaatgtctgaaaacaggtgtttcacaaattttactcactgttctagtttataatgggagaacatctaaagtagcagttacctttccatgtagggaagtaaaagtccattaaatgaccttttttctttcttttcaaaatttacgtgatttaggatccaacacaactaatctctaatttattatgctgagtgactgagtgataagaaactggttttctccagtttcaaaaaacatcacctgctgggtgtggtagtgctcttgtaggcccagctactcagaaggccatggcagcagggtcactggaggccaggagttcaaggctgtagcgtgcaatgactgtgcctgtgaatagtcactgcacttcagcctgggaaacacagtgagactccatttcaaaaaacaaaacaacaacaacaaaaaaaactgaaaagtataattctttagaaaagagtgaacactctgatgttgtagagtgtgacatgttggaaaagacccatgcaggcaagctt

SEQ ID NO: 195286 - DNA, 1000 bp, Homo Sapiens
cacgagaatcactttaacccaggaggtggagattgcagtgagtcgagattgcaccactgcactccatctagcctgggcaacagagtgagattttgcctcaagaaataaataaatagggctggcacggtggctcacacctgtaatcccaggactttgggaggcccaggcgggcagatcacctgacgtcaggagtttgagaccagactcaacatggagaaactccacctctactaaaaacacaaaattagcccggcgtgatggtgcatacctgtaatcccagttacttgggaggctgaggcaggagaagtgcttgaatctgggaggcggaggttgcggtgaggcgagattgcgccattgcgctccagcctgggcaacaagagcgaaactccgtctcagagaaaaaaaaaagatttcaatttaccagaaactgctttttttaaattttatttgtttatttatttatctttaagatggagtctcactctgtcacccaggctggagtgcagttgagcaatctaggctcaccaaaacctctgcctcctgggttcaagtgattctcctgtctcagcctcccagtagctgagactacaggcatgtgctaccacgtgcggctaatttttgtatttttagtagagacggggttcgccatgttggccaggctggtctcaaactcctgacctcaggtgatccacccgccttggcctcccaaagtgttgggattacaggtgtgagtcactgcacctggcaaaaatgtttttaagctacttttatgtagacatattttgtaaaatataactattttgaaaagtgtatttataaagtctttttttttgagacagggtcttcctctgtcacccaggctggagtgcagtggcacaatcatggctcactgccacttcaaccttccgggttcaagcagtcctcacacctcagcctcccaagtagctgggacacagatgcatgccaccacacccagctaattttattatttgcagagtct

SEQ ID NO: 195287 - DNA, 1000 bp, Homo Sapiens
actgaaactccgtctcaaaacaaaacaaaaacaaaacaaaaaagctgtgtgtggcttttcaagcccaactatagaccatgacaaggcctcacctagcaggcctcacaggggaagctttcttccctgcagcagacttggagctcagccagtgcactgtggtttcacgtaccctgcgtggccacactcttaggtgcactcccagccccggggccttcattcctaggtctcctgctctgaggccttgggcctcagagtaacggcttaacctttatttctggcttgctgctgtggtcgctccctgacacctgacggcacctgtcccaccagcactctgctcaaagccacggtcacccctcactctccaaacaggctcgctgcttccagccctgccgcctgcttcggtctgatggcggctcagcagccagagcaaccctttggacgggaaataagcacagaaggttccgcttggatcccaacgattcccaccttagaggcaaagacaaaggctttccaggggcttcccaggcgccagagggtctgtcaatcccaaccctcatcacacggcctccttgcttttcctcaaacacacaaaacacattttttttcttccccccagacaaggtctcgttctgttgcctaggcgggagcgcagtgccatgaacatggcttgactgcctgggctcaagagatcttcccacctcagcctcctgggcagctgggaccacaggtgtgtaccaccacgcctagctaatttttttcttttttttggtaaaaatggcgtctcactatgttgcccaggttggtctggaactcttggcatcaaaggatcctcccacctcggcctcccaaagtgtttggcttacaggagtgagtcactgcacccagcccaaaacaaattatcatcctgagacaccctgacgccacccgccacccgcacaactcactctttccctcccttggatctctgctggaaacaccatccaatccatgaggccttcct

SEQ ID NO: 195288 - DNA, 1000 bp, Homo Sapiens
gctcttgatctctttacctagtgatccgcccacctcggcctcccaaagtgctgggattacaggcgtgagccactgcacccggcccaaatatttaacattgactgtatgccagggactctgctgggcactgagagtgcagcaatgaggaagagcagggcccattctcaggaagctcaggggtgggaatgggaggagggaatcagaagcaagccaacagggacagtgtggggtgggggtcagctcagcacactgtaggagtcccaaaaagtgaggagacctctaagctgagtcctacaggagaagcaagaatagaagcagggcaaagatgggggtcggcccatcattcctagacgaaaggcagagtttgagaagtgggggccagattattttggaatctgccaatagtgtatggggaggtaggggtgactttcccatagtggagtgtgggcttccttggaggattcaggctgttggggaacaggagggatggtaaactgcctttcagcagggcttgcttctaggaaattgattctggctgcagtgagcgtggaggcaggcctggattccaggcaggcttctgccacgtcccagctgtgtggccctggacaaatcatttccctctcagaacctcattgtccttgtctgtaaaatgcagacagcagttgcaacgatcaaaataaatatttatataaagcacctggaacataacaggcacagagggagggaggaaggctgtgaagctgcctctgccccttgccctgggtcttcccccacccctcctttcttagctcccctgaggtcacaagagtgttcttgaccattgtttatcagggaaagatcacatggagaagccaacagaacggccaggaagcagcctgggtggaacagggttggggaggaaaggaacatgggtacattctcagcgttccaggaggtctcagggtaaaggctgcttgtgtgggcaaggggagcctggcagggaatgagctggtcccaattc

SEQ ID NO: 195289 - DNA, 1000 bp, Homo Sapiens
aacaaatatacaaattagacaacacagtcatgtgtccagtagtgacatttcaatcaacaataggctgcacataggacagtggtcccataagattgtaattctatatttttactgtaccttttctatgtttttaattatactttcttttttattattttgttttttatttcaataggttttgggggaacaggtggtgtttggttacatgggtaagttctttagtggtgatttctgagattttggtgtacccatcacctgagcagtgtacactatacacaatgtgtggttccttacccctcaccccttccaacccctccccccgagtccccaaagtccattatgttgttcttatgctgttgtgtcctcatagcttagctcccacttataagtgagaacatacgatgtgtggttttccattcctgagttacttcacttagaataatggtctccaattcacaggtttctgtgaatgccatcatttcattcctttttatggctgagtagtattccatggtatatatacaacacattttctttttttttttttttttttttttcttcagacagagtcttgctctgttgccgaggctgcagtgcagtggtgtgatcttggctcactgcaagttccgcctcccgggttcacgccattctcctgcctcagcctcccaagtagctgggactacaggcacccgccaccatgcctggctaattttttgtattttttagtacagatggggtttcatcgtgttaaccaggatggtctcgatctcctgacctcgtgatctgcccgccttggcctctcaaagtgccgggattacaggcgtgagccaccgtgcccagccatataccacattttctttatccacttggttgatggacatttgggctggtctatatttttgcaattgcgaattgtgctgctataaacatgagtgtgcaagtgtctttttcatataatgacttcttttcccctgtagtgggagtgctggatcaaatggta

SEQ ID NO: 195290 - DNA, 1000 bp, Homo Sapiens
tttaggatttcagaatagagaagcctgagaggctcagggtgctgtattgctgaacagaaaggttagcagtaatgatgggcataagcaggctgcagctatgaggaagcagatagtgtgtgtaagcaggggagctgtgagccaggagagaacaaggaagaaaataagccaaggcactgtgagaagggtgatgtttcagttttgggtggttctttaattgtacttctgaagcctggctgtattgtgattcctactgtcagatgtccatgagattgctgcattatttaaaaaaccccagtctgagtatacccttgtttcgtgcaataaactggccaaagagctatgtgttccagtaagctcataatgttatgaagagacatgtggaagaaagaggcactattctagagcagcaatatgaagtcccaaactattccactccttcataaggcattagcttgaagggggaaaaaaaggaagcttgtatcaccttttcctttggaggtgaatgatgagcttcttatatcaaagttaatctttatataaaaacaaattgatctttgcaaacataatttcagaaaggaaaagtaattgctgctacaaacatcacatgaaaatcacagtaataggtgacataacactgatacttgacagtgggataatcaaaccaccttttagatgccatgtttgtaggtatctacctttcattttgccagctgttgggacccatgggtttgctgaagatctgcaggattcctagtcacatgaccatattcctctctgaaataagaattgatgagtaagtttattgaagagctataggttaaaaccaacattaggtatatgtaaccaatactctaaatatgggataccttcagaaagcatctttctgtctccctctattcctatatatttggtggatgaatttttcactgtttaggataaaaacaacaggtcatatcaggactcttgaacattctcaggcaatagaatgccccacagtcac

SEQ ID NO: 195291 - DNA, 1000 bp, Homo Sapiens
gccagatactaaatattttcagctttgcaggccattcaatcttggttttcatcacttctgttcttgtagtgcagaagctgctgtggtacataaatgaggtggctgtgtgccaataaagctttatttacagaaacaagcagctcagtgtgtttgccctgggagattgccaacccctgctctagaacagtgattcagaatcatttttaaaatgttcacaaataattctgaagtgtatccccagtatagaaccactgcactgaaacagttctctttcagtaactaacgtgtgtgtgtgtgtgtgtgtgtgtgtgtgtgtgtgtgtttgtgtttcagagagaattttttttttaaatttttaattgttaagggtacttatggatgtatatatttatggtcaataacttttattcttatttttatttatttattttatagtccccagggaagaagcaacttaaaaaaaaaatacctttttctaagctaagcttagaaaatgttaaagaacattgggtacatgttatagaacatgaagcttataggctgggtcaatgtacagtagctcccccaatctgtcatttcactttctgaggtttcagttacctggggtcaactgtggtccaaaaatattaaatgggaaattctgggaataaacaattcataaattttaaattaattagctaggcatggtattgcacgcctgtaatcccagctactgaggaggctgaggcaggagaatcactggaacccgggagatggaggttgcagtgagccaagatcatgccattgcactccagactgggtgacagagcgagactctgtctttttttttttaaaaaaaaaaaaaaaaagttttaaattgagtgccattccaagttgcatgatgaattctgtcaccatcccactctgtgcccccagggatgtgaatcatttatttgtccagcatttccacactgtagacactacccacctcttagtcactgagtgtccaccttggttgtca

SEQ ID NO: 195292 - DNA, 1000 bp, Homo Sapiens
aggaacatacctgaaaataataagagccgtctatggtcaacccacagccaacatcatactgaatgagcaaaagctggaagtattccctttgagaaccagaataagacaaggatacccactcttatcactcctattcgacatagtactaaaagtcctagccagagcaatcaggcaagagaaagaaataaaagacatccaaataggaagagaggaagtcaaactatctctgtttgcagatgatacgattttatacttagaaaactccatagtctctgcccaaaagctcctcaatctgataaacaactggtaaagtttcagaataaaaaccaatgtgcaaaaactcaataggatttctataaaccaacaatgtccaagctgagtgccaaatcaaaaacaccatctcattcacaatagccacacaaaaaaataaaatactgaggaatacagctaacagggaaggtgaaatatctgcctgtggtcccagctgcttaggaggctgaggcaggaagatcacttgagcctggaaagtcaaggctgcagtgagctgtgattgcgccaccgcactccaggctgggaatggactgagagcttgtctttttttttttttttttttttttgagctagagtttcgctcttgttgccaaggctggagtgcaatggcgtgatctcggctcactgcaacctccacctaccgagttcaagtgattttcctgcctcagcctctcgagtagctggggttacaggcgcacacaaccacgcctggctagttttttgtatttttagtagaaacggagtctcaccatgttggccaggctggtctcgaactcctgacctcaggtgatccacctgcctcagcctcccaaagtgccaggattacgcgtgagccaccccacccagcctctaaattaaaaaaaaaaaaaaaaaacaagttataaaagctccaggcacagtggttcacacccataatcccagcactttgggaggccaagatgggaggatc

SEQ ID NO: 195293 - DNA, 1000 bp, Homo Sapiens
cccatttccccaaggttctgttctaacctctctttaatcctttttcccttggagatctcaaggaacagatgggagcctcagcacagtatagccttgtatgtgcacaggccatttccacacggggcggggacgtggcagctgtgctttggcggtcatctctggagaagggcggctggggctcaggaggctgagggagctcctgcttttcactttcttccctcctgtgaggttcagtttttttcataagcattaattacttttattaatatagtagaattgcaactgtaatgtaggatttttttttaggagaagggatagattacctttgaccaggctctcagggtttctttattaagtaatctgcctttaagatgggatagggggagggcattcaaagtaaagatggtcccctagttgtgatttttcgactttatgatggtgcaaaagtgataggcggtcagtagaaagtggcaccacattctcccatgatgctgggtggtggtgtgagccatgtctcccggtcagccagctggttgggagggtaaagggccaatgccgtacagtgtgctgtgctgctaggtgatgttgcccagctctgggctgtggaagcgttctgagtacactgaaggtgggctaggctcagctgtgatgctcaggaggttaggtggatccagtgcattttcactggtatttccagctcaccctgcatttatctggatgtaatctcatcataagtcaaggagcatctgtacaacaagcagtctgagggaaggcacagaggagaggctttggcacctggaaagaaatgtcgggcctcatactgcccatagtaatttgtagattcaatgctatccccatccagctaccattgactttcttcacaaaattagaaaaaaactactttaaatttcatatggaaccaaaaaagagcccgtgcagccaagacaatcctaagcaaaaagaacaaacctggaggcatcacgctacctgacttcaaact

SEQ ID NO: 195294 - DNA, 1000 bp, Homo Sapiens
actgaagcttagaactattttgctctacaccctcagctttcgttggcatccttataaactactgtagttaaagttttgtagaaacagcacagttttttaagactggctgaacttagtagccgtcaagagttctcttgtactagacctgtgtccctgaagagtacctcgctggggttatttcctttccttgcattgaagaagcagcatctaaaagatctaaaaaggtgtttctccttgcagagatatcccttaagttatctacataatttaatcctgatgaattgcagacaacacacttacatctgaccagcatttatcttatacaaatataacaacagctttgcaacggaccttaattatactacccactccttaacttatttaaaataaaaagtctataattacacaatttcctttagaattattttattaaatcataaatgtacaacagcttcttaactctacacacgcacttaaatttttttaaaggaaaaacgttatgtcttattacaccatgatcctggctaatagcttttcaaaactttgagaaaaatcttaaaaaaggtttcacatgtcacctgaaacttacaaatttaacattatcaaagaaggaatgcttctacactcttacaaagaccactagaaagaaacaacaattaaaaagctaagaaactgtctcaaaggcatttttttttacaatccttcctccacagtaaggtaatgttattaaataatccaatccattcacaaaatggctctctgcatctgctctggtgtcttctgccatatcactgcatatttatgcatgactgagataagagtttccttaacattgttatttcgataacctgaagctgttctgttacctctgggctctcatcctctcctatttatacagtgaagcctgtttcaacagaagtaaagagtaaaaaaaaaataggttatgaaattatccatctaaccagattttaaggaaagataacatgatcctaaaaagctt

SEQ ID NO: 195295 - DNA, 1000 bp, Homo Sapiens
gatgataagaaaaattcacaccaaaatcatgatggaatttcaaaatctgtttggatattagaaaatttctccaaaccctggcctttccttcctctcccaactcttgagctcacaggtgttgcttcactgactaaaatcctgacagagctccaattctactacctcccagacaactttatttgcaagctgtttctctactcagaaacaggggtgtcccttcagccgagcttttccaacaatgctgagctgggggctttggtacatctccccctccttctcagcctcagctctctaggtcctgaagtttgacctgggggccctgtccaccgtggggcaaagctgcagacttgttgatgagaggaggatgtgggtcttagggaaagagaaaggtgagctggggacagctggaccagattggagagaccacagggtccctgaaaagcagggggtaagggggtaggaggctatcatatagggaggtccctttggtatgcagactttgggacagaaagcacagttttgtctgaaccctccagaaggccctgaaagcatgggacataagcattgtgttggcgataacagctgcaggtgaaggcaggtgaatgacaaggaagggtgcttagggttagatatgagagctccaaaccaaggggccctgggcaggtccttttgttctactgttgcccctctctcctttccaaaaccccaaagctctgtggtgagctctggagacctcagctttgttctgagagcctctgagaggatttaggtgtctcttcatgggcctggggtgggaatgggagagacagaaagaaaggggacactaggtacggcctctggaaatgatttgaatccctgacccttgaaatatgtcagacccaccctgtgtgaaattccacgtctgctggaaatgtgacggaaatgtgtttagagggtgctggacctgcacttcgaaataaaacaaggctgacagcaagacttgagaatttacctaatgatc

SEQ ID NO: 195296 - DNA, 1000 bp, Homo Sapiens
atctgcatatagaaggaagatgtgagattttttattcaaagttaactagaaacccagcatgaggcagatggctgggagcagtccagggagtgtccaagatctgacacagaaaatcatgttcggaggggaggcttgttgctcattcccttttgtgtccagctgcctgggttcccttctccaccgttttatttgataataagctatctggagaacttgctgagcccagtgctgagccaagaagagaaatatgtgagctttgaaggtgcagtttcatttcgaggaatagagaatatctattcaaagttggggcagttcagagcagagtgagctgcaaactgttgtgcaggtatggggctggaaggcttcatacaacctcatagtcctgggacccaaacttttattcagaccatggaagcaggtgtgacaagagttgggcaaggcagacctttaattcaccctgataggctggagtgtgggcttatggcatttctcctttgacccaattaacctccactcccaatgtatctctgtgcagaaggctaagctaggtgtgtcagacattgtaaatcctcaacataaattataatttaacctagaatacagagactatgtagcaggaggagaggaaatgtggagatattaatctcttctcccttatcagaaaggaacctagcgtaagaaatttcatgcttaataggccaaagagtaaatcagaaaactccatgggtgatggtatgctcatggtggtggtggtggtggtggggaattctttgccctgtgacctcccttggattaatttgtccccagcacaatgggaaaaaacatttaatcctcggagttttaaaaatttatttatttattttttgcctgagagtgactctgatcctgtttctgacggtcatgttcgtcagcattgtagtgagtaagtcactggccttgtagcttctggagtgatgggagtgatccaagatccccagttcccatgtcacaaatgaggatc

SEQ ID NO: 195297 - DNA, 1000 bp, Homo Sapiens
agccactgtgcctaacctctgcagcacagttctgagtcttttttttttctttgagacagagtcttgttctgtcacccaggctggggtacagtggcgtgatctcaactcactgcaacctgtgcctcccaggttcaagcgattctcactcctcagccttccaagtagctgggactacaggtgcacgcctggctaatttttgtatttttagtagagacggagtttccccatactggccaagctggttttgaactcctgacctcaagtgatccaccagcctcggcctcccaaagtgttgggattacaggcatgagccaatgcacccagccaagttctgggtcttaacaatgtataatgccatggatccacacatgtagcaacaaaaagaatagtttcccagcctgggcaacatagcaagacccggtctctaccaaaaaacacaaacaaacaacaacaacaaaaaacaggccaggcatggtggtgcactgtagtcccagctactcagaggctgaggcaggaggatcccttgagcccaggagttcgaggctgcagtgaactatgatcatgccactgcactccagcctgggcaacagaatgagaccctgtctctaaaaaaaaaaagaaaaaaataaagaatagttttacttccctaaaaatccccaattctctacctattcttcctggattctggaaaccactgatttttttactgtctccatagttttgcctttttcagaatgtcacgtaattgaaatcagaaagtatgtagtctcttaatactgacttcttttacttagcaatatgcttttcaggttcctcaatgtcttttccaggcttcacacctcatttccttttgtggctgaatagtgccctattgtatggatgtaccacagtttatccattctacctattgaaagacatctttgttgcttccaatttttggcaattatgaataaagctgctatcaacactcatgtgcaagtttttgggtggacataagctt

SEQ ID NO: 195298 - DNA, 1000 bp, Homo Sapiens
acataacaatattaaccttaaatgtaaattggctaaatgccccaattaaaagacacagactggtaaactggataaagagtcaagacccattggtgtgctgtattcaggagacccatctcatgtgcagagacacaataggctcaaaataaagggatggaggaagatctaccaagtaaatggaaagcaaaaaaaaaaaaaaaaaaaaaaaaagcaggggttgcaatcctagtctctgataaaacagactttaaaccaacaaagatcaatggcaaagagattaattccacaagaagagctagctatcctaaatatatatgcacccaatacaggagcaaccagattcgtaaaacaagtccttagaggcctacaaagagactcagactcccacacaataataatgggagactctaacaccccactgtcaatatcagacagatcaacaagacagaaggttaataaagacatccaggacttgaactcagctcagcaccaagcggacctaatagacatctacagaactctccaccccaaatcaacagagtatacattcttcttagcaccgcatcacacttattctaaaattgaccccataattggaagtaaagcactcctcagcaaatgtaaaagaacagaaatcacaacaaactgtctctcagacaacaatgcaatcaaattagaacccaggatgaagaaactcactcaaaaccgcacaaccacatggaaactgaacaacctgctcctgaatgactactggataaataatgaaataaaggcagaaataaagatgttctttgaaaccaatgagaacaaagagacaatgtaccagaatctctgggacacatttaaagccatgtgtagagggaaatttatagcactaaatgcccaaaagagaaagcaggaaatatctaaaatcgacaccctcacatcacaattaaaagaactagacaagcaagagcaaacaaattcaaaaggtagcagaaggcaagaaataactaagatc

SEQ ID NO: 195299 - DNA, 1000 bp, Homo Sapiens
atttttataatgatatgtttgctctagcactgagtttttatcagagaataatcatagagataatggcttatttagtattttaaaattatttaatgtctcatatataaacactacctttttgtatcctacatgtaatttgacagaacgcttatgaaacaatatgattaaattttaaaggcttgtgttctcattgtttaactcctgcttatgagcgagaacatgtggagtttggttttctgttcctgtgttagtttgctgagaatgatagtttccagcttcatccatgtccctgcaaaggacatgaactcatccttttttatggctgcatagtattccacggtgtttacgtgccacattttctttatccagtctatctttgatgggcatttgggttggttccaagtctttgctattgtgaacagtgctgcaataaacacatgtgcatgtgtctttttagtagaatgatttataatcctttgggtatatacccagtaatgggattgttgggtcaaatggtatttctgggaacatcacacactggggtctgtcggcgggtggggggctggggagggatagcatcagaagaaatacctaatgtagatgactgtttgggtacagcaaaccacgatggtacatgtatacctatgtaacaaacctgcacgttctgcacatgtatcccagaacttaaagtataataaaaaaatttagaaacgaacaaacaaaaaaagctgttattccccatttaaaaaaaatttaagggcttttacttaaactatgttaatttttcaacatgttcttttgtctgacaattctttaagatctatttctctagtaatatcttacgcttgtgtgggactccatattttggaatgcttttgtctaaactgagtcactttggattcttacagtagcacaaaaagtagatggaaggtgtcagtgctcatttacagatgaagaaaatgaagttcatcaagtggaacttaattagtgtcagctgatc

SEQ ID NO: 195300 - DNA, 1000 bp, Homo Sapiens
tcacttcaagaaaaacatctgctggtatttgttgccagtaacatatttgaactttcaagtaaaagattagaattttggaaaacttgtatctgccaataggaggttcataggttcataacactcatttgatgagagatcagtgatgatattgggtaaagttttttttttgttattattttataaatgaaatttgtcagcatttggaatgtcttcataactcaataaatcagtattttccaagtgataaatgcatgatgttacaaaatcaggtgtctaaaaaatctattaaagcaaattagagcaatggattttaatgtacatacggtattagattccacatgccaactaacctcttaaaaactaccacttgttgaattttggtgtgaaaaaagaatattcacagtgatctgaaataatatttttaaatttctctgtgtttcaactatatatctttgtgaggccagattttcttcatttcttaaactaaaaaacatgttcaacagattgaatgcagaggcaggtatgagagtatagctatctaccattaaggcagacactgaagagttttgtaaaaaagtaaaacaatgctattctttttactaaatataattttattcagaaaattttagttcttttctgatgaactatttatgttaatatgactttattagttttaaaatgatacaatttttcttagttttaatttgcaatatgttaaatatcaatggagatactcccataaaaatgccatttggggtcctcaattatttttaagactcataaaggaatcctaagaccaaaagcttgaaaactgctgctctcagtaaataggcaactgtgtatatccaaggttctaatagactctcactatgtataaacacaaaggcctacaactagatttttaaacatttttttttctaaattttgtttttttgtattttttatagaggtggggtctctctatgttgcctaggctggtcttgaactcctggcctcaagc

SEQ ID NO: 195301 - DNA, 1000 bp, Homo Sapiens
gatatccctgatgaacattgatgcaaaaatcctcaataaatactggcaaaccaaatccagcagcacatcaaaaagcttatccaccaagatcaagttggcttcatccctgggatgcaagactggttcaacatacacaaatcaataaacgtaatccatcacataaacagaaccaaagacaaaaaccacatgatcatctcaatagatgcagaaaagtcctttgacaaaattcaacagccctttgtgctaaaagctctcaatagtctaggtattgatggaacagatctcaaaataataagagctatttatgacaaacccacagccagtatgatactgaacgggcaaaaactggaagcattccctttgaaaactggcacaagacagggatgccctctctcaccactcctattcaacatagtgttggaagttctggccagggcaatcaggcaagagaaagaaatagagtattcaattaggaaaagaggaagtcagattgtccctgtttgcagatgacatgattgtatatttagaaaaccccatcatctcagcccaaaatctgcttaagctgataggcaacttcagcaaagtctcaagatacaaaatcaatgtgcaaaactcacaagcattcttaaacaccaataacagacaaacagccaaatcatgagtgaactcccattcacaattgctacaaagagaataaaatacctaggaatccaatttacaagggatgtgaaggacctcttcaaggagagctacaaaccactgttcaatgaaataaaagaggacacagacaaatggaagaacattccatgctcatggataggaagaatcaatattgtaaaaatgtccatactgcccaaggtaatttataaattcagtgccatccccatcaagctaccaatgactttctttacagaattggaaaaaactactttaaagttcatagggaaccaaaaaagatcccacattgccaagacaatcctaagcaaaaagaacaaagctt

SEQ ID NO: 195302 - DNA, 1000 bp, Homo Sapiens
cccatgccccaggcaaccacaggtctgctccccgtcatatagacgagtgttgtctgtgttcagatttcaaatacatggaattgcacaatatatgctcctatgtctaaatttttttcacttagcataatgttttcgaaattcattcatgttgtatttatcagtagtttttagcattgtatcgcactgtggtatttcattgtatatatcatcatttgtttatccattgaccagttgaacatttgggctatttccagtttggggctgttttgaataaaggtgccaagttcaagtcttatttgcagacatatgttttcatttctcctgaataaatacctgcaagtggaatttctggatcatattgtaagtgtatgtataattttataagaaattgccaagctgttttccacagtggttgtatatctcaccagcagcatatgggagttccacttccttcacatccttgccaacatttggtgtggtcagtcttttaaattgtagccattttagtggctgtgttgagtatatgaaaaatcattgttaggtttagttgttcttctcatagcaagaccttgaagccttaaaaatatatttttaaaaattttaactgtaataaaaaacacatagcataaaattgatcatctcagccgtttttgagtgtagttcagcagtgttaagtatattcacattattgtacaacagctctccagaatgttttcatcgttccaaatagaagttctatacgcattgagaacaataacacttcatttctaccttcgccaggagacttttaaaattacactttttattttgaggtacttataaatgtatatagagttgtaagaaataatacagagatatcccgtatactttttactcaccttcccccagtggtaacatctcacaaacctatagtacaatatcacaacctattggaaccttttaaaaatacacacctctcaaagttgagtgagaagtcacagaaaacaggcaccattagatc

SEQ ID NO: 195303 - DNA, 1000 bp, Homo Sapiens
tagaaaggtctattcacagctttctttgaacagtgtagatcacatgaaactttcaactttatacatttctgtattaatattttacactacccacattatttttaaactttattttaaataaagaatttttaaaattaaatttagtgcttactgtttgaccttggcaagttattcaacactgagcctgttttatcaaatgatttaaaatgcctacttttatgttagtaaatattaaatataaatcattcattactcaagttgacagattgctataccattgcttgtttgagaaactcagagcttagtaattgttccttagttttttaagcatgtctccttcaagtgagtttatttggattatcagaattttgtggttttaaggtttatcaaagattattctagttcttgactgatgttgatctgctaagactattgcagtatccacattaggcagaaagcagggggaaagtcactttttttaaaaaatccttgaaatattctgatgtcactgcaattaaggtcaatagtgaccttttcattgctaaatccgttacacctgcatctaatatgaactttcagcagcacaggtaactcccaccagcttcttgaaacacttcccttaagtgctataatacttttaattttcttttcaacttgcagactactcctttattgtaggttcttctccccatcatgtaaatataggtatagtggacatccattgctttggcttgccaaaaatcacttcccctttactttaatcatacatccccacttatcctttagaaagctgctccttcccattctgtgtggtggtagtggaaatgtagatgacagtactccggcctcatgccccctggctgaggtttgagcaatgcaagctcgttctgtcccacaaggactttgattcttaagaaaggtgaccacaaagtgatcagagttgagtcattctgatcgtagtgttctaaagaaaccatttaaaagtttatgaaaggagatc

SEQ ID NO: 195304 - DNA, 1000 bp, Homo Sapiens
aatggcaaagttgagtagctgaaacagagaccctgtggcctgcaaagcatatttactatatggacctttatagaaaaagtttgctgatctatgatttaaactattctaagcttttcttaaatgaatactttttctatatattaaaagaaaaaaagacaaggataggaaaggaaaacaatgagagaaaaagattcttctaggatgtaaaaatggcaaaacaggccatatatggtggcccctgcctgtaatcacagagttttgggaggcagaggcaggaggattgcttgaggccaagagttcaagaccagcctgggcaacatagcaagacctcatctctacaaaaaaagtcaaaaaattaagtgggcattgtggcatgtgcctgtagtcccagctacacaggaggctgacgtgagctacacaggaggctgagcccaggagtttgaggctgcagtgagctatgatagcatcactgcactccagcctaggtgatagagtgatacagtaagaccctgtttcaaacagaaaagaaaaaaaattgcaaaacaaacattgattccaactatacctaagaaatactcgaaactttaggataaagctgagctctaattcagtattgtcaagaaagtataccttaaagaacattttataaatgaagttcctacaagatgactattacttctgaagtgggaatgcaccatgaatatagaacttgcaagagtgaatttaaggggtagaaatgtggaattttataacctggcaatgaaagtgactgaaaccacattagtcaggcaaaataagctgatctctctaactacaggtaaaataacattccaaacattgaaaaatgtacacaatcaaaattgtacgtggtaggggtttaagaaaccatttcccctgctaatttttgatgtttacatggaatgttcttacagcagcaaataacttaccaataatcttgacagactgaaaatgatacatctttaccacaacataaattaat

SEQ ID NO: 195305 - DNA, 1000 bp, Homo Sapiens
tcctgatagattgagaaccccatgagggcaatagctgggattatcttgttgactgctgtgtccccagtcacaacacatggcacataatcataggtgctcacttagttgctgaaggaataaatgagtctcagcatttgctgttccctctgcctggaatgctctccctctagatccttacatggttggcaccttctcgttatccatatctcagcttaaatgtcacctcctcagagaagccctccttgatcactctctaaagtagctaccatcatagtcactcaatgtattttatttcttttatggtgctctgtctccactcgaaatgaattcgttggtatgttaactgcctctcttcactggagtgttagctccaggagaatagctggcatgtctatctttttttttccatgatatccccagcatctagaacagtttgaggcactttgtacatgctcaataaaccattgtcaaatatagagatgagtgagtgtgtgaagagtatagagtatggagacaggtttgtaataaacagccgggataagttaataacagggacagacatgaggctgggaggactcatctatgcttggtgggttggggacatttaaggccgatggaaggagcagtagccagtgttccagggaaggaccaggatgagggaaggcagaagggtgcatagacagggcattttcagagcagaaccagcctgtggctgacaagatgggtggactcctctcctttctcctgagaccgcagacccatgatccatgggagtgcacagggcacgaagggggacagctgatcttccatgcagtcctggcctctgatctgctacagctgtgtgattgaccaccagcccctccttgaactgactggatgagcttggacaagtccctcaacctcttggagcctcatctctcaatctgtaaaatgagagttataaaagcaactatgcccaggttcgtagggaagattaaataggcaaatgcacagaatacac

SEQ ID NO: 195306 - DNA, 1000 bp, Homo Sapiens
tgggattacaggcctgagccaccacgctcagctaacttttctatttgttttttaattattatttttttgagacagagtctcactctgtgtataaggagtgcatatgttatatacatttttagttttagtagttactgaagatattaattataacatctatttttgactcatttaaatctattattagtatattctccacctaaacaatgcaaaaaccttagttctctttaagatcatttatcttcattctgatttatatgttcttaacatattttaattttttttttttttgagacggagtctcactctgttgcccaggctggagtgcagtggcgcgatcctggctcactgtaactgacacctcccgggctcaagcaattctcctgcatcagcctcccgagtagctgggattacaggctcccaccaccatgcctggctaatttttgtatttttagtagaggtgagatttcaccatgttggccaggctgctcttgaactcctgacctcaggtgatccacccacctcagtctcccaaagtgctggggttacatgcatgagccactgcatccagccaaaattttatacattttatataaatacatatctaacagaactatagaagacattcttttatgcacacagaaaatgttcataaaatccagtcatatgctaagtgggtcatatgctcaaacaaaagttccaaaaaatgtcaaaggatcggccaggcacagtggctcatgcctgtttttttgttttgttttgttttgttttttttgagacggagtctcgctctgtcgcccaggctggagtgcagtggcgcgtgatcttggctcactgcaagctccgcttcccgggttcatgccattctcccgcttcagcctcccgagtagctgcgactacaggcgcccgccaccacgcccggctaattttttgtatttttagtagagatggggtttcaccgtgttagccaggatggtctcgatctcctgaccttgtgatc

SEQ ID NO: 195307 - DNA, 1000 bp, Homo Sapiens
gcctcggcctcccaaagtgctgggattacaggcatgagccactgagcccagcctgattccccttgaacacttaatatactggtttcagattggccagcacctatgttaatttacaattgttctgtgaatttactattgtcctactcttgaggataggggaatgttcatatgaaaaaaaaaaaccactcagtttgtaattttacatcacccttctctacataaaaaaattcacagacaaagatagtatttgacctctaataccaatatccatgtattcattaataatattggattattaatcaccctttgatgttactggtaccaccagatgcacaacccttgaaatggcgcgcagagttagtgtcacctgtataaagcacagaaactaagttcttaaagtgcccaactaaatcaattcttctttaacagaaatgacttcctttttttaaaaaaaagctcagaaacttatcattcccactttataaactactcactgattatctctttatttgtacaaggctgaaggcaatttgtgctgtgtttcctttttggataattatttttaaaaatagaaattgaaatttactaatgatttaggaagtacaaactatcattagttgccagcaaagctaggcctggttccgactacttggaggctgaggtgggaagactgctttgagaccacaagtttgagtccagcccagggcgacatcgtgagacccaatctctaaaaagaaaagaaatgtatgccagcaatgtaatctttttgtttgtttgttcgtttgagacagaatcgcccaggctggagtgcagtggtgcgatctcggctcacagcaacctctgcctcccgggttcaagtgattctcctgcctcagcctcccaagtagctgggactacaggcgcctgccaccacacccagctaatttttgtatttttttggtagagacatggtttcaccatgttggccaggctgtcttgaattcttggactcaagtgatcc

SEQ ID NO: 195308 - DNA, 1000 bp, Homo Sapiens
tcaagctgatgagtgagatcctgaacggcatcaaggtgctgaagctgtacgcctgggagcccagcttcctgaagcaggtggagggcatcaggcagggtgagctccagctgctgcgcacggcggcctacctccacaccacaaccaccttcacctggatgtgcagccccttcctggtgaggcttggcacagggctgggtccctgcctccagggctctgggtgcccaggcatggccagggctcattggactctaccctgacaccacctccacgctgctcaggtgaccctgatcaccctctgggtgtacgtgtacgtggacccaaacaatgtgctggacgccgagaaggcctttgtgtctgtgtccttgtttaatatcttaagacttcccctcaacatgctgccccagttaatcagcaacctgactcaggtaaccctgggtagggctgggggctctactggagttggaacaggttgttggggtcagggaagggtcacttagggcaagggataatcagggggagttattggattcagggaaggttgctagcattatgaagagctattcaaggttgaatgaggtcattaaggtcaggggtcatttggagtcacaggtggtcaggtcgggtgtctggaaacctgagttctgtagatagcctcctcttaccaacctggactttctctttgggcagtgggagccatggaagactcagtcgtgggagggaccccagtgctagtgtctgggccctcagggggtcctgcctagcccaggatgctggggatggggcgagggtaggggttgggggttgggaaagtacagtctctagggctgactcacatcctcccgtaggccagtgtgtctctgaaacggatccagcaattcctgagccaagaggaacttgacccccagagtgtggaaagaaagaccatctccccaggtctagagagcccctacctgggctgcctgccccagtccttgctccagaaaaacctctgtttcaagct

SEQ ID NO: 195309 - DNA, 1000 bp, Homo Sapiens
caacagctgctaaagcttcatgccggggctgctgttgaaagatgtctcagagccctgctcagagtcttgttctcagaaaatgaccatgctttggagaggagatgacacagtgagtgggagaggtacatgcagctaagagcatttcaggaagaaattggggtctcttgaggaaaaaggatccaaaaaagaactacagatgaaattgattgctttaagttagcccattctatttgtatagttttaaaaataaaaactggaagcaggttggatgaacataatgcgctagcagacttgggaattaggggcagaatgctgctctaaattcaggaaatcatggcacggtttcatattgaacatggtctattcctaccactagcgctttcctggctgatttcttctccagctggagacttctttctggttttccaatttatgctccaccctcaccccaacccacccataaaccagtggctgccggaagcagtatctttcatagtggtgagttctggattttcagcagtaatggccgagagtcagggaccagatgagtgtgtgtgagctggtgagaaaaggtagatgatgatagaaaatgcgcagtgctgtgtgcatggagtcctgcagttctggacattttgaagattacctggcttttgacaatcaatggatttgaccaccttgctataagaaaagattaaatacatctcaaaagccaaatgataaattcaatttcttttcttttttttttttttttttttgagactgagtctccctccattgcccaggctggagtgcagtggcgcgatctcggctcactgcaacctctgcctcccggttcaagtgattctcctgcctcagcctcctgagtagctgggattagaggcactcaccaccatgcccagctaacgtttgtatttttagtagagacagggtttcttcatgttggccagactggtctcaaacttctgacctcaagtgatccactcgccttggcctcccaaag

SEQ ID NO: 195310 - DNA, 1000 bp, Homo Sapiens
tctaagagtaagattaggagtagtcctagatttacataaacatgggaccacattttcaagcatacttatatcaagacttttaacaaagtaaaaaaagatctcacgcctgtaatcccagcactttgggatgctgaggcgggcagatcacgaggtcaggaaatcgagaccatcgtgtctaacacggtgaaaccccatctctattaaaaatacaaaaaattagccaggcgtggtggcacacaccagtagtcccagcaactctggaggctgaggtagaagaattgcttgaacctgggaggctgaggttgtagtgagacgagatcgcgccattgcaccccagcctggacgacagagcgagactccatctcaaaaataaataaatgaataaataaataaattaattaattaattaaattaaattaaaataaatctcactaaaagttgagaatttagtggccacataatgaaaacctcaggcagggccaggatggagtaaattttgggcagccagtgacaacattgccaagatctggtctgcctcttaattcttcttgtcttttggaattggcctcatttccttgtgctaaagtcttactagaaccatagctgctctgaagtcacctccctgagtgtgtctgcttggatcacaaggccatatttgaacaaaatactgtaaatggggaatgtttcattagcccagtttgggtcaagagctcatgtatgcagcaaagacgtcagatgctacaacaggcaggctctttccaaagtcccccaacagagatagagggaggttctgttcccagcaggagaaaaggctgtttggtggatatacatctaaattgcaaaatatcctgcaacacagggtccatggaagatagtttggttagtgtattttttttctttttttcttttttgagacaggttctcacatcgtcacccaggctggaggacagtggcacgattatggctcattgcagcctccacctttggtgatccagtgatc

SEQ ID NO: 195311 - DNA, 1000 bp, Homo Sapiens
ggtaacagttattactgaaccataaattaacactaggttcccgaaaacaaggattaagaaaaaaatcatacattgttttaaaattaatgtcctgccttaaaatccatcttccagtgattaatttccactaacatgaaaaaatatatatatatatgtattgcttaaaaatatgtaaaaatatacattttttttcttttttcaaatgtctttagagtcaggatcttgctctgtcacccaggctggagtgggtggcatgatggtagcttactgcagtctcaaactcctgggctcaagtgatcatcctgcctcagcctcctgagtagctagtatagatgcagtgccaccatgctagactattattctctattctattctattctattctattctttttagagatggggtcttgctatgtttcccaggctggtctcaaactactgtactcaggcaatcctcccgccttggcctcccaaagcactggaattataggcatgagccacccagactcaaaaaatatattttagagcttggaatatctgtgtgcagccaagagacctcatgtggaaatccagtatcagtggcctggatttgagtggcatataaaatatacaaaggggagagagccatatgaagacagaggcggagattggagtgatgcctctataggccaggaatgccaagaattgctggcagccatcagaagcaaagagaggtatggaatggaaccaactctgtgaacactttgattttcgacttcttgtctctggaaatgtaagagaatacatttctgttgttttatactactgttgtggtaatttgttatagcagccacagcaagtgaatacagaatctgtattagtttagtggctttgatttactacaaatccaattagtcaacagcatggaaaagctatcacaagggccactaggaccttgggactcacttaataatagtatagagtccaaaacaagggggtaaaatgttattcaattttaaact

SEQ ID NO: 195312 - DNA, 1000 bp, Homo Sapiens
ttgaacccaggaggtggagcttgcagtgagcccagatggcgccactgctcttcagcctgggcaacagagggagactctgtctcaaaaaaaaaaaaaaagaaagaaaagaaaagaaaaaagaaagaaacaaaaacaaaaagagcaagctccgaagactcgagcttagtggggaggagcgaggacagaagcaggacataagagccccatttcctcctcctcctccacttttcccaaactagactctactgctgcgaggcgcagggcttcaggatgacaccggggaatgctgggtcagcatccatttcaacaccatgatgacaacatcccagagtaataataaggaagcagaagagaaagaagaccagagggccctttgacttgtctctctggcactgggacagcaggagtgaacagagcaggctcagaaaagatgaagcagccctcccgcggcttgggctgcaggctggtcgggagcgagcactgtgagtgctgatcatgtgccccacgtccctgccggcggggtgggggctggtggcgcaacaagctccccaccggcagccatagggagcttgtgggaagtaactcaattctgtgaggcgcatgagtccctgtcactaaatacaagacagaggggcacatcccatctggaatgggaatgcaggggtgggaagcttgttctttgcctaaggaatgaaacagtgaaaatcatggttgtcacatttattaagaattgccctgtccaaaaaacatgggtcttgtcagactgtctggtgtgtcctcggtgccaaggcggcccagggaaagggacaaagctttcagaagccgactccacagacacaaagacgaacaaggaagaagcaggaaggaatggcactgtttacctggtcccctaggaaaggccagaaagcaaggccatgtcagataaattccctctagatggctgggcgtggtggctcacgcctgtaatcccagcactttgggaggccgaggtcggcggatc

SEQ ID NO: 195313 - DNA, 1000 bp, Homo Sapiens
aaagtcaggggaaatggagagtgtgcctttccctttttgagttcttctgggcttaggaaggagatgaaccagataagcctactgtttgttgagtgcttccttttcatggctagtagagtcctcacaacagccttccagggtaagtactgtattattattagccgcatgttccagaggaagaagcaaaaactgagcacctaagtaaacctgcctgggaccacccagctaagaactggtggcgtcagtcggtctccagtgtagagcgagataacagatgagtggatgggccacaggtcctgggtggtgagggcggcagcagctttttgatcttaaaaatacagtttccttgtcacctgagagctctctgaaagcagtgtgtgagctgactttttggatcaactttacttttcccttctttttaggcaattgaagatgaaggtggtaatcctgacgaaattgaaattacctccgagggaaacaagaaaacatcaaagaggtctagcaaaggtatggaggatttcataagcaagtttcatgttaagtgctttcttcaaaacgaatacattgctaatgtgcctcgtttacttgtctgtgtgttggacttgtgaaccactctgaactgggagccttcagcgaagctttgcattttctttcaagatctctctactgtgttttgttttcttggtatctgggaattccaatggaggatggaaggagtatttgtcctttattcattttcctctgtagattgtcagcggtccttaaataaggagtcttttgggagtcagtcacagtggcgtgtgcctgtaattccaggcgactcggggctgtggtaggaggatcacatgagcctgggagttcaagaccagcctgggcaacatagcaaaacccagctctacaaaaaaacttttaaaggcccggtgtggtggcatgcatctgtggtcccagctgcttgggaggctgaaccggaaggattacttgaccccaggaggttgagatc

SEQ ID NO: 195314 - DNA, 1000 bp, Homo Sapiens
cacatgagtttggtatcttgttcaaagtctcaaagcaggtaaatgatagtgtgggattcgaatcaggagtttgtgtaatttgggcataccgtattacctttcctatgaaaagaaggagttatttgtgtaattttcataatcgttttttccaaattctgaagaatcaaattatagataagaacaaaattttaaggcatccaaattggaaagagagaagttaaattatccctgtttgcagatattatttttatagagagaaaaccctaaagacctcacaaaaactgttggaattaataaacaaattccataaagttgtaggatgcaaaattaacaatcagaaattagttatgatgataaactatctgaaatggaaattagaaaatcccatttacaagagcaccaaaagaataaaatacttaggaataaagttaactgagaggaaaaacttatacactaaaaatcataaaatactgatgaaagaagttaacagagacacaaacaaatggaaagacgtcctgtgtttatgaattggaaggcttaatattgttaaaatgtctatattactcaaacacatctacagattcagtgtaatcacttccaaaatcccaatggcaatatttatagaaataaaaaaaccctaaaattcatatgtaaccacaaaagatcccaaatagccaaaaaccatcttgagaaaaaagaataaacctggagacatcacacttcttgatttcaaaatatattacaaagctacaatgattaaaacagtatagctctgaaacaaaaatcgaaacatagactaatgagctctcagtttcacatgttatagtcaactgatctttgataagggtgccaaaaacacaaaatgggacaaggatagcttttttcaacaaatggtgttaggtaaactatacagacacatgcaaaataatgaaattggacccttagcttacaccatataaaaaataaattcaagatagattaaaaacttaaatataagatc

SEQ ID NO: 195315 - DNA, 1000 bp, Homo Sapiens
aaaatacaagaccaagaaaccaggcatctgcaagtcctctgattatgatgctggagaaggcactgtagccatagaagacaaatgcatatgcaggtaagtgtcaattttgctaagaatgaattgctgttctatttgtgttaggaagtgtgtgatattggctgactgcttcttacaggttggtccttagcaattgtagtagtttgaccagcctcggtgagaagaagcttatactaactactgcgtccatacatagcacccatccctgatacaatggccaatctgaagcaagaggttagctgatatccacaggtcaaaatttcttccctacctagatactcaattctgcctctaatgcagatgctgcctgatgggcattaacacagtccacaaagatctgccctttggatccactttcattgaacactcatatgcaatttatctagacttctgtatttctaatcaactagataagccatttgccattgcttagaggtccatgtaagtctgtattttaggctacttgtcccttggtaaacagtgaaaaactaaatataagctcacagctctgtcccgtgggaggattcccctccaccattatcctttagagccataacaagtggggctgctgtgttgcagctgtccatttgcaagtagcgccaaaatattatgctaagcctattaagcctgaagtttttatttttttagctggtattaagaaatcccttatgagccatgagtcaagggaaggtcctctctgtaaaagaagtaggtgccatgggagtctgggcaatgtgtttatgtaatttactttttttgttgttgttctgtgtgggcctgatccccaatgctccgtttctgttgtacattggattttagctatgtcttaccaaatactttatttggtgggcttcattatatctagcttagaatagacaactccagccaaaaagttagtgtccaacatgcaatatctactaggacccaatagcttgtcaggatc

SEQ ID NO: 195316 - DNA, 1000 bp, Homo Sapiens
tgtattgttaaggataacaataaaaaatattttactccgcacgctagtaatatctggaagctcaaacatcaaacagtatttatagtattcatcctgatcccttcgttaatggcaagtgagactgagcatagcaactgttggcctaagaccatacattttcatttttcagtaaatattaacttcataaatgaaattattggctccccacgtttcccatgtaaagtatcatatggcatgtacgtttgaatatccagcttcaaaagttactaatcaataaaattgaaagtagcaatgttgcaatagaagcatcaattcagtgagttttcaaagaagctcacagatttactgtttgtgaaactcacattttccatctgttttctaggaaaaagttatcccagacagacaaattagatcctggtagctgaaatgatcttaaagctgtcaactactataagcagtaagtcccaaatggtgggtgaagggtggtacagtatcctggtatctatcaaagctatctctaatttatttttttatgggcaatgaggaatgccacttaatcttggaacgcttttttcttgtttttctccattacatataaataacattgcatttggaaaatagctcaattatccagttgtaagaatacaattgaactatagattctctctccttacatctcttcttctgccagcttttgcttttttctcaattattcctgcttccctccttttcctcccattcatcctctttatccctctttggaaactgtgcctcctataaaagatggggccaaaatgctaaagaaaacacgctttgtctaaatctgcatgccactaatatccggaagctgaaacatcaaacaatatttatcgtattcatcctcctgatcccttcattaatagcaagatcattgccatcagtattttgtgtcacaaaaaccatctgctttgtattactttgctcaggcttacataacaaagaaccataaactgggaagctt

SEQ ID NO: 195317 - DNA, 1000 bp, Homo Sapiens
aaggcttacatgtatgacctgaaactgtaaaactcccagaagaaaacaggagaaaagcttgatgacattggtcttagcaataatttcacagatatgacacccaaagcacaggtaacaacagcaaaaacagacaagtgggactacatcaaactaaaatgtttctgcacagcaaagaaaataatcaagagggcaaaaagataaaatatggaatgggaaaagataaaatatggaatgggaaaaaatacttgcaaaccatgtatctgataagggatttggcttcaaaatgtaccagaaacccctacaactctatagtaaaaactaataacgcaattaaggtcttgaataaacatttctccaaagaattcatacaaatgaccaactgatacaggagaaacgctcaacatttctaatcagagaaatgtaaatcaaaaccacaaaacctgtcaggttggctataatcaaaaaagcaaagacaacaagtggtgaggatgtgggaaaactggagcccttgcacattgttgtaggaatgcaaaatggtattgtacttatggaaaacaacatggcaagtcctccaaaaattaaaaatagaactaccatgtgatctggcaattccacttctgggcatttttccaaaataattaaaatcaggatctcaaagagatgttagcactcctatattcattacagcactattcacaatagccaagatgtgaaaataaccctaaatgtccactgacagatgcatggataaatgaaatacaataaatacatagaatgaaacactattcagttttcaaaaagaagaaaattctgcaacacgcaacacggatgaatcttaaggacgttaggctaaatgaaataagccagtcacaaagagataaatactgcatgataagataaatactccacttatatgaggtatttaaaatagccaaatttacagaatcaaagagtagaatggtagttaccaggggctggggtgagggggaaatggggagtt

SEQ ID NO: 195318 - DNA, 1000 bp, Homo Sapiens
ttctgactcagcctcccgagtggctaggattgcaggtgcccactaccacgcctggctaatttttgttatttttagtagagacagcatttcaccatcttggccaggctggtcttgaactcctgatctcgtgatccacccacctcggcctcccaaagtgctgggattacaggcgtgagccaaagtgcctggactctctgtcatactcttttttttttttttttttttagagacagaatttagctctgtcgcccaggctggagtacaatggcatgatcttggctcactgcaagcaccacctcccggtttcaagcgattctcctacctcagcctcctaagtagctgggattacagacatgcgccaccacgcccggctgtttgtttttttttttgtttgtttttttttttttttggtattttttgtagagacagggtttcaccgtgttagccaggatggtcctgatctcctgaccttgtgatccgcctgcctcggcctcccaaagtgctgggattacaggcgtgagcgaccacacccagtcctctctctcatattctttaacacacaatgattaattactaaaatgaagactcttgttttctgaagggaaaaagaaatatttgacaaccagctccttgaagagcggaaccggcgccgtcggtgagggagcagccggctgtgctgtcagcggggcctggcggtggaagcgcctccagtgtgcatgagcgtgtctgaagatggggggctcagggggcacgtttgcgtttggacctgtctgtgcgttctcctgcgtggcagtcctgatttccatgcttctggagaatccatttcgttaacactgaaagccagttctcttttcctggcagtttttttcattttatttttggcattttttacaagataccgttcgggaaaggcttttgaaaggacggaagcgtattcactgtgcgccagtactcctggctgtgctgtggtttctcccgacgtgcacatcgatctcgtatg

SEQ ID NO: 195319 - DNA, 1000 bp, Homo Sapiens
ccccgcctcagcgctctccgcctcgtccggtacctccagctccatggccgcgcgcggacggcggcgggggcgcccgagggggacccgagctgcgaccgccgccgccgaacaacaagcgccgccggccaagggagggcgcgccgggccggcgcggggcggacggggcggggcctgcgtgcgtgcgacgccgcggacggcgcgcggccaatcggggctcgggggcggggcctgcttgcgacccgcagccaggagcgcctcgagtgccccctcgcgcccaggggtgggagtacagagccaggctcgccattccatcgtattaggtcagtaagattgacaggcacgatacgtatcaataacattgctgtgcacaacacataccaataacatggatctacacaacacatgacaataatatggatctatacagcacgtgccaataatatggatgtacacagcacatgccaataacatggatctaaacagcacatgccaataacagggacctgcacagcgcatgacaataacatggatctggccgggcgcggtgactcacgcctatattcccggcactttgggaggccgaagagggcggatcacctgaggtcaggagttcaagaccatcctgaccaacatggtgaaatcctgtctctactaaaaatacaaaaaatagctgggcgtggtggcacatgcctgtaatcgcggctactcgggaggctgaggcaggagaatcgctggaacccaggagggagaggttgcagtgagctgagatcgcaccattgccctccagcctgggccacagagtgagactctgtcccaaaaaaaaccacacatggacctacacagcacatgccaataacatggagttacccaatgcatgccaataacatggatatacacaatacatgccaataacacggatatgcacaatacatgccaataacatggatatacacaatacatgccaataacatgaatctatactatatcattgacatggatc

SEQ ID NO: 195320 - DNA, 1000 bp, Homo Sapiens
atcagcccacccgaggagtgtagtgaacccctctctcccctgctgatccccctagccccgtcttttcacctggcaggagccccagccaggtccctggtgtgtatcctgggagggagagcagggcatgagggcggggttggagtgggggaccttggagaaggcaggaagaggggcagagagcaactcggctttggaggtttctggctctctcccaggccagagacccatggagaataatggacaggcccaccccaccccaccccttcccccactgagacccaactctgtccgttggagcctgtcctccttcccctctgctccaggtcccacccacctccctcacctggctgggctccttcccacaggaaggctccagctccagcccgttcttgcaccatggggagacagggtacagcttgggaggggaaaagggtggaggggtaggcagtttctgcaggtagggagagtgaggagtgggaagggcttacctggcttctgaggtttcatgccctctccagcacctggagagatgcgagtaggtgagggacccatgcccactcctcactgaggggtctcttccagacctggcatctgtcccccacctggtgcccatgccaacctccccttcctggtccatgaccagtgggaactgcagggtctgtgggggcggcatggggagaggttggggtacagaagggggctggagcctggcccccctttcctcccaatttaggaactggagctcccagcacctccctcccccttgtgccgcctcctctccagactctaccccgtctaaggctgcaggagcccccaagaaaaccctcagtacagggtcaggggagagccaggcccccacctctttcctcctttctgcactcccagcaactccagccccccagtacctgctctgtagccattctgggctaaggggcctgtggggagggaggggtgagcagggggtttgggattctagctaaggagagggcgaagggccttt

SEQ ID NO: 195321 - DNA, 1000 bp, Homo Sapiens
ctgtgattgtcacactattataaactatgctatccataataatttattttaaaatctttacctaaatttgtactttggtccaaaattgagataaagactttatttcaaggaattgctttttggccgggtgcggtgggtcacgcctataatcccagcacttggtgggaggctgaggcacgtggatcaactgaggtcagaagttcaagaccagcctgatcaacatggagaaacctcatctctactaaaaatacaaaattagccgggcatggtggcacatgcttgtagtcccagctactcaggaggctgaggcaggagaatcgcttgaacccgggaggcggaggttgcagtgagccgagattgcgccattgcactccagcctgggcaacaagagcaaaactccgtctcaaaaaaaaaaagaaattgctttttattgatatatctaatatgaccagagtagataaggcgtttcaggggcctgaagtacaggaaataaaccatgatctcaatgcagttcctttttaaagatctggcaacatcaacaaactaaggctgttatagtactcagtatctaatgtggaaagcaaagtcagggattttacaatctataagacaaaattataataaaaacagtatatagcatataaatatagttggagtgcatttgacctaattaaagtgttaacagttaatgaatacagaagaattcagttgtaaaatatcttttgatgccaaagattatccaataaggtgaattgggtaaagaagtaaaatagtggatatttgacaggttttctgggaatttactactcttcaaataacgctgctttgtttcaagacttccaatctgcctgaattctaaatccctaagacagaacctagagaatttaagttcctctgtttcctttgtagctcaggcacaggcgtttgattaggtgaagcacactcacttgtattcagcacagaatctgttttgctggcaggagtagcatcagtggtttca

SEQ ID NO: 195322 - DNA, 1000 bp, Homo Sapiens
tgatggccccagcagggagccagcctgctctccgtgggccttgagtggaccccgcaggggcctcagagtccctgctcttgatggggcagctgcttttcccatcagcagctttcctgtctcctggaagctctcatgctttctcgggtgtgtagagccttcctcaaggcagacagctgctgaccacagttgtgacgtggaatcttccgcatctggttgtggcacagtggaaacagcccccactgccctcatttgttaatttctgaactcgcactctgggtctcttttcccctttagaggcagcgtggcataaagctgataatgacaccagcctggccgaggacaggccctgctctgtcccgaaggctgcagcacctacagccacctgtagccgttcacgtatggggtctgcctggtggtgacctactttggcctgagcttcctgatgcccacggcctgggagctgggcgtccgtgccaagtgtggaggggcacttgcctggtctcacagccttgcgtgttgttgcagggcagtcagggcgacagcaagaatgccaagaagaagaacaacaagaaaaccaacaagaacaaaagcagcatcagccgcgccaacaagaagaagcccagcatgcccaacgtgtccaatgacctgtcccagaagctgtatgccaccatggagaagcacaaggaggtaggcgtgggctgcggtgctgcagccgtgcctctggccgggaggagggaaagactcgcagctggcgggcgtgggcccgtgtgcaggtctgtggtgggagggaagtggcccccaggaaaccaagtggaccagttgggtgacatcatgcaacgtgtcaccaattttgttccatcccaaggcatcagggccatcaggctcagccacctgcctattctgcaggctgggtggctgcgcctgccctgagctcaccactggaggtgccatgtcccttgtgtgggactaaagcccctcctctcctgcaggtcttcttcgt

SEQ ID NO: 195323 - DNA, 1000 bp, Homo Sapiens
gctcctcaactctgtcaggacttgggaaaagattcaaggatttgtgaccactgtcctcagtcaccttgggttagagaaaataatggttccccaaaaatgtccatatcctaatcctcagaacctaggaatacgttgtattacatatgaagaaggaattaaagttgctgatgacctgaaaatagggaaatgctcctggggttatctggataggcccaatgtgattacaagggctcttataagaggaggaggcagaagaagagtcagtgtcagagtgatgtgacatgagaaagactggactggctactgctggctttgaagatgttagggggccatgagccaagaaatgcaggtaacctctagaagctggaaagggcaagaaaatagattctcccctagagcctccagacaggaacagctgccacctgccaacaccttaattttagcccagtaagactcattttggacttctgaccttcaggactgtaatttaataaatttgtgttgtcttaagcctctgtgtttgttgtaatttgttagagcagtaggaaacgaatacacacctcttccacttctttcatctatcattaatccctgggtaccagatatagaaacaaatagaaaaagaatcagtgactcagtggtgttaaggtgggtctgtgatcaggctggtaaatggcattttgtcaacatattcccagtggaacatgactaccaaacagattaaaaagactggttatcttctcaagctatgtaatgggtcatgtcctgctacgcacatggcagatgatgacaagttttctttggacttggacattttagagtgacagggatatttgcaagtatagtccgttgaaaaggtccctgtggaaagggtaaagtactccaactctttcaagtagagaatcatcaattctttttaaatcgaaggttacagatcaaatattttacttgtagctaatccctccatcagaactctttatgaatagagtacaggaagctt

SEQ ID NO: 195324 - DNA, 1000 bp, Homo Sapiens
gtattttacatgaattttgattgtatactctatttttttttttttttacagtggtactgaactgggaggtcttattacagtactgtgcttctttttcaaccatggagaggtttgttctctagaaagcaatttttaagaaatagaagaggctgtagaggaacaaggaaatatactcatcaaaagaatatttaattgtatactacttatgacttcacaatattttaaagacccttgtgttataagttgatattttaatcatgttgattgaaatgtttaaatagctagaatttcaaacatgaaatctcttgccttatttttagtaaatatatacatatgcatatattctgtagagaaaaggaaatattgtacttgttgagttgaatcatatcatgcacattatctgatttattcccactaaagtttttttgtgggtgatggtagcctcgccatacaagttatgaaatttaaatttagagaaaattaagttacttatccactttccacatttactacatgatgaagctggatttcccattctatgtctgtctgcctctaaaacctcacatatatattaatttatattttataaattataaaattatagttatattttataaaaacttatatattatatatatataacatatatattcaacttttttattgtggtcagagtaagtaacatatgatctgccctcttaacagatttttaagtgtataatatagtattaacacaatgttgtatagcagatctccagaacttattcaccttgcctaactgaaactttgtatgcattgctctccccttaacaacaatgaaagaggcctcaggcctgacagcagggacacagttaagacactgccacctgctccctcacttctttctgttacatcatgctgtctgttcagtaatgcaaaatgctgaattcaaaatagacattaacttactaattcagcccagtgaaacatagtccacctaaaaaagagctcatagaagctt

SEQ ID NO: 195325 - DNA, 1000 bp, Homo Sapiens
taggaatgaatacaggagtgggaactaacaggcttgaacaatggcacagggaggctttatctctgaagtatcaagcggaaggcagcccaaatcaggaaggactgcaaggtgttgttgatacctgcttcagtgtgtagacggccgtgggactggcctcattgctgttatgtgtggccacgtcgcctggaatcccccacccacaacactcgacccctctcgacagtcttcatagacggcgacaggaaattcagaaactgggaaatggccatgctggagtcctttaatgggcgaatggacacctttagggtggggggtgggtgtgctggtagcagctaaaagagtacagaggaaggttaggaaagcagcagcagtggctgtcagcctgcaaatcagtgtccgggctgtgtggatttgcagactgagccacgggaacctcctggggagagggtttggggaaggtcccctacaagagaaacgtgcatcatcttgggattactggagccctcagctataccttcctctgcaaaacggagcacagaaactggagtcacgtggtttggatggagaatgttgaagccaatagagtaattgctgcctgaagggcccatgtgaggaatgtcggagccggcctgtcccggaaatgctttttcctatgtgtcctctgtacactgttgctctagcttcccggcagaaatggggtgtggatgaaaacaacgttggtcctgacggctgtgagcacagaactagagtgacagccacatgcctcccgtaggacattttcaggcttgcagtgctgccacctcagaggtctcagtcacaccaacatcctcacgccagcccagtggccacattcgcaagagatttgtctagagtcaaattcaaaggttgtttctgtggttacagaaagagggcctaccttcttgaaaatgaagcccagggccgggcctggtgactcacgtgtgtaatcccagcactttgggaggctgaggcgggtagatcc

SEQ ID NO: 195326 - DNA, 1000 bp, Homo Sapiens
tatacatgtgccctgttggtgtgctgcacccattaactcatcatttagcattaggtatatctcctaatgctatccctcctccctccccccaccccacaacagtccccggtgtgtgatgttccccttcctgtgtccatgaaaacaggcaattttttttagtccagagactgaaatagcatatcctcagtttcgtgggtctatctttgagtatcttccattcatcttccatgcccacctttttttttttttttttttgagacagagcctcactcccatcacccaggctggagtgcagtggtgagatcatagccaacaactgcagcctagatttcccagactctggtgattctcccacatcagcatcccaagtagctgggactacataccaagtagctggcatcaccatacctagcttattctattctatttatttatttttattagagagggggtttcaccatgtggcccaggctgctctcctgggctcaagtgatcctctcactttggcctcccaaagtgctggaattacaggtgtaagccactgtacccagccctgtatttccttaaacgttactttagcaaaagttatctagctgcttcctttataaaatatacttgtacttatatttgaaatgaaagatatattcttcagggaattaattttgggaagttacacaaaaatttattccagtgatgctgccaaatttctctttaagcttcacagttttattgcattatttaaatatttggaattatgacaaataccctttttattaactgaattttaattttgacaccaagtcttgtgcacaatgaatcagagtgataggttttggattacagtgaagtgtaagtgcatatttatttttaggggcatcctgcaaactggctctgaaagcaatttccaagaaaaggatcacaaatatatttgagccatgacagccccaatgaagtaagtgtaaaatcacctatatgactattgtgcgactctattggatcc

SEQ ID NO: 195327 - DNA, 1000 bp, Homo Sapiens
atttagcaaaaataatactggaattctagtccatacccctcctccagcatttactagctgagcaattttggacaagtcacataatgcattggaaaattttccttatctgcagaaagggagcaccccttacccaggcattatcacaagctcaaatgagatgatgtaaactgtgatgtaactgtatcattagtggtcatagtggtgactatcatgactatgataatcttttttctagtctgaatatgttcatatatgataataatgtaataattgaaactatatcagagagcatggccttattattatttttaataatttctagtaataacccacctcaaatcatttatcttgtctaaaaggagaaggaaaatcagaaatattatcctagtaggaatcaggctgagaaagaacgctttttttgaaattttaattataattccaaactatgcttcacttcctcccttgctccctgtagccaacctggcatcagtgtagccttgccatcagcagggcagtctcactccatggccttcacatttgttatttcacctttgtggaatgttctctctcaaacatctgcttggctcccttctccttctttgctcaaacatctccacaaacattacgtccctggatcaactgctataaagctgctctaccaccgccaccctgggcattcccaaccctcttccctttattcattttttttcctatatcaccactagggtctaaattccataaaggcagggatttgtgtctgttttatttgctgtgctgtgttccatgcctaaaatggtccgctatatattatgcatttaataattgtgttaaatgattgaactgattttaatgcagtccaagaaattcatccattgggctaatggactctttttagcagtagttttctccattaaggcatactcttcacactgatttgggcagcaacaggcctgtggggagagcaggcagacgcaaaagagtgtgcacatttatgaagctt

SEQ ID NO: 195328 - DNA, 1000 bp, Homo Sapiens
ctggatatccatatgcagaagattaaaacttgaccattgtctctcactgtatacaaaaatcaaattggattaaaaacttaaatctaaaacctcatactataaaaccacaacaagaaaacgttgagtttttggttgcccgtaagcacaggaaaccaaagaaaaaaatggacaaatgggatcacatcaagttaaaggcttctgcacagcaaatgatatcatcaacaaagaaacaacccacagaatgagagaaaacagaagactaataagcagaatatataaggagctcaaacaactccataggaaaaaatctaataatccaataaaaaatggacaaaatctttgaatagatatttctcaagagaagacacacaaatggcaaacaagtgtatgaaaaggtgctcaacatcattgattatcagagaaatgcatatcaaaacttcaatgtgataacatcttaccccagttaaaatggcttttatccaaaagacaggtaataacaaatgctagtaaaggatgtggagaaaagtgaacacttgtacactgttggtaggaatataaattagtacaactgctatggagaacagtttggaggttcctcagaaaactaaaagcagagctactatatagtccagcaattatactgctaagaatatacccaaaaggaagaaaatcagtatatcctatgttgctatgaaaaggaatgagattatgtcttttgcagggacatggatgaagctggaaggcatcattctcagcaaagtaacacaggaacagaataccaaacaccatacgtttctcacctataagtgggagctgaacaatgagaacacatggacacagaaaagggaccaattcacaccaggaccttttgagaaatgtgaggggagggagaataccagtacaaatagctaatgcatgttgaggtttaatacctaggtgacaggttgatacaaaccaccatggcacatgttttcttttttaattttttaaattatacttt

SEQ ID NO: 195329 - DNA, 1000 bp, Homo Sapiens
gtaaatgtgactctgagatttacatgaggtaggctgcatggcatcgcctccccttaacaaaacagaaaacttgaggctgacaaaagttagtctgcccaaagggccatggctactggcgacaaaacgcttattagaatctaaatctcctggctccaaggagagcaacgaactttctggcgaatcacctcagcaccacccatcatggaaatgtcagagaagggggttgtatgtagggcatggagacagttgtccacatcttaccatctccttctgtgcgcagtttgtagtagttcttacactggtagcgaaccgagtgctccacatagccatgtgcaatctcggggggcttcgggcagccgtcatctgcaaagagagagaagccagagagtttgctatttggaaattgttcccagtgaaccgtgaaaagtcagatgagcgggagctgctctgcacatcaatctccttccaccccgaatagaagccaatggaaaggcaagctcccctcatttctggcaggaaccccaatgttctttatggtcctgaaagcccagaggtcgagataagaagggggaattgggtgttctcagagagagtgcagacccgagagggtcagagtgggatgcacactcctacccaaccaaagactgacctgcgatatccgtgacatcattgcctgagtccactgcaaaaagctgtccccagagcaggagggcaatgacagctcccagggcactgcagagagaagacaaggaggagtggaaagctagtctccctgcttcacagcacatgcatgcatccacacacacatgcatgtacacacacacacacacacatgcatacacacacactcctcccacttagcagccagaaaagaaagtcgatatatggaagtgctaggaccaagaaattgcccccacacctgcccatacacactttagcagcttctgagcataccaagcttccagcaagccctgtcctgctgggaattctgcagaagctt

SEQ ID NO: 195330 - DNA, 1000 bp, Homo Sapiens
atgctcaagaagctacaggaaagacaacatcttaattagacgcaatgaagacagaaaagaaaatatccaaatcaaacttctgagatgaagtttgtatttgtctgagatgacaaatacactggagaggatgaaggactgtttagaaattgcagaagaaaaaagcagcgttcaccaaagatacatgcttcactatgcagctatagcaatagaaattatctaaaatgaaatacaaagagaaagaagacagaaacaaaatcagtagagagttggtgagctgtgagacaatttctagcaggctaatatatgtgtaattgaattcccagagggagggagggaaacaaaaatatttgaggatataaaggctgatagttttccaaatacgatgaaaactatatattcccagacccaagaatttcaacaaaccccaagcacaagaggcattaagaaaattacattaaagaacattataagcaaattgcttaaaactggcaataatgagaaatatcctaaaagtagctgcagaggggaatgggcagggggacccattacatactaaagcagcagtccccagtctttttggcacgagggattggttttgtggaagacaatttttccacggacaggagttagaaggatggttttggaaagaaaccgttccacctcagatcaacaggcatcagttagattctcacaaggagtgtgcaacttagatccctcacatgcacatttcacaatagggttcaagctcctatgagaatctaatgctgccactgatctgacaggaggaggagctcaggaagtaatgcttgctcacccactcacctcctgctgtgcagcctggttcctaacaggccacagaccagtaccggtctgcagcccaggggctggggacccttgtttaaaaaacaaagataaggatgacaagagattgctcattgaaaacaatgcaagccagaagacaatggagcaacatctttaaagcactgaaagaataaagctt

SEQ ID NO: 195331 - DNA, 1000 bp, Homo Sapiens
ctcttttctgaaataaagtactactctattaattatgatatgaaatcatatatttgggtctactaaaaatttgttctctttattgaacttaatctccattttaggtttggtgaggctacttattaattttcaattgaacacttgtatttaaaagcatttctggctgggcatggtggctcacacctgtaatcccagcactttggtgggccgaggcaggtggatcacttgaggtcaggagttcaagaccagcgtgacatggtgaaaccccatctctactaaaaatacaaaaattagccaggtgtggtggtgcacacctgtaatcccagctactcagaaggctgaagcaggagaattgcttgaacccgggaggcggagattggagtaagctgagatcacaccactgcactccagcctgggcgacacagcaagactctgtctcagaaaaaaaaaaaaaaaaaaaagtatttcctacttcaaaacataaaaaaaccaatcatgtcatgctcaattggagaatctgattaaaagataatgttattaatgacaaagactaaaaggataccctttgggatctgataataaagctttactagcatctgctgagtctaattatttatactgtttaatatattatctagaaaagaatggccgggcacagtggctcactcttgtaatcgcagcactttggaaggctgaggtgggcggaccacctgaggtcaggagcttgagatcagcctggccaaatggtggaagcccatctctactaaaaatataaaaattagccaggcatggtggtgcacgcctgtaatcccagttacttgggaggctgaggcaggaaaatcacttgaatccaggaggcggaggttgcagtgagccaagattgtgccactgtaccccagcctgggcgacaaagcaaaactccatctcaaaaaaaaaaaggccaggtgcagtggctcacgcctgtaatcccagcactttgggagtcccaggcaggtggatc

SEQ ID NO: 195332 - DNA, 1000 bp, Homo Sapiens
gctgtagctttttggcccttctcagtcctgcctgtgccgccagctccctcctcctgcagccctgcaccctggggaaactttgcccgctgtccccagccaccctgaaccaaatgcccagcctgtctgcagctggctctgcaagtgtgtgagcaggactccctcagggagccccccatattcacactagtttccaaataaaccacctctaggaatcaagagaaaggccctcttccactcttttgcccctgagattagacaaagataagggagtgaaaacactctctggggctgtttgaaggcagttttcctggattacagtatgggctggggggcaagcgctgggctccatggtctctaggcactgagaggtgtggcgtgtgtgtgcatgtgcgtgtgcgtgtgtgtgtgtgaaggtgtgtatgtgtgcatgtgtttgccagcatgagtctctgtgcttgtgtcaactgtgtgcatgtttgtgctgctgtgtaagggtgtgtgggggtgagtttgcaacacgtgcccatggctcctggcttgaatggggtctggactggggtcactaatgacaagcagatgctggtgactgggtggcagctgtggaaaagaatgtctcctgggctgcttagcatggcaaattggccctggtggcagctgcctgctgtcccagacacggcctttcccagctcctcagacaagtgcaaactcaggccgggcttgggccacagcaggggaggatttggcctgagagactggggaaggcttggaggatgtctctgagggcccaagggacaggtgagcaggcctgggggtgcccttacagggagggagagaagccaaggagcagagaggaggactcgtctagagagatgaggctggcggggctgtgggcagggcatgtgggtgtggggacggtgtgggccatctctgagggcgcctcagagatggcagatagtgattacagcagctgtcctctcgcttcccagccaaagttcagatc

SEQ ID NO: 195333 - DNA, 1000 bp, Homo Sapiens
cgctacccaaagcctcacttcaattgtggtttctccaccaccaatgctcaagaccctgattctcctctacataattaatttttgttgcttctttccttaaagagacagcctgtatcagagcctctccttcatattgcacccctcaaaacataaaaggctacatttttatttaatcctcattacgctaccatcaacaagaaaaactgcattatttttatttttccatctgttcatttaaatccattttccttcggttataaataccccagcacacctggtttttttgtttggttggttgatttggtttttttgagttgtttttttaagccatcaggtcatactctactaatcccttggtgacgaaaaccaggccgttggcaagaccatctgagcattcccattaaaagccatcacatgctaaggtcccatggcttttttttttttttcttggcttgtcttttttgttaagtgccttctcttccttggagtgtcagcagtttgagctcgattactgaaagtgaagaagaaatgcctttctctttccctgacagctatattcccactgtgacaaagataatcatagacattaacagtggtaacaagctattagatcatcaactcagtgcttcttccagggcaggcaaagcatctaaaataacacagtatcatgactgcattctcaaaggtaaatacattaactctcactcccaattaacaaaaaggctctttacacacctacgctaaatccctctgtgcttgatacaatactccaggtacccaaagtcagactccactttggaggtattcaaacctctctccatccctcccttccttttctctaatagaatctcctgttccctagattacttttcccactacagaatccgtcaacccctctgccttttattgtagctatagcaaccaatcactccatatctggaggacataacccacccttgaccgccccccataacactagcatgaaaaatgttttaagctt

SEQ ID NO: 195334 - DNA, 1000 bp, Homo Sapiens
aatgaaaatagccttcaagaattggggcaaaataaaggaattttcagataaaagaaatctaaaagaattcattgccagctgggtgcagtggctcactcctgtaatcccagcactttgggaggctgagatgggcagatcacctgagatcaggagtttgagaccagcctggtcaacctggtgaaaccctgtctctactaaaaatacaaatattagccaggcccggtggtggatgcctgtaatctcagctactcaggaggcgaggcaggagaatcacttgaacccaggaggtgccggttgtagtgatccaagatcatgccattgtactccagcctctgtggcagagtaagactccatctcaaaaacaaacaaacaaataaacaaaacaaaacaaaaaacaccaccaccaacaaaaagaattcattgccaaaagacctacactacaaaataaaaagtgctttaggctgaagggaaattaaaatgtatggaaagaccttcagtaaaaactctggacactaaagctcaggtgagctacctggcaggtgatcatacatcaatgtgctaggaaggtgatgcatccccaagcataaattaaaatggaattcaaaaaaatattcaaagaatccaaaagaaggcaagaaaagaggaacacgggaacaaaacacaagaggcatacaggaaaaatgacaataatgttgcagacctaaattcaaccatatcgacaattatattaaatgttaatatactaagcactccaattaaaatacagaattggaccctgttcacaagatggcgccaaaagcgaagaaggaagctcctgcccctcctaaagcagaagccaaagcaaaggctttaaaggcagtgttgaaaggtgtccacagccacataaaaaagaagatccacaagaaaagaagatccacccaccttctggccgcccaagacactgtgactcctgaggcagcccagatatcttcagaagagcgcccctgggagaaacaagctt

SEQ ID NO: 195335 - DNA, 1000 bp, Homo Sapiens
acccttaagcattagactaattactttaaaaaaattctcaacaatatagggaaaattttgagttttcagttcttactaggagtgcttggaagcacttccgacgtgttaactcatttagcactgagtgccgccctttggggaaggcacttttattcctgaggcacaaataggttaagaaacttccttaatgcgaaattgttagtaggggatagagccaagattttgaaaattggtttttagatttgtttattattattttattactggattttaaaaatgttgaaattagggatacatgtgcaggtttgtttcatgggtatattgatgctaaggtttgggcttctaatgattctgtcaactaagtagtaaaagtaatacctggtaggtagtttttaacacttgcccccctcctttcctgtcatgttttggaaccttcagcatctattgttcccatttttgtgtctgtgtctatgtgtacccaatgtttatctcccacttataagtgagaacatgtggtatttagttttctatttctgtgttagttcaattaggatagtggcctccagctacatccatattgctgcagagtacgtgattttgttctttttatggctgcatagtattccatacaccacattttctttattcagtccactgctcatgggcacctggatagactccatgtctttgctactgtggatagtgctgtgatgaacatattagtgcaggtatctttttggtagaacaatttattttcctttgagtgtatacccagtaatgggattgctaggtagaatggtagtgcaactcttagttgtttgagaaatctccaaactgccctccccaatgactggactaatttgctttccaacagtgtgtaagtgaccccttttctcaacagcctcaacaacatctgtgatttttggactttttaacaaaagccattctgacttgtatgatatggtatctcatggtggtcttgatttgcatttctctgatc

SEQ ID NO: 195336 - DNA, 1000 bp, Homo Sapiens
attaagaatgctcagaaagaatgggaatatataaaaaggtcccagaaaccaaactgaccttccaagggccaaagctagaacaatgagcaacaaaataaatagcattgaattataatacataaaatacctatgtattcatattgatataaattataatcaatttaaaataaatggagcagcttttccttacaaaaaaatcctaatacatgtaaaagggagccaggcgcggcggctaacgcctgtaatcccagcatgttgggaggccaaggcaggtggatcacaaggtcaggagttcgagaccagcctggccaacatggtgaaaccccatccctactaaaaatacaaaagttagctgggcatggtggggcacacctgtaatcccagctactcaggaggctgagacaggagaattgcttgaacctgggaggcagaggttgcagtgagccaagaccaggccaccgtgctccagcctggacaactgagcaagactccgtctagaaaataaaataaaataaaaataaatgtaaaaggaaagagggaaatagaaaatcaccattagaacagcacagtaataattgttgcagataaaaacccatcgaacaatgggatataaaaatagtgagcaaaagtttgagaagaaacaggatatgtgcataattccaaagtatctacctgaagatatttaactgcaaaaagaaagaagctttacagtagaaaaagctgggtaagaacagcttattcaagcatgaacaaggttacctgcaccagtaagacacatcaacataacatacccttgacatcatgcactggaagggtacatcgtttctgtgggcctcttgccaaaaatgtattacttaaatctaatcatgaggaaacatcagacaaccccatatttagggacattctacaaaataactggccactactcttcaaaagtatccaagccatgaaagacctggaaagattaaggagacgtggcaagtaaatgcaatatgggatc

SEQ ID NO: 195337 - DNA, 1000 bp, Homo Sapiens
ggagaattatttttagttcctatatggcctgatgtgtaaatattcacagtatcaaataaatgggtaatttaactccagtcaacccatatctccaaattgctactgaacaagcaaaggcaatgacccaaagagatagctggcaagtggcttcttaagtggcacttaataaatgcttctacaagacagtagcaaacctaagggttttcctgttcctcctggacacctaatagtgccctttggttttcctcttcatgctaatcttcatgttagtttgtgcttgatttcagcatgtgtgtgcacccatgtgtgcttatgtgtatgtatgtgtgtgaagggagttggataataaaaaaagtctatgacttaaccctgctttgttaagttggattttcccatacagaggctttctcattaatttttttttcctctcttgacacatatgaatcagtaaatgattgctgaattccaacatcattaggagataactacccttcattaagattggattacaaaatcacaatttctgcatttatttcatggttctgggtaaatgcttagtgatcataatggtaaaaactccaaatacctgaaatacatgagaaaaacaagattctaaatctagagtctctacgttttgtcatcagtgtaagataagattgctgcattaagagcaacacattaagatatatacttaagaacgcatgtgcaaattatgataactctaaataaatgtttctttgtactataattttcaatataattttagttagttttacctgcttagaatttttaagagaactttaaagacatactttgaatttcaatgatcttctgtaaagaaataacagcattcatattcgggctttggtggagaatatcttctgcaagtggctccagctgcaagaatagtagataatagtatgagcagaatattatgactttatagtaagtctcacagaagcaaagcaaactgaaacaacctaatcctcaggaaaagctt

SEQ ID NO: 195338 - DNA, 1000 bp, Homo Sapiens
cctttttttttttttttttgagacagagtctcgctgtctcacccagcctgaagtgcagaagtgcggtagtgtgatcttggctcactacagcctcaacatcctgggctcaagtgatcttcccacctcagcctcacaagtagctgggactacaggtgcacaccactacacctggctagtttttgtgttttttgcagagatggagtctcactttcttgcccaggctggtcttaaacccctgggctcaagcgattctcctgccttggcctcccaaagtgctgggattacaggtgtgaggttgtgtgcctggctcagaactgtggacctttttgaaactgcctagtttgtggtgctgtgtttcagtagtcctaggaaacaaaatacacagtcacatcagtttctggtttatcctttttgtgtttcttttacacaaatggtgagaaacactgatatgctctgtgggcaggtgttggcacttggacacttccctcctgtgcccccagggctggctgtgctttggaaggaggcacagagacttcagcaccctggtttgatgtagactgttcgcgaactcctctaatgccaaataccatttaattccagaagaaatgtcccgggattttttttttttttttaactgtacgaataaagtgaacaatgcaattacatgggcccaaataactggatgtttacatggtttggaatttgaatactttctgaattgtggtagatgtttttaaggtatctgcatagagataaagacaggctagggttggccgggcatggtggctcacgcctgtaatcccagcactttgggaggcctaggtgggtggatcacctgaggtcaatagttcgagagcagcctgaccaataaggtgaaacctcgtctctactaaaaatacaaaaattaggcatggtggctggtgcctgtagtcccagctactttggaggctgagacaggagaatcgcttgaacccagaagatggaggttgcagtgagccga

SEQ ID NO: 195339 - DNA, 1000 bp, Homo Sapiens
aaaattagcatttcatgatatgactgttatgtggaagaatttttgcatttttccatttaagattggctaggaagaaattgtgttcctcctatttaaatcatctctaggtgaagataaccgacaataaagtagtattgtagagtcctgtctcttctgttggaaccagtctactacttcatttcaagaatgtggtctttatatgccctttagattattagaaagagattggctactattcttctttgctgtgtgcttcttttttttttttttgcatgtcttgctgttttgctaatttattgacccccaacctgctctaactcaccttcctcatttctgtcacagggcttcccacctcgactgccaccacagtacccaggagattcaaatattgctccctcttccaacgtggcttctgtttgcatccattctacagtcctatcccctcccatgccgacagaagtactggctacacctgggtactttcccacagtggtgcagccttatgtggaatcaaatcttttagttcctatgggtggtgtaggaggacaggttcaagtgtcccagccaggagggagtttagcacaagcccccactacatcctcccagcaagcagttttggaggtaaatagaattactgcatgtttatatgtaaaacgtatatatgtaattggacaacaatgataaaggagaaagaaacaggctcccctggtttagaacttatttggagaccatgtcaaactaacttctgcatgactttttcttacagcagaatgaaatgccaatgtggggtccttgtttccactggctgttctgttgggaagtgagtgtgccttggagaagatgaaccctattagcacttcacttctctagctagtactttagccattattcttgtcctttcacaaactttttccattggcagtcataagagtatcttaccctcctgtgctctcagcaatcatttttgccctgctaggagaagatctgaattccgcggatc

SEQ ID NO: 195340 - DNA, 1000 bp, Homo Sapiens
gggttcaagcgattctcatgcctcagcctccccagtagctgggattacaggagcccgccaccatgcctggctaataattattgtatttttagtagagacagggtttcaccatgttggccaggctggtctcgaactcctgacctcaggtgatccgcctgcctcagcctcccaaaatgctgggattacaggcatgagccaccgcacccggccatggactttctattttgtttttgaggcaggatcttgctctgtcaccctggctggagtgcagtggcctgatcatagctcactgcagcctcgaactccttgggttcaagcagtccttccacctcaacctcctgagtagctgggatcacaggtgtgcacttccatgcctggctacattttttattttttgtagaggtgggggtctcactacattacccaggctggtcttcagctcctgggctcaagtgatcctcctgccttggccttccaacatgctgggattgcaggcacgagccaccacccctcaatggtcttttaagtcttgcacaaagttccacactcgattagctacaactaatacttatggtaactttctcggtgccggccatggttctaagtactccacgtggatctgggaggtagatcccgtcactatctctgttgtctagaagagcagcgttaagcagtctgcccaagggtgcgctgttggggtggagcaggacttgaacccaggctccctgatgggcgtgtttccagtgtacttaggacacactgggccaagacacatgggctctggatgtccttagccctctcttcctctttctttctctggccccagtatgcagactcggacagcggggatgactctgacaagcgctcttgtgaagagagctggaggctcatctcctccttgcgggagcagctgccgcccaccacggtccagaccattgtcaaacgctgtggtctgcccagcagtggcaagcgcagggcccctcgcagggtttatcagatc

SEQ ID NO: 195341 - DNA, 1000 bp, Homo Sapiens
tgtggattcggtgggaaactgtggagtggctgcagcaaattggtgaatttgttgaactgaccaagttgatggtcgctctacagtttcgtcacgggactctgccctatataaaataatcgtcagtagttgggtaataattattctgcaccaaagttgcagaagacagaaagttgtgaggaaaacagatagcttcagatggccaagtcagaatttgaaaaagaaaactcattcatacagtcaacaagtatttgagtgtctgttacatgccagtcatatatccatcacggagcagctacttctgggttgattctcctagtatggatggtaagcaatgaagaaatgtgtgtggtgtctgcatgcaatgtcagatgatggtaaagaatatggaggaaaaatttaaagtcttaggagataagagcaaggtgtgaggggggtgctattatgatacagtgatcaggggcagcttctctaaggaagggcccaaataaagagaagctggtagatacccacaaatctgggggaaaactatacctggtataggcaacagcaagagcaaaggccctgaggctggaacatgtttggcatctctagaaagcctgagtagctggatatcagtgagagcaagcatgagaggtcagagcacagcttgtccttgcaggctatgggggatatcagatgtcctgagggagagggaagccactggaagcttttttgatatataattgataagatccgactcgtggtttgtttttgttttgttttgttttctttttaattgagtcagagtcttgctctgttgccccgcctgcagtgcagaaatgtggtctaggctcactgcaacctccacctcctgggttcaagcgattctcctgcctcagcctcttgagtagctaggaatacaggcacccgccaccacgcccggctaattttttatttttagtagagatggggttttgccaggttggccaggctggtctggaactcctgacctcaggtgatc

SEQ ID NO: 195342 - DNA, 1000 bp, Homo Sapiens
gaagctattattccaagcaaatgaacacaggaacagaaaattatatactacatgctctcacttttaagcgagcattgagtacacatggacgtaaagatggcaacagtagacactggaggctaccagagcggggagggaaggaggggacaagggttggataactatggggtactgtgctcagtacctgggtgacaggatcattcataccccaaatatcagcattgcacaatataccagaatctaaaataaaagttgaaaaaagcctgcaggaaatcaagattaaaaaaaaaaaatctcaaaagaagctggcctgtaatctcagcactttgggaggctgaggtgggcggatcacttgaggtcaggagttcaagaccagcctggccaatatggtgaaaccctgtctctactaaaaatacaaaattagccaggtgtggtggcacatgtctgtagtccccgctactcaggaggctgaggcacaagaatcgcttgaatccaagaggtggaggttgcagtaaactgagatcatgccactgcactccagcctgggtgacagagggagactccatctcaaaaaaaagaaaagaaaagaaaaaagaaagaaagaaagaaagaaagagcaagcaaagctgggagcaggagctgggtaggatgaggtggaaataagataaggtgggataaggataagaatcacattggacttgtcttcggaaatcatgcaagcaagaagagagtggggtgaaatatttaaaattttgagagaaaacccccaccatcctagaattctgtattcagtgaaattatccttcagaagtgaaagagaaatacttttacaaacaaaattgaaggtatttctcaccagtagacctgctttgcaagaaatgttaaaagaaatttttcagagagaaggaaaatgatataggtcataaatttcgacataaagaaagaactttaaggaataagtgaaagtaaaataaaacttttgtttttcttattcctaatt

SEQ ID NO: 195343 - DNA, 1000 bp, Homo Sapiens
tagacagggccagtttacataaagtcttacaggccatggtaagcatttggaatttacttccaaatgtaacaaagccattgcagggctacaaacaagcaccggcttgttccaattaatgtttacaaagacttctccagtgaacaacaaaaattaacagtgattgcctatagggatgagggttatagacagatgtgggtcagggctatgggaacttaaaaagcgttgttgtttttttaaaccacgtaattattagctatgcgcaaaaatgttcagtgaaaacagtgctggttgctgtgaggagaatggcctgcaggggcggaagcaggagatgagaaagctggtgtccttgcctgggcaagaaaggatagtggttctggaagagggtggtgctaatagatgagttgagaagggtcaggaactgggatcttttttgaaggtagcgccaagaaattaaacatggggtgtgagaggaagcatgaatcaggggtgacttgaaagtcatcctagagatctgttgtacaacagggtgactctcattcataacaatgtgttatatgcttgaaacttactaaaataatagattttaagttttctcacaccacaaaaaaataagtatgtgaaataatgcatatgttaattagcttgatttagccattccacaatgtgtacatatattaaaacatcatgttatttgcagcattaaaaaaagttctagcggggaggggggagggatagcattaggagatatacctaatgctaaatgacgagttaatgggtgcagcacaccagcatggcacatgtatacatatgtaacaaacctgcacattgtgcacatgtaccctaaaacttaaagtataataataattaaaaaaaaaaagttcgagaggttttggtcctggccaactgcctgaagactgagacttttttttttttttttttttttttttttttgagatggagtcttgctctgtcgcccaggctggagtacagtggcgtgatc

SEQ ID NO: 195344 - DNA, 1000 bp, Homo Sapiens
gattattactgctcacaacttggtacagctatgttcattactccagaatgaattattaatggcttgagatctctatgtatcccggacagaaaggcctagacgtcagcctctgcaggcaccagccatccattatagctcgatgaatttacagatgcatgggaaacaggctggcagagcactgcggagccggtccagcagaggccacgggactcgttcattagcaaggtctataaaacacagagaacctgctcttttgtcaaattgagctgtctgagttcctcctcacatggctcagaatgtcatgttgagtcttgacttaaaatctacacagagaagcttcttgtacacttcatgttgcagtgaaggagtctttgacacatgcttttcagatccctacatccacgtggactactctgctgtggcgtcttttgaaagaactgccaattctacaggcttcctttggctgctgcagagaaacagttttgcatgtgatattcacttgggagagatccagtttcttctgtgatcatcagaatggctgcatccactgagaagcagtggatctcccgaggggcatgacttcagggcagttgttgggggtagggaggtataggtaccccatgtttcaggcagttcccgcatgaactggattcaatgaggaaagagcatgttccatgaaaatggccttggcagaggggcctcttgccacctttgctttaagaggaaatagatggagactctgttttggtctgatgtcctttgagaggcagaaggaggtaaatcacttccagataaagatggtggtggggatggtggcagagggagcattatgatgggaatagcagtagccaacccttgtagggcttgtaaggcagagacccccaggctgtcatagggatcacatctgttttcctagagtttaaatgagagccagagctctataagtgctaagcagtactttaaaacaccagactggtcctaaagtattccaacaatacat

SEQ ID NO: 195345 - DNA, 1000 bp, Homo Sapiens
gctgggagttctatagccctcattacaggtggtggatgtgttgctgagttaaaagactgtctaccgggcgtggtggctcatgcctgtaatcccagtgctttggttggctgaggcaggtggatcacctgaggtcaggagttcaagaccagcctggccaacatggtgaaaccccgtctccactaaaaatacaaaaaattagctgggcatggtggtaggcgcctgtaatcccagctactcgggaggctgaggcaggagaatcacttgaacctgggaggtggaggttgcagtgagccaagatcacaccatttgcactccagcctgggcaaaaagggtgaaactctgtctcaaaaacaacgacaacaaaaaaaagatggtcattagtaactcagattgtctctctgttcttccctctccactgcctttactcaccacaaaaatacagtgtaaatggctaactagtgacacacaaataatttcatttcccgtttcttcaaccgtaatgcaatggttataggacaaaagtcatgcgacaggacagctctaaatgagcagccacaccataccacatacaagaaaaaaacacatgagatcagtacatcactttgtggtttttaagacactgaggtaaacagggtgggtgacactcctatttccagataagaaaactgaggatcaggaagtttaagtaacttctctgctgtcacacagcttgcgagtcagaacaggctggacaatgaacagtgatgtcctaattccaggcctggtgatgttcccgctacatcacgtatatctagctgccattctgctgataattacaggtgcctactctatgcaggcactgttctagaccttggagacatagcgcatgacctaactagagttcctactctcagagagcttgtcttctagggaggagtaacagataagaagaaaaataagtaaatgatgttatggactggtgctaagtactataaaggacaagtaagaaggacggaaagct

SEQ ID NO: 195346 - DNA, 1000 bp, Homo Sapiens
agcctcccaaagttctgggattacaggcgtgagccaccgcgcctggccaggactcacatttccttatccgaaaacttactatatggtgggtacagtgtgccttgctccagtgacgaatgcactgaaggccttgactttaccacaatgcaatatatcagaatagcaaaattggacttgtaccctatgattatgcacattttttaaaaaagaaaatttactacaaagttactgtaatctgaagagtgtggaactggcataaagatacacttacaccagtggattagatttgacagtctggaagtaaaccctcacatttacagtcagttgatctttgacaagggtgctgtggttttttaggtgtcaatttgcctggattaagagacaccctcatagctggtaaagccttgtatctgggtatgactgtcagggtgtttcccgaagagactggcattggagtcagtgaactcagtaaggaagacctgccctcactcactgtgggtgggcaccatccacttggctgagggcctggatagagcacaaaggcagagggatggtgaattctctctttctctctcctggagctgggacacccttttccttttgtctttggacattagaactccaggttgtttggcctttggccatggactgagggtacaccatggcttctttggtcagaactgagccatgctgccagcttccctggttttccagcatgtaactggctaatcatgggacttctcagcctccgtattcacacaagccaattcctctaacaaatcccctcatatatttagatctatttctatatctacaactatatctttatcccgttttctctgtctctctgaggaccccgactagtacaggtgccaagttaattgaatggaggaagaataatcttttcaaataatgatgctgggacaactggataaccacctgcaaagaaatgaaattttggaactctatttctcaccatattcaaaaattaaaacagatc

SEQ ID NO: 195347 - DNA, 1000 bp, Homo Sapiens; identical to SEQ ID NO: 114873

SEQ ID NO: 195348 - DNA, 1000 bp, Homo Sapiens
ttgtctctactaaaaatacaaaattagtcaggcatggtagcgcatgcctgtaatcccagctactcaggaggctgaggcaggagaatcacttgaacccgggaggcggaggttgcagtgagctgagatcacgccattgcactccagcctgggcaacaagagcaaaactatgtctcaaaaaaaaaaaaaaaaagttactgaggacccccaattattgagtttttatttatgtgagttatatctatcaatatttgctacactcaaaattagggccaggtgcggtggctcacacctgtaatcccaacactttgggaggctgaggcagaaggatcacttgaggccaaaagttcaagacctccctgggcaacatagcaagacactatctctacaaaaaaaaattttttttaattagccaagtgtggtggcacacacctatagttctagctactcagggggctgaagcaggaagatcgcttgagcccaggagttcaaggctgcagtgagctatgatcacaccactgtactccagccttggtagcaaagcaagacactgtatctttaaaaaaaaaaaaaaaattagaacagcttttaaataacaataaacccattatgttaatcaaagtaacattttaatttcaaaaacctgtattttccccctaaaatagtaagaagaatataattgttttaaatttttgcaaatctctttaatataatcaagggggagggggtgcacgaggagactagctttagaataaatgcaattttggtaccatctaacaaagcttaaatgaaagacccaaaagaatgaaactatttccaagtattttaccagcatcacaaaacaaagttcagtaatatttacaggaatacaaaatgcctagcacccaacaaggtaaaactcacaatgcttggcatccaacccaaactcaccagacaagcaaagaagcagaaaaacacaactcataatacaaggacaaaaagcattcagtgaaaactgagatcc

SEQ ID NO: 195349 - DNA, 1000 bp, Homo Sapiens
ttaactgtgacagggaccctcagtggatggggcatgtgtaggggaaaagggtgtttaaaattttagatatgtttagttacaaagagccctccaggtgattttgatgtctcttcaccttgtgaatcattgatgcaccagataaatgttcaaatgatatatgacagcagagcagagaagtacattttcttcagttgacatttttgagttgtcagtacaatactgactttagtttttaatttgcattgcactaccaagtaaattagttgaatttgtcagttgaagtacaacaccaaaaagaataattcctaaatataaaatgatagtacattctcaggtttttttttttaattgttgttgttttgagacagagcctctctatgtcacccaggctggagtgcagtggcgtaaccttggctcactgcaacctccatctccagggttcaagtgactctcctgtctcagcctctggagtagctgggattacaggtgtgtgccaccatgcctggctaattttttttttttttgaaacaagagtctcgctctgttgctcaggctggagtgtggtggcgtgatctcggctcactgcaagctccacctcccgggttaatgccattctcctgcctcagcctcctgagtagctgggactacaggcgcctgccaccacgcccagctaattttttgtattttcagtagagatggagtttcactgtgttagccaggatggtctcaatttcctgacctcatgatccgcccacctcagcctcccaaagtgctgggattataggtatgagccaccgtgcctggccaattttttgtatttttagtagagacgagtttcaccacattgaccagactggtcttgaactctcaacctcaggtaatccacctgccttggcctcccaaagtgttgggatcacagtcatgagccaccgcacccagcctttttttttttttgagctggagtctcagtgttgcccaggctggagcgcaatggcacaat

SEQ ID NO: 195350 - DNA, 1000 bp, Homo Sapiens; identical to SEQ ID NO: 114885

SEQ ID NO: 195351 - DNA, 1000 bp, Homo Sapiens
catgtaacttaacacagtggggttatcatgtttttcttttgagggtatttcaaaggcaggccttatcagtagcgtaagagtcaagcgtacacacagaaataaaataatgctgagtttttcgtgcttaaatccctgccataattctattggcaatgaataaaagaaactgatgtccaaaactgtcttctacataaataatgtagttttaactttaaaatgtcttttgtttttatagtcatagatgcacacagagtcaaaaccaaagagttctgagaagtctgccataaaaaccagtcccttgccctcactctccatgggcaacccttaggttgatctggtggatatttgggtagttacctccatatatctaagtatctctaaatatggaggtaacttgcatgtgcttcttgatttttcagttttgctacctttccaccacagctccctttcctgctgtgaccccatcgcacaccctccccatttccccagtggaagtccccagtttcacatacaggctaggtcagtagtcagtgattacattatatgtaaatggcattcaacatccatttaataaactctgattcttcccagcttttttatgcccctggtgttaataattaccctttcccacctcacttcagtttgacttgttttatctgttcttataaataattaaaacccaaactttttgccatttgtctaaatctcagtacatttagggagatcaggtattccatcaaattccaccttcctaaggaaatctctcccagagttttctgacctgccccaattaggcatgtgatcctctacagctggggcacagtttatcaccctgaacatgtactttcttgtgtttgggtgaagcacagcctccattttgtaaactccttgcaagtatgaaaatgttctggccaaatacagaattctaggttgaaatcattttcctttagaatactgaagacaaggctgggtgcagtggctcacgcctgtaatcccagca

SEQ ID NO: 195352 - DNA, 1000 bp, Homo Sapiens
ggcaaagggcctgagctctcagacaaccatatctagaggctccattgaaagaaatattattaactttctggcctttgggtcttctgaaaaggctgaataaatgcagtggcctggaatcagccaaattgtggagaatgaagacaagcctctatcaaggcgtgggaagaagtgctagaggagaaacagccttccttgagccaaacagggtgatagcagaggtggccagtgaacttacaagagaaaggcaaatctgggggacaagaattgaagctgcaaatctccaaccacccctcccaagtacagattcctccactgccagccttaggcggttagggtgtgatcttacgaaaagaattggcaggccttctgaggcccacagaggggtcgtgtttagcaaatagagaatcagctactcaaagagcccccgcgacactcatgcacacagacggaaaatcctaagtgtgatgttccccccagcaaccacgctgagacctcaggctaaagcatgttgagttctcctcactctggcacctgttttgtttttgtgtttcctggtgcatgcagggcaaaacgccacccactggcatgagataaagggaaaccagatgaaaggaagaacaagttcatgcaatcactggttttcttcttatagctaactcactatagtttgcttttacctgctgaacagaagggaaacatgggctaaatggaaggaagaccagacccatctggggccagcagcgagaaggaagaacctactctacaaggctgcctcactgtttggggttgcaccgtatccatttgtacaggatacgttacagtcctcaccctcagtacctaagaatgtcactttatttggagacagggtctttgcagagatgatcaagttaaaatgaaatcgttagaatgggccctaatccaatttgactagtgtccttataaaaaggagaaatttggacacagagacagatacagagtggaaagatgatgcaataagatc

SEQ ID NO: 195353 - DNA, 1000 bp, Homo Sapiens
tcgtttgaacctgggaggcagaggttgcagtgagtcaagattgtgccattgcactccagcctgggtaacagagtgagactctgtttaaaaaaaaaaaaatcaggaacgtggtaggatcaaaaagtcacatctttttaacattgtgtggatgattctaagcactgcagcaagagaaaaaaagacataaagtaaaagatataaagagtgaaaagtaagaaaaaaactgccaatattgacagaaaatacagttgtctgcaaactccaaaagagtgaattaaacttttttaaaaattaaaaataaataaaaagacaaaagtttaataaggtgactaataaagtaaagaggaaaaaataaattacatttctatacatcagcaataaataggaaacaaatatttttctttttttctagcaaaccatttctttaagaagaaaacaatttttaaaaaactgatgtaatttacaaaaggaaaaaatactgtaaagtacctaggataaatctagcaaaatgtgtaagatttttatgaagaaaatattcaaactttattgaaagccattagagaagatccaaataaatagaaatactatgtatatggttaggaagccttgttgccgtaaaggtatgaattctctccaatggatttatatattcaatggaattttagggtttcttatggaacctgacaagttgatttttaaatctacacgagaaatccaggaactaagttggtcaaggtacttgtaaaggaaagtagtaaaaggtgaggcactttctcaaccaggtataagacttcctataaagccatggaacttaagatggggttttaatggctcaggccaagacaaaggaaggataaaacttaaaggacatacaacttgatctatgacagaaataggcttgcagatggctggaggtagtagagactatatcataaatgttgctggagcaattgctcattcatatagaaaatactaaattggaaaaataattaaattgatc

SEQ ID NO: 195354 - DNA, 1000 bp, Homo Sapiens
tgcctcatggatgcacacccaccaccagtgtcacccctttctggtacccaagtggtgagtccacattcattccaccagattccttggtggtggcaagagtgggagaagggcaatttttggagtgggccagaaatcttggggtgtcactgtagatgtagaatcagagggatgcttaggacagaaggtgggggtatctggaaaatggcaaggtcatagttcagcagaaataaatgggtctagagagacaggataccctggtgtattagcttcttaggattgccataacaaaggactaacaaactgggtggcttaaaacagcagaaatttattctctcacagttctggagcctagaagtccaaaatcaaggtgttgacagggccatgctctattggacagctttaggggagaaccaggtccatgacttttccttaacttctgatgttggcattcttcagcttgcagatgcatcactgcactctctcttcctgtgtttctgtgtctccacatggtgtttgctctgtaagtgtctgtgtctctgctttctcttctctttttgtttgagatggagtctcactctgttgtccaggctggagtgcagtggggtgatctcggctcactgcaggctccgcctcctgggttcacgccattctcctgcctcagcctcctgagtagctgggactacaggcacccgccaccatggccagctaatttttttttttttttttttttttttttttttttttagtagagacagggtttcaccgtgttagccaggatggtctcgatctcctgaccttgtgatccacctgcctcggcctcccaaagtgctgggattacaggcgtgagccactatgcccagcctgctttctcttcttataaagtcatcagtcatattggattaggggcccaccctattcaagtacgacctcatcttaactaactgcatctgcaacaactctatttccaaataagtcagattctgaggttctgggaaagaca

SEQ ID NO: 195355 - DNA, 1000 bp, Homo Sapiens
ccaggcaaggtggagaggctggacctagcgcagaggtggggcgtagagagtctgttaatttcctggggctgtcataacaaagtgccacaaactgctgggtggcttaaaacaacgggaaatgtatcctttcacaggtctggaggccggatgtctgaaatcaagggattggcggagctgggtttcctctgagactgggtagaaccttgccttgcctcttcctagcttctggtggtggcctgaaaccttgatgctccttgacttgcagtcgcttcactctaatccccgcctgttgtgacatagcattccccttgtgcatctgtcctcacgtggcgtttccacttctttgctgtttgtttgtttttttgagccagagtctcactctgtcacccaggctggagtgcaatggcacaatcttggctcactgcaacttccgcctcccagattcaagtgattctcgtgcctcagcctcccgagaagctgggactacaggtgtgtgccaccacgcctggctaatttttgtattttttagtagagatggggttttgccatgttggccaacctggtctcaaattcctgatctcaagtgatctgcccgctttgggctcccaaagtgctgggattacaggtgtgagccactgcacctgtcccatttccacttataaagccaccagccagattggattagggcccactgaatgacattattttaacttgattacatctgcaaatatcctttttttttttttttttttttgttaagagacaaaggctctgttgcccaggttggagtgcagtggtgtgatcctggctcaccacagcctcaaactcctgggctcaagcaaccctcccacctcagcctccagagtagctgggactacaggtgtgtgccaccatgcctggctagttttattttgtatttttttgtagagaattggtggggggtggtctcactgtatttcccaggctggtctcaaactcctggcctcatgtgatgtatttt

SEQ ID NO: 195356 - DNA, 1000 bp, Homo Sapiens
atctcctgagagatcttatctttgccacattctcttcctctctttgttttctacccttttctttttcttctttcccggaaatcatcccttaaactttctctatctcctactccatctgctcttcactgcctgtctctctcaatccctacgtcttctcttgtcagcagtcacttgatcaacacaggtgccttctgtgtattcccaagaactttgccatgtgtattgtcccaatttttaacttccctagggtgctgtgctgaatattttataggcgttaaataaattattgaaaggctttagaactataggcaaatggcatttcacttatgtccttgtttctaagtcaatttttaaaagttgcatacctttatacctttataacaatggcacctttgttgatttcagggttattcagtagtttccttaattaatttttttgacagaaataaaggagtcaagggagggtgaacatgttctatgatccttggatttggcctgaaggctattaaggatttcaacagaaaaggaatcagtgcagaggaaaggccaaaaacaaaacaaatatattacggccaggcgccctggctcactcctgtaatcccaacactttgggaggccaaggcaggtggatcacatgaggtcaggagtttgggaccagcctggtgaacatggtaaaaccccgtctctactaaaaatacaaaaattagccaggcatggtggcacacgcctgtagtcccagctactcaggaggctgaggcaggagaattgcttgaacccgggaggcagaggtggcagtgagccaagattgtgccattgcactccagcctgggaaacagggcgagactacatcttaaaaaacaaacaaacagtaacaacaaaacccaaatatattagttttctattgctgccgtgatcaattaccacaaacttaatggcttaaaacaacaaaaagtgtattatcttagagttctttattgaattcaaaagtccaacatggatc

SEQ ID NO: 195357 - DNA, 1000 bp, Homo Sapiens
ggtcattttccttatttctttcttgctgtaatagttccagccctaggtaaggtacttgcttttctagctttcctgagagctacaagtggccatgtgacataagtttttttggtttgtttttttgttttttgagacagagtttcactttgttgcccaggctcgagtgcagtggcaatttcatgacttactgaagccttgacctcctgggctcaaacaatcctcctgacccagcctcccaagtagctggaaccatgggcacatgccaccacccctggctaattttattttttttgtatttttggtgtatgacagataacacatttttagccttgctgcctccatcccatgtctggagctgtagcaatcatattatgactctggggaaaatactaagggaatttcagaggtactgactcagacataagagagtctgaaaccattgccaacagcatctgcattccaaacttattttttctggaggttgattgttttatgttctataatcctcctaaggttgattattttatgttctgtaatcctcatgaagatctctatctacactttatttattattttttttgagacggaatctcgccctgtcacccaggctggagtgcagtggcgtgatttcagctcactgcaacctctgccttctgggttcaagcagttctcctgcctcagcctcccgagtagctaggattacaggcacctgccactacgcccagctaatttttgtatttttagtagagatggggttttgccatgttggccaggctgttctcaaatgcctgacctcaggtgatctgcatgcctcagcctttcaaagtgctgggattataggcatgagccactgcacctggcttatctacactttaagttgttgattctacaaattgaaaacctcctaatggtgtttacatgatcaagatcaactacatttgtctgcacagctacatatatgttgattaccatttcattcatttgaactttttttgtaatt

SEQ ID NO: 195358 - DNA, 1000 bp, Homo Sapiens
ctgatattggacttcctggcctccagaactatgggaataaatttattgtttcaagctatcaagtttgtgattatttgttactgctgccatagtaaattaatacaggagcatgcaggacagatctgtaatggcctgaactgaatttcaaggggtgtggaaaacagttactctttaacaccactccgtcttccccattagccatttggataagtcaaagatagccttagccatctcctatcttagttacttttctccttcaactgtattttgccattgtcgttgccattgcctctgcctaactgcaagccatcatcatctctcacatggactatgacgacctcctcatctccctgtatcttctctaatgcttctctcatatacatgctctcagcagccacctggtttaaaacaaaaacaaaaaaaacactaatcatgtcattccctgcttgtcttcccgttctttccaactgtcattccctgcttgtcttccaattctttccaactgcagttaagatcaaaccaccaagacctcaccaggctcccatctacttttcagcctcaactcagtccacctgctctgccaatcacacctgtttctttttgttgttctttccctaggatatagatcctggcatacctgcattctgattcttcttggaacaagccaaattctttcccctgtcagtacgtttgcatgtgtagtacatgttgcatcccaggcctgtctgccttcttaccctattttattttcatcatagcacttactaccatctgaaatgatctcatttatggtttgtctcctcagtgattaacacagttcctgcacacagtaaatcagtagttctcaacaggaagtgaagaggtcatcctgaggggaacatttagcaatacctagagacatttctggttgtcataaccaggggaatgctcctagtggatagaagtcagggaggctgttaaacccattccacaatgcacaggactggaacaaagaatgatc

SEQ ID NO: 195359 - DNA, 1000 bp, Homo Sapiens
gagtggcccccgttcgcctcacactgccttccacaactgtccctttccctagagtggccccagctcgcctcacactgcctcccacaaccgcccctttccctagcaggcctccgacagccggattagctagatcaaaaatcacggctcggccaggtgcggtggctcacgcctgtaatcccagcactctgggaggtcaaggcaggagatcacttgagcccaggggttcaagactaccttgtacaacaaagtgagacccccatctctacaaaaaataaaattagccatatgtcatggcgtgtgcctgcggtccccgctactcaggaaggctgaggtgggagaaccgcttgacctgggaggctggggttgcaatgagcctgcaatggtgccactgggtggcgccaagcctgggtgatagaggaaggacaatttattatctgtaaaatacgtgaccttagactagatcctgaactgaaggaaagtaagtattatacagaacattattaggtcaagtaacaaaatcagaatatggcaatacattgaagtattaaatgaatggtaaatccctgaagtcagtacccacactatggtcacactaacaaaatcctatttctaggaatacacattcagggctaaagggacatgttatttcaactcactcccaaatggctcaggaaaaaatatctgtataggagatgatgacgtaaatgcaaccaaatgtgagaagatctcagtaaaaagcttattagcgttctgcatactcccgtatttttctactaagtttgaaatgctacaaaatgaaagatcacctgtagaaggctggcatggggtgaaatgcatagactcccctgtgtttttctagcagcttacctttcacaaggtgagaagtcaataagctgaaccccttggtggctgaatctctgaatttgcttgaatttctctcccccccatagagcaatgcctctttgatgaaaggtagccaggtaggtgcccttaggagacc

SEQ ID NO: 195360 - DNA, 1000 bp, Homo Sapiens
acagtctcgctctgagtgtagtggtgccatctcggctcactgcaatctctgcctcccgggttcaagtgattctcccacctcagcctcctgagtagctgggattacaggtgtgtaccaccatgcccagctaatttttgtatttttagtagaaacagggtttcaccatattgctcgggctgatctcgaattcctgaactcaagtgatccacctgccttggcctcccaaagtgctgggattacaggagtgagccaccgtgcctgacctatatgcatattttatatctaaagaaaaaaggactataaataaatatgagagtcttgttataatatgtgtgctgaagtgtttaggggtgaaatgtgctactgccacaattcattttgaaatgcctcaaaattgaatggtttgagggatggatggttgaatagattatatgataaactgagcataatgaaatgttaattgtagaattcaggggtgggtatatggatgttcactgcaaaattctttcaacttttcattaagtttgaacatttcctaaaaatttttaattcttttttttttttttgagacagagtctcgctctgtcgcccaggctggagtgcagtggcgtgatctctgctcactgcaagctctggttcccaggttcataccattctcatgcctcataattcatttattttttagagacagggtctctctctgtctcccaggctggagtgcagcgatgtgatcctagttcactgcagccttgaactcctgggatcaagggaagctcccttctcagcctcccaggaagctgggactacaggtgcgctccaccacatttggctaattacccaggctggtctcaaactcttgtcctcaagcgatcctcccacctcggcctcccaaagtgttaggattacaggtgtaagccccacacctcaaaagtttttataagaaaacactgaagggaaattctgaagctgagactctacacttacatctgttaatgagatc

SEQ ID NO: 195361 - DNA, 1000 bp, Homo Sapiens
acggctctacaaatacccacccaggtcgcacagctatctaaaaagagaaggaggggtccctgacaacatgcccctccctgaatctctgcatgccccaaatctctacatactccataatcttcacatgccccatcgcaaggacctggctcaggcagattgtaaatgtgcctttgaggaccacatgccatcctcaggcaggtgttctgggataactcctctacccacggaggtgctatgaggatgcctgtgacagcaccagccctgggcctgcacaaggcaggcaccctgagaaaccaagtgccctccccagggagctcatttctagtgcacatgaggcttgaggggctcccagcaaaacctgacaacccacccaatgttagaacaatggtgtaaagacagattcctggcaacaccacaaaagagggccattgccaatcaagctactggctgcattagtaaaggtcgcaggaactgaatcaaaatagaaatccattttggttggtttcattgggaaacaaagaacatgccggcctgtgtttcttttgtctcagggacttccagacgccactgagagatgataaacagccaaacagatgcatttccgccagaaagggcttttgtggctagtcatttggaaatgaaacacaggcgctctccccctccttgacagaaagagcatcgacgagactggcaagtggctgccatgggccacggtcagtcgaccttgggaggctgtggattctgggcggttctgcccctggtctctgtggttgggcaacttcctctctaacctccagatttctgtttccttatgaagaataggtaagagcatggaggtcagataacctccaaggaacctccagtgccaaaaatctatgggcctcttcttggccaatcaccaccttcaagtctttttttttttttttttttttttttttttttttttttttttgaggcagagtctcgctttgtcaccaggctggagtgcaatagcatgatc

SEQ ID NO: 195362 - DNA, 1000 bp, Homo Sapiens
gaggcgggtagatcacctgaggtcacaagtttgagaccagcctggccaacatggtgaaaccctctctctactaaaaatacaaaaatacaaaaaattagctgggcgtggtggcaggcgtctgtaatcccagctactcaggaggccgaggcaggagaatcgcttgaacctgggaggcggaggttgcagtgagccgagattgtgccattgcacttcagcctgggcaacaagagtgaaactccatctcaaaaacaaaaacaaaaaaacctctcaaactcaatgatttatataaaatcctcaaatcttcaccagacatttagtattacaaaagaacagatgcaatcttgaacctacctgatctacacaggaggtaagggtttatactcctattttcccacatatgttgaactgtttctaaaacatctcagaatgtctcatattctgtggttattaaatagacttgagaacttttaaaaaaatacatgcaaatcatctgtatcattccaattttactattatgtgctgctaaagcgagcacagacgttgagttttaaaaatattatatatgataggctgggcacggtggctcacgcctgtaatcccagcactttgggaggccgaggagggcagattacgaggtcaagagatcgagacaatcctggctaacacggtgaaaccccgtctctactaaaaatacaaaaaattagccaggcatggtggcgggcgcctagagtcccagctactcgggaggctgaggcaggagaatggcgtgaacccgggaggtggagcttgcagtgagtcgagatcacgctactgcactccagcctgggtgacagagcaagactgtctcaaaaaaaaaaaaaaaaaaaaaaaaaaaaaatatatatatatatatatatatatatatatatatatatatatatagtatgtgatagatattttaaaacagagtaaatgcttctttctgagtattaaattaacatacatgtttaatgttgctgca

SEQ ID NO: 195363 - DNA, 1000 bp, Homo Sapiens
gcatgatctcaggtcactgcaactgctgcctcccaggttcaagtgattctcctgcctcaacctccagaatcgctgggattacaggcatgtgccactacgcctggctaatttttttgttttgttttgcttttgcttttttttttttttttttttgagacagagtttcgctcttgttgcccagtctggagtgcaatggtgcgatctcagctcactgcaacctccgacttccaggttcaagcgattctcctgtctcagtctcctgagcagctgggattacaggcgcccaccaatatgcccagctaatttttggtatttttagtagagaaggggtttcaccatgttggccatgctggtttcaaactcctgacttcaagtgatccacccgccttggcctcccaaagtgctgggattataggcatgagccaccgcaccatgccatttttttgtatttttagtagagaaggggtttcaccatgttggccaggctggtttcaaactcctgacctcaggtgatccacccacctcggcctcccaaagtgctgggattacaggcatgagccaccacacccggccatttttttgtatttttagtagagacagggtttcaccatcttggccaggctggtctcaaaactcctgacctcaagtgatctgtccgcctgggcctcccaaagtgctgggattacaggtatgagctaccacgcccagctggagttctttatttaatgatgtcctaccatgaaagttcacataactcctttttttttcagtttttattattcttttatataaatcctctggatcataactgcttctgtcaaaccatgataccgagctttatgacaactcagaagtaaggactaagagaaggcaaatataatgccttcaagatcaagagacgtttatgtagttcaactgttagaaacagctcaacattgagctagtgagtagagtgtgtatgtcagtatccacaatatacaaacccttcacggagctgcaa

SEQ ID NO: 195364 - DNA, 1000 bp, Homo Sapiens
gtttttgtgggccaggtctagaagtggtggatttcctttcacccacatcccattgaccagaagctgtctcgtgaccctgtctagatgcagggtgactgggaaatgcctctaggaagcagctgtctggaagtatctagattagagctttccaagggctatgtgtgtgagaaatttgggatagctggtgacggtgtgatgagaggatatgtgagaggtgacgactcttcagtctctgttcctgcggtggcctgggtgttgttcactgagagagcaagagagggttttagtttggaagcatgcccaggaggcagctgttcaggtcagaagcttgggaggaaggccagggccccaatgcgctgggctggtttgggagatattgggcggtgtatgttgtagttgcagccccaggagtggatcagatctgaggtagcgtctgaggcctgaaaagaggctgagggtggaactctggggaaatcagccttcagggatgaggcagtccaggggagagcagggaacaacagcccacgaggaggaaggcacacagcaaatggtggctggatagagccactcatgggggtaactggtagatctgtttcatgttcatatttggtaaaataaagatggcagccctgttcttaagctagttcccaaaatgtggggtcaggtctgacttgtctcggaaatctgtagtgtgatatttactggctcagatgaccttgagttttcttctttcttcagttttctcttttccttgtggtttacacaggtgagtttcttgaaccttccatttctgactcactttagggagagtgggtgtggttggctgcacttttctgcttcccctgtgactctgcttgtcttcctgaaccgcagggtcagttcttttagaaatagctcatcagtcctgctgcagagctggtacggagtcctgggtgcctgactcttagtcctctactcaggaggcattgagcctggtggtctagggcacagtcccaagatc

SEQ ID NO: 195365 - DNA, 1000 bp, Homo Sapiens
aggaagcacaaaataaaatccctaaaattaaatatgatgtccatcatcacaagtaagcaaagtacagttactttaaaatgctacgacagtttgaagttgtgtgacttcacaacttccacagggagactggaggcagggattcttctgaccatacttagccccatcttcccatcagatatattctcagagaccttctaacccaccctgtcctctcctatcccaggttccaattcagaagtcactactaccatgccttcctacccccacagttagaggccttcgggagtgtccccagactgtgattcagcctcttcctcccatttgcagaaaacagagaacagaccccagaaatgtaggaaagggggagaaaggctgagcatacagttcctgctacagagaagattatgccccactaaagacaggcagctaaaaacaattatttttatttatttatttttgagatggagtctcactctgttacccaggctggagtgcagtggcaccatctcagctcactgcaacctccacctcctgggttctagtgattctcctgcttcagcctcccaagtagctgggattacaggcatgcaccaccatgtctggctaatttttgtacttttagtagagacggggtttcaccatgttggccagactggtctcgaactcctgacctcaggtgatccaccggtcttggcctcccgaagtgctgggattacaggtgtgagcaaccacgcctggccacaacaattaaacatgatgaattgataagatcaaaatgtctatcttctatctgtggcctggatctgatggaggtgatcgtccgaaatgggtgaagcacagtgagtgctcaataatcacctgctggaatgaagggttggcaggatggccgggagaacagcagggtgggacacagcatcgaattcctttccctcaccaattcccacctagaaatgaccaatgtagtactaagaggagaacagtctgcacctgtgttgaaaaa

SEQ ID NO: 195366 - DNA, 1000 bp, Homo Sapiens
cggactcccaagaccgcctctgtatccagggctgaccttccctgggcccaagggctttatgtgtgatgggattagagcctgcacaggcctgggcacaggtggcaggataactcacaccttgtggcacaccctcctaagtctgcacacccaagctgagcccagcaccaggaccagtctgttggacaggccccaactgccacctctcccggcgtgtgcaattctggccacagccctccctcgctcacacaccctccatggctccctactgcccatattagctctcaactcctcagcctggtattctagttacctggtctcctgtccctcactccagttccccctcacactccatgctccaggccctctaagctgtgccactcccagatgtaccgatgttcatgcttccctagtctgtgcaggttcagttcccgctgcctgaagcacccttcctggtcctgccatcatctgctggttgtccttgaagcttttttaaattttaaatttaattttatttcgagacagagtctcactctgttgcccaggctatagtgcagtggtgcaatcttggctcactgcaacctccccttcctgggttcgagtgattctcctgcctcagcctcccgggtagctgggattacaggtgccaccacacgtctggctaatttttgtatttttagtagagatggggtttcaccatgttggccaggctggtcttgaactcctggcctcaggtgatctgcccacctcagcctcccaaagtgttggaaatacaggcataagccactcacccagcctcatcgaagcttttaattgtccaacctgcttgcccacctcctgtacccccaacctgaagcccagctgggtcaggagccggtgatgtcctcccctcccttccgcatgcctctgagctctgccgtcacatttctgcatcaagccacatgctcccgaggccaatgccacccccgccgaggccttccagcctcagtttccctcctagcca

SEQ ID NO: 195367 - DNA, 1000 bp, Homo Sapiens
tctggcaattgtaaaagatctcaaacagaccaaaaccatttttaaaatactacgctagaaaaagataaattatactgcaaaagttgcgctatcttctagccaatgtcttctctttggataatcaatattctaagaataacttttctatgaattgtcactgtaagtttcaacaaatcaatcttctatgaaatttcctaacctcatagattataatataaaatttgataaaagaccatgtaacagggtagaaaagatatttattattatttttttttttgagatggagtcttgctctgttgcccaggctggagtgcagtggcacaatctcagctcactgcaagctccacctcccaggttcacgccattctcctgcctcagcctcccacgtagctgggactacaggcacccgccaccacgcccagctaattttttttgtatttttagtagagacagggtttcactgtgttagccagcatggtgtcgatctcctgaccttgtgatccgcctgcctcggcctcccaaaatgctgtgattacaggcgtgagccaccatgcctggccagaaaagatattttttaagtgaaaaagatacttaaaaaaaaaaaaaagacttcctcatcctcaaaagcatttcagaatatggcacaatcgttttctttacaaaaccaaaatatttcccctgctttagaaataattatgatgtgatttttttctttctttctcaacctctctgtagcattacatgggaggaaaataaaattccacaaaaatagaaaagaagcataattgtttaagatacccaagcttgccaaaacaggaacactgtaaccaaagcaactgctggcatagctaatggaacagagatgtagcaagactgctataaagattgtttcatgaaatagcaagcaatattttagtttacaaagccataggctaatatgagataacctttgtgagcataaatacagcattaaatcaagtgtgacaggatttttaaaact

SEQ ID NO: 195368 - DNA, 1000 bp, Homo Sapiens
tatttttattttttaatccctgtcattatttttttgagatggagtctcgctctgtcgcccagggtggagtgcagtagcgcgacctcagctcactgcagcctccatctcacgggttcaagggattctcctgcttcagccacccgagtagctgagattacaggcacacgccaccacgcctggctaatttttgtattttttgtagagacagggtctcaccatgttggtcaggctggtctcgaactcctgaccacaaatgatctgcccacctcggcctcctgaagtgctgggattacaggcatgagccactgcatctggccctattattttttaattttttgtaaagatgtgtctcgatatgttgcccaggctggtctcgaactcctagcttaagagatcctcctgcctcagccttgcaaaggactaggattacaaccacaggcaaaagccactgcacccggccaaatttcatgtgtgatagtggcattgtgattatgtcgcagaatgtccttgctcttaggagataaatgaaggattcacaggtgaaatgttatgccacaatttactttcaaattatccaagaaaaaagtgtgtgtggtacacatgtgtacataaaatatctaaacatgttcattggtgaatctaggaaaagaatacaaacgtgttcactgtactttttcacctttgctgcaggactgaaattttttaaaataaaaagcaatcactgaaagtcttctttctgcttaagtttgaaatgtagaatgataaaaaaatttttaatgaaaaataaacagtttaacttacagctaagagttgtcttataagcatgtctgaagctttctcggaaatgttgccaacaaaaacagtggtagtaggaccacaattttcatcattttctttagcctttaagcctggatgatcctttcttgcgcccaaatgctttccaaccatagacacagtgggtactaagacctaaggtgaagaaacaaaataaaaattgatc

SEQ ID NO: 195369 - DNA, 1000 bp, Homo Sapiens
taagggcaggggatctgcagagtgaagcctgaaaccatctcggtgagagagaatccgacaccatcctcacacttcttatgggcgttgaccactgttacacatgtggggagaccctattactaggacaggaactccaggggcccaactccacctggggaacggggcttgccaggtgaaaaatcttgtttttaattttgttatcacagcaaatctgattcacaggcatcacgcgccagcttatccccagaggcacatttcctgcatgaagacgatgatgggctatgaaaaagctgacgtctgtgtggttataaacggctttactatcttaaaactaagttaattcaaatctgtttagactgagcaactgtgccagcagagggacctatctgcgtggaatgcgggaggagagtctggagctcctggctccttaagaagaaccttggtagcaagggtctctggttgagagtgaggtaccaggggcacgaatccttcacaaagatgccgagcatgtggagtgctctgggccagcagggatgtgcttggtagaacggcctgcatgtaggaggtgctcaacagcacctgctatgttaaactgacttgattaggtactatataaccaccaataactactacaaatacagctgagggagaagggcgtgggtggagtcaaacaccctgtactgcatttgtaggaactaataattaagattatcctgaaatcaaagagttggacgcagatattcatagatatgcaactgagttcacaatcaggctttacaaggaatttacccatggcacaagatcaagttcttccagcaatctggaaggaagcctttactgctcagaatctaggagattcagacagaaagcaacagagttgtgtgtgttcatctgtgccaagatttctcaacccagatgtgtgtgaggaagggtgtgcctttcctcagtctagctccatgggggtcagggctcagggccctttcacttcccagccctgatg

SEQ ID NO: 195370 - DNA, 1000 bp, Homo Sapiens
tttcctctcgtgggttttacattgttatatgagtaactttgacaaatatcaaattcactgtggagttggttgataatacagcttttggttccattggttctctgagccctatggtgattgtgattacaacaatggtaactttttagggcaaaggttcttgtatagtagatcaggatctgccacagttaatctttctcaagccttatctggcaggtctccaaaaattttttttaggatttctgttgttaaatgaaaaggcccatcttcctttgcctcttctcaggcaaaatctgaaagacctactctcatttttttcttccctttggaaaatgcttcctcagcttacgtacctcataatctttatgtttgactagtggttttcattctctgctggggcttttggggaatttgattcaaagaaagtacatttggggagctagtattgatattctagagtgattactaaagctttgaagctgactctagagtaatcctccttatgtttgcgtaattccttgtatgttaaaaagcacttgtattaatatatgagtatcatacaaacatgatatatagatgatactatcttcatttgacagctaagaaaaatgaggcttctctgaagtctcacagctggaacttaaatgcacattttctttttttttttttgagacagagtcttgctctgtcgcccaggctggggtgcagtggcgtgatttcggctcactgcaagctctgcctcccggattcatgccgttctcctgcctcagcctcccgagtagctgggactacaggcacccaccaccacgcccggctaatttttttgtatttttagtagagaccgtgttagccaggatggtcttgatctcctgaccttgtgatccacccgcctcagcctcccaaagttctgggattacaggtgtgagccaccgtgcctggccctaaatgcagattttctaatcctgaagtcagggttcattccacttcactccttgacttgatc

SEQ ID NO: 195371 - DNA, 1000 bp, Homo Sapiens
ataatttcaaatatttcttcagttcctttcaatttatcttctgtcattctaattacacatttttacacttttgaaatcatcacaaaggtcttgtatattcttttctactttattttctttcttcgtttttcactctgttatgttagtaatgtttgtagagggtgaacattctctaatcttctaattaaatctgattattttagtggcctgtgttgggagcaagccccccaaaatccggccataaactggccccaagactggccataaacaaaatctctgcaacactgtgacgtgttcataacggccctaacgcccaagctggaagcttgtgggtttacgggaatgagggcaaggaacacctggccctcccagggcggaaaaccgcttaaaggcattcttaagccacaaacaatagcatgatcgatttatgccttaaggacatgttcctcctgcggttaactagcccaacctattcatttaattcggcccatccctttgtttcccataagggatacttttagttaatttaatatctatagaaacagtgctaatgactggtttgctgttaataaacatgtgggtaaatctctgttaggggctgtcagctctgaaggctgtgagacccctgatttcgcacttcacacctctgtatttctgtatgtgtgtctgtaattcctccagtgccactggtttagggtctccccgaccaagctgttcccggcctgctttccagagctgtgactttcacaagtgtttttccaatggtttaactttttatttttttctgctgtctacttctttttccagacacagagttccagaatgctgttttatctttcttccttcttagttgaaataaaactagtattagatttagaactgtgttctgtcaaagtcttttcccttgggaaacttgcctttattatgatcaagtttctgggaatattgcacaatgattactcttctctccctaacagagccatgagatcatcattggatc

SEQ ID NO: 195372 - DNA, 1000 bp, Homo Sapiens
tcgtggtgattttttttttttttttttttttgagacggagtctcactctgtcccccaggctggagtgcaggggcacaatctcggctcactgcaagtgcaagctctgcctcccgggttcacgccattctcctttcagcctccaaagtagctaggactacaggtgcccgccaccatgcccagctaatttttttatatttttagtagagacggggtttcaccgtgttagccaggatggtctcgatctcctgacctcgtgatccgcccgcctctgcctcccatagtgctgggattacaggtgtgagccactgcgctcagccctcgtggtgattttttgaaggcctgtatggacatactcttaactctatctcctggatgccaagtgcacccttatcctaggccagtgttctcaacaatgtacacactctggatgagaaaaataaccattgtttacaatccagctaaaatctcacctcctccagggagtcttcctggatttctccaccctctgaattctcataatgggcatttggctactttgatcacagggctcttagaactgcgctgtccagcattatgattttaccagaatatatcactcctcaactactttagaaacccctcgaaggctaggatggtattttatacctaacagtttggtgtcatcccacgcccacctccaacttacatgaatgttggaaggatggatagggaggtttcaactagagaacggagaagggcggatgtaactggttcttgatttcagaaaacagccaggagcacacatggctgacggggtcagtgcaaggacaggcacatttcccttctgcatcacgtggggactgcgcctccctatgtcatgaagccagggaatatgtgtggccggccgcttggggtagcacttgttgctagagataccgcctggaggccactgatctgtaaaagggatctctacagaagatagggatttttgatcgccagagaagaagggatatgtgagatc

SEQ ID NO: 195373 - DNA, 1000 bp, Homo Sapiens
gtgggatgtattcacacaaaggaatattattcaggggggaaaaggaaggaaattctgacacatgctacaacatgaatgaaccttgaagacatcatgctgagtgaaataaactagtcacaaaagaacaaatactgcatgagatcccacttgtatgaaatacctggtgtagccggagtcatagagacagaaagaatggtggttgccaagagctggggagttggtgtttagtgggtatggagttcctgttgggtaagatgaagagttctagagatggatggtggcaattgctgtccgtattgaaaatgtgcttaacacgattgaattgcacacttaaagatagttaagatggtaggttttgttgtgtgtattttaccacaattaataaaatttgaggccaggtgtggtggctcatgcctgtaatcccagcactttgggaggctgaggtgagtagattggttgagctcacaagtcggagaccagcctgggcaacatggtgaaacctcatctctacaaaatatacaaaatgtagctgggcttagtggcgtgcacctgtggtcttagctactcaggaggctgaggtggaaggatcgcttgaccccgggaggtagaggctgcagtgagccgagattgtgccactgtactccagccaggcagtagagccagaccttgtctcaaaaaaataaaaataaaaattaatgtttaagattttattttattttagattcaagaggtacatgtggatgtttgttacatggatatatggcatactggtagggactgggcctctagtacgcccattacccaaatagtgaacattgtacccgataagtaatttttttaaccttcctccccttcccaacctcccctctattggaatccccagtgtctgatgttcccatattttttttttttttgagacggagtcttactctattgcccaggctggagtgcagtgcaatctcggctcagtatagcctctgccacctgggttcaagtgatc

SEQ ID NO: 195374 - DNA, 1000 bp, Homo Sapiens
aaaggtattaagttcagttctcatcgtctagttccatagtttttaacaattcaaaacctggagctaactgaaaaaatactacctgtgtataaatatataaagaaaaaagggattatagggtagtgcatgaaagaaatggtcagagaaaaggaagatctactttgtcatctctgtgtaaccagtgaagggcctgaaaggaaaacagctattaaatacgctgttacttgatccagtatggcctatatttatcattccatttcacaaggaaataaaattgagcttcactgtagtgaaaaaaatacatgtagattaattataaatttattacaacaaggagacttctgcatttgcagaagtgttaacacaggcaatggactgacaactaaaaaaaattaatgattattgccaaactggacccaaggctgcaactacttagagtactagcacagtatttcagagagagggaatctcttggttttcatccaagttattttagctattgaagtacccaggggcccatcttatgtaaatctactagcctggttgtgtgatttaccaaaaataatactaactgagaaagatatgtaagtgtagatttattgtcatataagcagttgggaaaagtgtactatgtcaaaaggagtgaaaaattgtattgttcacatttatgttaataatgatcttattttaatatacaattagtaaatgaacatatgttattgaaaagcatttgtgaaaggaaacactgttggaagaaataaaaataattgtaattgttaaaataatagaatctttattaatgaattgataaaaaagaaagaattttaaagtcttagtgtaagatcaccttaaataaatctgttaacaaaaagtaaatgaagagcactgggctgtcatatgtccaggtgagattatgcaacctttatttttctttctgagcaggttttctggccagcatctacaatcaaagttgaagaatgcaaaatggctggcaaagatc

SEQ ID NO: 195375 - DNA, 1000 bp, Homo Sapiens
caatcagagatgacagagtggtaagaacaggagctggccagatctcagaaactaatgtttttcttcaaatacgcctgtttctacttacagatctattgccctaaaaatgcagacgagtgtgttgaaatattgattatgaattgtgagtctcctaaatccttttaaacaaagcttacctcattgtatccagcattcttatccccattagcaaacacatttttaatggctggtaattttaaaaaatattttagtacacttacatgcaaatatagtgtacataaatcagttacaatgtaaacattctaattctccatgttcccccctttacccagcaactgggtagagctcttggctttagaaagctcattagagaatgctcttccatgatctgagattataagttacggtactgggaaaaaaaaaaaaaccccaccccaaaacagaagccccaaaacccaaacaagaaacaaaacaacttgcctgctgatatataaattagacatggctaggaattctgatttggggttctctcatataaatcgtaactcggtccatcagtctgttctcaggaaagggagtacagtgggatgtggcacactatgtaaaagctacgccaaaggactctaggactatccaagggtgaagagtagcacagtgacaatgtaattttattctctacggttttaagtgtgatgggaaccattctgaatggccagtactcagagcatgtgggaggacacaccactgtgtgctggcccacttgagtaactgaatgggtgccttattgagggcaaaggcagactccagccataactgacctctctgccctcatctcccagtgctctggctctccccctctccactctggcccggtcagcctgcttgctattcctcacacacactaccatggacactgctaccttacgaatccctgtgcacactgcctgcactgctgtctctccccacccgctgaccccaccacgcatacacccaccggatc

SEQ ID NO: 195376 - DNA, 1000 bp, Homo Sapiens
acagacacacaaaaaataacagctatgtgagcctggtatgccttctttcccatttttttttctttttttctttttttttatttttgagacagagtcttgctctatcgcccaggctagagtgcaatggcacgatctcggctcactgcaacctctgcctcccaggttcatgcaattctcctgcctcagcctcccaagtagttcggattacaggtgcctgccaccaaacccagctaatttttgtattttttttagagatggggtttcgtcatgttggtcaggctgatcttgaactactgacgtcaggtgatctgcccgccttggcctccccaagtgctgggattacaggcataagccactgcgcccagcctcccattttttcaatctcctcagttcttctattctcaacgttttttgacttcacctttcgtttccctgatttgattttaattctccttcatgagtttcaaagttgaactcaattggcctgttgctatttcattgtttatctccgattctggttggctactgtatatgtgatgccttctttatctctgaaaacaagactctagccattgtttgaaatcctcgagtttcctgttggagatccatttcaggtattagatttatccgtgtccttgctgttctgatccattcttcctcaaaataagccaataactaattccataaaattttctttttgtctgtacttctgctttaattatctgattccttgctgttaataccaaacagcacacaacatttggttttgggttttatgagacaaagtctcactctgttgcctggacgagtacagtggcaccatcactgctaactgaagcctccacctcctgtgttcaagcgatcttcccacctcagcatccctactagctgggactacagacttgcagcaccacgcccggctaattttttgtatttttagtagagatcgggtctcactatgttgcgcaggctggtctcgaactcctgagatcaaatgatc

SEQ ID NO: 195377 - DNA, 1000 bp, Homo Sapiens
agcctatcttacgcgctttatctatttgctaccaccctgtgatatgatttgaatgtttatcccatctgaaactcacgttaaaacttaatccccaatgtgggtattatgaggcaggtctttaagaggtgactgtgtcatgacggttctgccctcatgaatggaacctattcatggattaatgagttaacgaattttaacggattatcctgggagtgcgactggtggctttataagaggaagagacctgagctagcacactcagccccctaaccatgtgatactctaggccaccttgggactctgcagagtccccaccagcaagaaggtcctcattagatgcaccccttgaccttggccttcccagcatgcagaactgaaagaaataaattccttttctttataaattacccagtcttaaccaggcccacccctggttaaggatgggcaacaggctcacccctgtaatcccagcactctgggaggctgaggagggcgaatcacctgaggtcaggagtttgagaccaccctaggtgacagagttacactccgtctcaaaaataataataataataataaatcaccggccgggcgcagtagctcacacctgtaatcccagcactttgggtggccgaggcaggaggatcacctgaggtcaggagtttaagaccagccttgccaaaatggtgaaaccccatctccactaaaaatacaaaaaattagctgggtgtggtggccggcacctataatcccagctactcgggaggctgaggcagcaaaatcgcttgaacccggggggcggaggctgcagtgagccaagattgtgccattgcactccagcctgggagacaagaacaagactccatctcaaaaaaaaaaaaaaagaagaagaagaagaagaagaaataaataacccagtctcagaaattcagttactgcaacagtaaacagactaagacacccttataatccactgtaaagcaggctgtgcagtttgatgatc

SEQ ID NO: 195378 - DNA, 1000 bp, Homo Sapiens
aatattcacccaagccctgataccccttataagcgaaaccataattacgaaataaagtgctttgaattaaaaagttgttttaggttagattgtgatagtttaaaaatggctacttcatgagtttgatttgcttataatagcaaaaaagcagaacttaacagaatgatggggtgatactgccctccaggtggtgaaaatcggttctgggtggggtacggaatctcactctaagtgtaaagcacagattacatataggacatcaacagatgcacagtttatctgtggtattaaaatctcatgaggagggatgggaataggaaaaaaatgtcaaaaaaggctccaggatatgggggtacatagtgaaaaaagagttgagaaacgtgaatttgcataaacaccccaaatatagcataacccaggcagaactccgctgtcactctctcccctcaccctgttctacctttctttccagcccttaccactacctaatatgacatacttttgtttctttgttgtctacctgtgtcccccatctagaatgtaggctccatgagggcaagggctttgcttgtggctgcacccccagcacttacagaagggcctggcacacggtaggcgaggcttgttttgtgaagggaggctgttgggtgagatgtcctcaaaggttccttctgctgcaaactctaagattctcagatgccctcgcagcattgtcagccacaaaacatcgttttagttccatcccaggaggccattccttgcataccaaaaccatctcatcagaaggtggccccacttatgatctccaccagctgtgttttaggaaggtcacgatatatttatcgaaacagctccatagtcagaaacttcagcatgacagtacctcatgctgcatcaggtgatcatgaaaagattacaggctttctaaaattatcagcaagatatggacctttatggcttgcattcagcttctaattgtcaagaaggaggtagtaaatca

SEQ ID NO: 195379 - DNA, 1000 bp, Homo Sapiens
tcagtggagtatctgtgggctgggaaagagcggtgggagctgatgtacagggcgctcagatgtgatgctggggtaaccaatacagagggcggaatggggaaagtgtgctcttgggatagccctctgggctggggactggtgcatggtcacctcagggcctacatggggattaaatgggggatgagtctcacatcaggctctggaaggtgcgttcctgataggtctggttggtgacataaggcaggtagacccggcggaagtctggggcgtggttcaggactacgtcacatacttggaaggagaagatattgttctcaaagttctcttccaggtctgaaaggaacctgtacaggatttaaacgagtctcatgagacttctggacctcagctaaacagctgactggcccctggtgtacactgagctggtgacttcttcactccattagccaataacttctattgactctctgctctgtgctccttgctatgcactagaattcgctccaaaactgtcctgagtttgagcctgatttaacacttttattctaatattccatttctcattcttcttttgaccctgttcaggttttctgatctttagatggtttttccacctcatctccaatgcagtgcatgaccacagtaatccaaaacctcaacccaggaagcattgctcatttacttatccattaatggatctatccacccacagaccctctcctcttcttgccattcttcttcctataaccatcgggaatcatggaagaaactgaggcccaatttcttcccataactgtgaaaatgaaagggtttctaagaggggaaaaaaataacggaacatttaaagcctaacaacagtgaggctgagtgagtggtatttaggagaaggggagtctcacgtggcgctgacgtctcgcacatcctgtaaacgagagaagagccattggtgctcctggttggaaagtgtggcccggagtgaagttgaaagttggaaatgatc

SEQ ID NO: 195380 - DNA, 1000 bp, Homo Sapiens
ggagtggagtggcacaatcacggctcactttatccttgacatcccagggctcaggtgatcctcccacttcagcctctcgagtagctgggactacaggtgcacgccaccatgcctggctaatttttttttttttttgtagagactgagtttcaccatgttgcccttgcccaggctggtctggaactcctgggctcacacagtctgcccacctcatcctcccaaagtgctgggattacaggagtgagccactgtgcccagccaaatgattcttttttttttttccccctgagacggagtcttgctttgtcgcccaggctagagtgctgtggcaccatctcagctcactgcaacttccacctcctggattcaagcaattctcctgcctcagcctcctgagtagctgggattacaggcacgtgccaccatatcaagctaattttcgtatttttagtagagacgagtttcactcgaactcctgaccttgtgatctgcttgccttggcctctgaaagtgttgggattacaggcatgagccaccatgcctggccaatgattcatttttaacaaaggtcctagaagtgtaaaagtgaaccaagaacagcattgggtcctatcaagatgggccaccaatacatcacatcctagacagctcttgaatttggaatcccatcatttctcttggcaccagggaggtcagttttgtgacagcagctcccatcatcaaccccagctacagacaaatcaccctgagacacctgagcctccctcaccttaataaggtgaggcatctattgcagggaggatcctctggtcctttaggtcctcttgtctcatgtagcaaatttattctaggattctgctacgggctgaattttgcctccccctccccaaattcatatgttgaaggcctgacttctagtatgatggtatttggcgatggggccattagggaaggtagttaggcttagatgatgaggttattagggtggggctctcacgat

SEQ ID NO: 195381 - DNA, 1000 bp, Homo Sapiens
gactttcttaaggagtgattccttcctttagaaaaggagtctcttatttttgcaattcctttaattatagggtgttgtaaatgtgatttaatttataaaatctgattaacaattgtatgcaaatccagctgttttatacaaaagtatttcatttgtattagagctgagaatacatcatccagcagaaagcaatattctaataggtagagaggcagaaaaaattgggtgtgaccagaataggaaacgaaagacaggttttgcggtatgatttataagttctgtatatttcagctaaggaactacccatgttgtagtcaaccgggaaataaagcttggagaaccatggatttctattaagtaaagggcaaaactttgaagagaatatacccaatctttttttaaagtttaaaatttcagaaatacatgcataacattataagagggaaaaaaataagtgtttacttactgaagaagtctttctttgcaaggttcttggcacataacactaaaaacaaagaaaaattactcaggttagcattaaagacgagatttccataatagctaatctatatttacacccgaacaaaaagactctaaaaattagctttgccgaagatttgactttcaaatctagtatcatatgaaacaaaaaatggacaaccatctaaaaagtgttttctcctcaaactgaagatcagctataacaaatacaaaatgctttaaactaaaaatcttaaacacattcagatgggttgatcaatatactttttttttttttaagagataaggtcttgctctcttgcccaggctggagtgcaggggcatgatcatagctcattgcagcctcgaactcctgggatcaagcaatcctcttgcctcagccctcccagtagctaggattataggcacacgccaccatgcctggctaaatgttcttatttttgtagagatagggccactgcacccagcctaccgatattctcttatactgcatatgatc

SEQ ID NO: 195382 - DNA, 1000 bp, Homo Sapiens
gctacaggtgcccgccaccacggccagctaacttttttttttggtattttttagtagagacagggtttcaccgtgttagccaggatggtctcgatctcctgacctcgtgattcgcccgcctcggcctcccaaagtgctgagattacaggcatgagccaccgcgcctggttggtttttacatttttaaatagttaaacaaaatcagaagattttgtgaaaattatgtgaaattatttttttcttttcttttttttgagacagagtctcgctctgtcacccaggctggagtgtagtggcgcgatctttgctcactgcaacctctgcctcctgggcttaagtgattcttctgcctcagcctcccgagtagctgggattacaggtgtgtgccgccacgcctggctaatttttgtatttttagtacagacagggtttcaccatgttgcccaagctagtcttgaactcctgacctcaagtgatccacctgcctcggcctcccagagtgctgggactataggcatgagcctctgtgcctggcccaaaatttaaatatcaataaataaaatttattagaacacaggctcttcatttatatattgtctatggctgctttttaaatttaaagttagctgggggcagtgtggctcatggctgtaatcccaacactttgggaggccgaggcaggaggatcacaaggtcaggagttcgagaccagcctggccaatatggtgaaaccccatctctaataaaaatacaaaaatgaggtgggcatggtggtgagcacctgtagtcccggctactcgggaggctgaggcagcagaatcacttgaacccgggaggtggaggttgcagtgagccaagatcgtgccaatgcattccaccctgggcaacagagcgagactgcctcaaaaaaaaaattacattaaattttgttttaaaaatagagatgaggaatctcactatattgtgcatgctgttcttaaacacctgagctcaagtgatc

SEQ ID NO: 195383 - DNA, 1000 bp, Homo Sapiens
gatttagtttcttctccacccatgacaacttttcacaggaaaatcacaagactgatggccaatgaggtgcagcataagactccacacacatgggggttttcctcgtgaaactgaaaattcacagtctttttcagatcataaaccctgatttggtaattttaaaaattgcggaattattatgcaatagagatttaaacttaaacatttttaatgacaagctagtgatatcctgaagtctgggttttgcagtcatttctacatggaaaacagagaacaataataaaccaaatgcagagccatgaatgcacatccaattgtccaatgccacactagaaagcaagcccccttcatccatccgtggctcattgtatttgtctgttcttaccctgctaaaaggacatccctgagactgggtagtttatgaaggaaggaggtttaattgactcacgggttagcatggctggagaggccttgggaaacttacccatcatggtagaaggggaagcaaacatgtcctccttcacatggcagcaggagggagaagaatgagagccgagtgaagggggaagccccttataacaccatcagatcttgtgagaacttactcactaccacaaaaacaacatgggggaaaccacccccatgattcaaccacctcccaccaagtccctcctgccacaggtggggattatgggaactacaattcaagatgagatttgggtggggacacagccaaactacatccctcatctttcaactttttattatatttttagacacaggatatcactctgtgactcaggctggagttcagtaacatgataacagctcactgcagcctttgactcctagactgaagcaatcctcctgcctcagtctcccaagtagctggtactacaagtatgtaccactatgcccagctaattttaaattttttttgtagagacagggtctcactatgttgcccagcttcatctcaaactcctggcctcaactgatc

SEQ ID NO: 195384 - DNA, 1000 bp, Homo Sapiens
aatccatatccatttgaaggtcagaagtaaaattggactgctcaagtttgtaatagcttttaaaagaagtgtgtgttagctctctggttcttttaaatttcaatttgctactatttattttaaaatattttaaaaaatcaactaccacatattccctaaaacaatagtgccagtttccagtttgctctgtaacaatctgtcacctcttagtttccacattttactacctcacttacactttagtaattgggcattgagcttttagatcattttaagagaagctctgtgtatgatgtgcacatatgcaattgttatttatgttctttgctatctcccaatgaacatggtaaggaagaatatcattctgttgacatttgacttttttccaagttagtattttatatctcctttgaaatctataatgcaacctcagaactttcctattctgtgcactgacctcttgagatgaaacttcacccactcatggatgttctttgcaaccctgcagagtcatgtaatcaccaatgatttcaacttgttcctcagatttcatgaaaacctcaatccccgtgggtgaaaagcaaatgattaattcacaaaggcatccagctggctgttaacctaaaatttgtgtctcttcatttgttttcagttcatttgctattccttacttccacaaagcacaaagcttcccgctgctgtgacaggtgcaacactaaattctggtttaagattttacaaacttgccacttaggcttctagaggaaatgaaacaagggtgaaaacacagataacaggaggatctcttacctgttgtttgttgttgggtgtgtatggcagcatggtagaaacatggaacataatttcataatctttgtatgttgtgtacagagaatgggttccagtggagtcagctacagttaaaaaaaatataatgatgagatgactataacaggaaaaataatttatttaagagaaatatctcaaaaaagaaaagaga

SEQ ID NO: 195385 - DNA, 1000 bp, Homo Sapiens
aaatcaatgaaagttaaaatgaaacgatatcactaatactgttgatcgaatgtctttagatggctgcctcagcatctaagaatttatgatactgttatctatgtaaaaaagaatgtacaataaatttaaaggccaaatttgtttcaaatattaagatcatctgtgttgccatatattgcaactttaaaagcacttcatgtatctaaaataccttctcatacaaattttcagttaatcttccagtgtgtctggcagagagcatgttattattttcatatgtcaaatggtgccattgtaacagaaagtgtaaatggcttgtccaagtttattcagtcaataaggaaatgccttcctttacatagctagtgagcttctctacctgcccttatgttcctagcttcttccatgctcatttatgtgtgttcaaattcttattatctttcatattcccagctcacatacttcacctttcatgaagatagctgtaatatcccccactaattgtgatggtttcttcctttgaccctgtaacacttcatctctcttcctaccataggtaaactgatttggaatcggaatgattggcttctgtttgtgaatatactatctgggtgatcctcacaactaaactaactatagtaactacttgaatgccagtttcctcattggtataatagagaagaaacacaaaattatgggaagtttaattttaataaaacaaaggactctgtgaactgaaaagccctatacaaacttacttttttttttttttgagacagagtcttgctttgctctgttgcccaggctggaatgcagtggcgtgatcttggctcactgcaagctccgcctccccggttcaggccattctcctgcttcagcctccctagtagctgggactacaagcgcccgccaccacgcccggctaattttttgtatttttagtagagacggggtttcactgtgttagccaggatggtctcaatctcctgacctcgtgatc

SEQ ID NO: 195386 - DNA, 1000 bp, Homo Sapiens
ttaggggatccagacctgtcttgagggttctagtagctacagttgagatctaaagctcagatacatcatttcctttcaatgacttggccatgtggatagaagagtgaagcatgggagctgatgtgttgatctcaggagattgattgctggctttctgtgtccttaagctcttcatggagagctcagctgccccacccaggagccatcccagtctagaaaagcaaaccctcttttgactgtcaatccacttggtgtttgcttttctctcccggttctcagattcttgcttctgtgcccaggatcctttatcatctggctcctttgacttggaaaatccccaaattctagcctttggggcttcttaaatgatcttagctcaacccacaaaactccttgctttattctctagcagtgaaggacagcatctccactcctacagtgcaactcccccttatgctcctcccagaagaggcagaaagagcctgccctccaggtctttttgagaagacacctgtgcactgagatgttgaatgctaggtccccaccctacaaggtagagggagagcactggccgctgcagaagccaagcctggagagatgggcttcctgacctctgcacagagcagagtcctggaccttcagacccagaggctttaagatcaggggccaatctggaatcatctctgcagtgaaataactgggtgtcagtgatggcagcggctccctgcctctgtcatcacacctgccagattgctttcagggcaaggggctccctttggcctcctagttcctcagcattcaccttcccgccctgcttgtgtctctctctctgttccacattagaactggttgcatttcagagattcagagacatctagcctcaaacagacctagggaatctgacctatgaacttctgcgtgactggcctggcccaggttctgctgattaccctcagtgaataataaactttagccaagtctgatacagttgctaaagatc

SEQ ID NO: 195387 - DNA, 1000 bp, Homo Sapiens
tagtccaatgggaatctatttttgtgaatggtgtttgtgtgagagggtctcgttttatttttttcctaaatagatggcctattttcccagcatcatctcctgaatagtccattcttcccctgctgacttacatatgctaaatttccatatgagcaggaatctggtcttagactgacttttctgttccattgctctttttgctcttctgatgcctttacatgcttactttccattcactcagcaatcacggtaatctggcttccacccacagttcccctcgaattattattctgaaatgtattactgaccttcatatcaccaaacccaaagaatattttgcagttctcgtcttcctggataccatgtatcattccttcccatatactacatgatttagctgttccttgattcttctatcaataaaaatcatgatcataatatcttcagtttatgaggcagttactctgtgccaggtgtttaagcatttcatattccacacatgtcaaatgtgcttcaccacaactctctaaggtaggtagtattattattatcatccatcattatcatccccattttacagatgagaaaactgaggcatagaaaatttaagtaccttgttcaagatccctgggctaaaaagacagcaagatgaaatttgaacccaggtctgagaccaaagcctaggttcctaagcactcccctctccagcttgtccttctcagtctctcccttaaatccccttttctccagcatccttttttatttttattttttgagatggagtctcactctgttgtctaggctggagtgccatggcgcgatctcagctcactgcaaccgccaccttccgggttcaagcaattcttgtgcctcagcctcccgagtagctgggattacaggcacataccaccatgcccagctaattttttgtatttttagtagagacgggggtttcaccatgttggccaggctggtcttgaactcctggcctcaagtgatc

SEQ ID NO: 195388 - DNA, 1000 bp, Homo Sapiens
actcggtggccttctgtaccagctgctcatgcctggcagcaagggcttttgtggcattcctatggatggtgagggacactcacgacctccgaggcgctctcttgccaccttgccagacagctgtgagtagtactcattttctttggtgtaaacctggaccacccctacgcatgggccctgcttctgttcgctagactccatattttctgtgccctgaaggaaacaatacgtcaaccctggaacctcagagcttgcaaaggggcaatttgaatgtcttattcctccgttttgtggcccctccatttccactggttgtgcagctaccaatgcatccgaccgccgttttcaagggaccatctcagcgggtctagttgcccaacccaccacggccatatgcagcagtactttagcaaagacgctgcgaaaacactgggttaaataaagctgaacaggtttctttattaaagaacctttcagggcctttgatattctatgaatctccaagaagggcttgatttagacttaatttcctaaacacttttaggaaccgaagttgggaaatggtgggcaaattgatcttcagtccccacatgctggaggcgggatgccttttccggagctcacctcccattgtgccagggaatacctacatggcttcttcctcttcagatttctcatcttggctcccatattccatcccaatggtgccttctaaatatagtctggagtagatgtgggtctagaattagagtccagttcttacatgtagaagaaactctctgggaaaggaacttccaggcatagtggtaaacttaagtcttaataatctgtgatagtcttaaatcttaataatcaccaatcacatttcaatttaaactggtcttagaatgagacttgatcagaacactaactcactctctatctgaaatctcttttttttttttttttttgagacagagtttcactcttgttgcccaggctggagtgcagtggtgtgatc

SEQ ID NO: 195389 - DNA, 1000 bp, Homo Sapiens
tacttacagttttagtcacaagtaacttttgaataaagcctaaaactgaattatccatcccagtacttattgttgagaattacaaaaactctgaatgtattgtcttttggaaggatctagccctaaccaggaagaagcgtatgccaagataagaattacactaatgtgagtgtgcagatttattcggaacctctttggtacttagtatgtgaaatttctatttgaaattaagatttttttaattttattttttttgagccagaatctcactctgtcacccaggctggagtgcaatggcacaatctcggctcattgcaacctctgtctcctggattcaagtgattctcctgcctcagcctcctgagtagctaggattataggtgcgtgccacaccacctggctaatttttgtaattttcgtagaggcggggtttcaccatgttggtcaggctggtcttgaactcctgacctcaggtgatccatccacctcggcctcccaaagttgtgagattacaggcatgagccactgtgcccagccaagaagtttttaattttctctttttttgtttttgttttgagacagggtctccctctgtcaaccaggctggagtgcaatggtgtgatcacagcttactgcagcctctacctccccaggctcaggtgatcttcccacctcagccttctcccaagtagctgggacaacaggtgtacaccatcatgcctggctaatttgtcaatttttttgtagagatgaggtttcaccatgttgcccaggctggtctcaaactgctgggctcaaatgatcctcccaccttagcctccccaaatactggaattacaggcatgagccattatgcccggcctaatattctctttaaacaaaatacagtacaacatagaaaagatgtacacgtaaaggttaaagaagattaagaagatatcccttaggaaagagtttttaaacttttgaaaatgctataagaattttgaaaataatatac

SEQ ID NO: 195390 - DNA, 1000 bp, Homo Sapiens
tctttccttctttctttcttttctccttccttccttccttccttccttccttccttccttccttcctttctcttttctcttctcctctcctctcctctcctctcctctcctctcctctcctctcctcttctcttcttttctttctttcatagcaaacgccaaggcaggcaaatcacttgaggtcagcagttcaggaccagcctggccaatacggtgaaaccccatctctactaaaaatacacacacaaggccgggcgcgatggctcacgtctgtaatcccagcactttgggaggccgactcgggcagatcatgaagtcaggaaatcaagaccatcctggctaacatggtgaaaccccgtctctactaaaaatacaaaaaattagccaggcgtatcggcgggcacctatatagtcccagctacttgggaggctgaggcaggagaatggtgtgaacccggaaggcagagcttgcagtgagcagagatcgcactactgcactccagcctgggcaacagagcgagactctgtctcaaaaaaaaaatgcactcacacacagaaattagccggatgtggtggcaggtgcctgtaatcccagtagctcgggaggctgaggtaggagaatcgcttgcacctgggaggtggaggttgcagtgacctgaaatcactgcactcactggagtgagtgcaatagcactctagcctgggtgtcacagcgagactccatcacaaaaaaatataaaataaaataaaataaaaagaaatagcaaatgaaaatgcttactacagtcattgctatatacaaactaaagattaaatctaaacactttatggtatgtggaatttcccatgccttaagctaagatcccttaaaatttgaattggtcagaattcaaatatcttggagtcttcaaatgttaataaatattgctgtattcagtttgtgtttttcattttagggatcagacttacaacttgagatatggttgctatgatttggatc

SEQ ID NO: 195391 - DNA, 1000 bp, Homo Sapiens
actgtccccaaactcttattaggacacctgtatacctggtgaaagcagcacagttgacctctacctacgccaactaagggccacatacatgttggtgtgtgatggctcctaaagagaataaatgcttttccaacaacaacaacaacaacaacaacaacaacaacaacaagccataaatcttctagaggttttttttttctaagcctgaaagtcaactgagaaaaatctagacttttcctgcaccttgtgagcagagcagtgactaaagacattgcttccccagaggggcctctcaagcctctgctccctttatgcaagattctggtacatgggagggaagtcttagttcgacagaagttgtatctggcaatgggtgtgctggaaggtccacctgagcaaggatccaaagaccagccgcttcttttttccctgcaggtatttctaacaagtacacacacatccaggactactggtgtttcctgctccaccctcatccctgccacccactcttccaccccatcacccaaggcagatgtgccatctcctttccaactacagaagacggaactcatgataaatcttcctgatgtcaccgacctagagcctgggaaaggaaaaagacgacaggggaaatggtcctgtattaacctcaatgtagccagccaattgttcttcatccagcgttcgtaatttttatttctagagagctaccctgggaaggcctaagcagatgagccacaccgtccaagctgtgagttcagccagtgtccagtctggaaggcagagaacaatgcgtgtgtgatcctgagctgggctgcctggggtgctggtgcaggttagccctgcagccggccagcctctgggcccctgccaggctgccgaccagccaggggaagtgaatgtgctcagcgtgagagtgccagctggctaggctttctccccaggggggaggctgtaagcacagattaccagtgactttgttcagttctgctgccgtgct

SEQ ID NO: 195392 - DNA, 1000 bp, Homo Sapiens
agacagagtagtcattaccaagcaaccacaggttctgcattcaccatctccaagccttgttacttaaagtaaataatgcaccagttgcagcaatcttagcctgtgcttttgtggcacatttagatgctgggaattcacagtatgtatgataactcattttcttctgcggggctcttcctctcctctttggtaaagagaacttgcttctggggaaggaggcagccctcctggggcgaaatgggaggggtgtttttcttctccagggcagctctgtctttagcttactgtgaaaccaagaactcttaaattcttaatctgtcactgaatcagcagtgtatttactgagagacaactatttactcagcatcgaggggaagtcacaggaaatataaagcacttgaaaccaggagaaagaaaactaatagaagcaaaataacgacagaatccatgctttcaaccaagagtacaaagtgtagcagttgttcaaattagggagagatcaaagaggaaggaaggagccagaggacttccaggaaagaaggaggcatggcatgtggctaagacgtcaggagcaggggaagatttctatcttctggacaccatgagatcagagctcagtgctcttcatggaaaccatcccctcccatgacttagtgggtataccagcagctgctccaaagagaaagagaaaggtccaaagagagacgacattgttagaaatctcttgcaaagatgttctcataatctcaagaaaactgcaactttattcctcctggttgtttatgcttgtggttatcacagatcatacccttgctttccttcagggagccgtgtttggggcatggagaatattgggtaggccaactagacaagtgaatttcaaggttacaacactccattgtggggaattcattcaaagacatgcttttaactttcatttaggaggaatttattagcctagaatatttcttttcttctttagacaaagggacagcttcat

SEQ ID NO: 195393 - DNA, 1000 bp, Homo Sapiens
aaagtttggcacccacagggatcagccttggctctcattttcagctgtttcgcttattcggtggcaagagatcagacagttttgtgatacagacagaaaaaggcctgtgtttcagtctacgtggaacagatcatacagggtgacaggtgagctgactatttgctttgtttaaactggtaggaccagccaccctgcccaaaggccacttataatctgggaactacaaattggccctgagggaactgcaggcaaaagttactcaacttttctacaatctgatatgggcttctggatttctatccccccaaactacctagattttcattaccttcaagtttaatgaggccagattcccaatccacattcccttcatttccctgaaatcactttttacacatccctggtaccagccagggcactttgattaaagaagaagccatctaaggtgagtggagacagggacatcgctgacaggatggcaagaagctcatgcacttcagagaagcctgcagagccaggctcatcaagtaagcaggacctcagcccaccctggctagggagccgccactgtctccacgatggatgctggctgcagcctctggccctattgccattgccagagctctgccatctccagaatggattccaaattcgccctgccttttatgtacaatttactcaacattcatagtctaatgtttaggggcatatagttggccaaacattagccattaccaattgtgctggttaattttatgtcttggcagggcacagtggctcatgcctgtaattccaacagtttggaaggccgaggtgtgcagattgcttgagcccagaagtttgagaccagcctgggcaacatggagaaactccatctgtacaaaaaatacaaaaattagctgggcgtggtggtgcgcacctgtggtcccagctactccggaggctggggtaggaggatttcttgagccccaggaggcggaggttgcagtgagcagagatc

SEQ ID NO: 195394 - DNA, 1000 bp, Homo Sapiens
gtcaacatgcaaaataaggacttaagttggacatggtggtgcacgcctatagtcccagctacttgggaggctgaggtgtgaggatcgcctgagcagggaggttgaagctgcagtgagctatgatcacgccactgcgctccagcctgggcgacagagtgagacagtctccaaaaaaaaaaaaaaaaagaaaaaagaaaaaggaggacttagaaaaagaacagcaaaacaaaccttatgaaggaaaaaggctaacaggatacaagaggctcaagcgtggccaagtgagtcaggtgtgagacctttaatgatgtcagcaccaggcaggtgcaaaccaaaccttttgcggggtgttggccaaggatgggactaacctagggcaagcagaatagctcatggaagccaagctatgtttccagcctgccactccatgagactcactttaacctctgactcctgggttcaagcgattctcctgcctcagcctcctgagtagcttggattacaggcacataccatcatgcctggctaattattttgtatttttattaaagacggggttttgccatgttggccaggctggtctcaaactcctggcctcaagtgatcctcccaccttggcctcccaaattgctgggattacaggcgtgagtcaccatgcctggccatccttaataatcttaaaggtctcttaaaaatattttaactatcttactgctcggattgaacgtatttctttttcttttagggacaaggtctcactctgtcacccaggctggagtgcagtggtgtgatcatagctcactgcagcctcgacctcccaggcttaagtgatcttctgcctcagcctcctgactagctgggactacaggcatgtgccaccacacctggataactttttattttttgtagagatgggggtttcactatgtggcccaggctggtcttgaaactcctggactcaagcaatcctcctgtctcagcctcccaaagtgtggggatc

SEQ ID NO: 195395 - DNA, 1000 bp, Homo Sapiens
aataaacatacgtgtgcatgtgtctttatagcagcatgatttataatcatttgggtatatacccagtaatgggatagctaggtcaaatggtatttctagttctagatccttgagggatcgccgcattgtcttccacaatggctgaactagtttacagtcccaccaacagtgtaaaaggcatcttattttcattccagaaaagagtaaaataagtcaccccttactccatgccaagcaacgttacacatgctttccatatatttacttagtactttaaatgttctcatgagatacatagcattgctgtcccctttgacagatgaggattggatgcagagaagaaggcttcttagcttgccaaagccatgtgcctgatgagtggcagggccagactcgaaggggggtgggtccattcccagggcaggtgctcttcattctcctacctggcttttgtcacaggacagcaatgtggaagaaaataccttgtaagtatagaagcctacatcctccaagttttgactgatgttacataactccaagaaactctactgagccttaagtcctttctcaacttgtgaatgattggtcatttcgacttatgaaaatacatattattcttccaaacttctgaattctctctccagccaagctaatattttattgtgaggccaagcactgccttcataactaaaggtctgtcaactcttctatcacaaactctccacgtgagctttggaacagcttttttaagaaagacctaagttacacagataggtacagtaacaagaaaataaacaaatgatcctgctaactaaaagactacttgttgtaacacaggcaatggccagctatcagcaacattccaatctattatcaaaatacgccgccctctaagaatcatccatcaaaatgaattctctggcctgctctaaattgaaattcactagtcagaataaggctcacaggatcttccaaattcatggtatttccttgtaatatt

SEQ ID NO: 195396 - DNA, 1000 bp, Homo Sapiens
atccctcttcctttggatctcagatcagaagtgacttctactgggatgctgccctgttaccccagtcttggtcgggtccctgttatgtgctcccactataccatatccttctccttcctagtcttcatcacagtttgaagatgaaaattcattggtggggttacatggctcccccatgtctgattcctcctctaaactgtaagctatagggggcaatgactttatttttttgcttaccattgtgtttctagcacctagcatctggcacataggcacacaataaatatccattaaataaatgactgaaataaacagagggctcttttgctctgattactctgaagagcaattattacatagcagtgacagcttagtgtattctcagaaaatattcttttgttttaaaaccacttatttttctggccaggcatggtggctcacgcctgttatctcagcactttgggaggccgaggtaggcggatcacaaggtcaggagatcgagaccatcctggataacatggtgaaaccctgtctctactaaaaatacaaaaaaatgagccgggcttggtggcgggcgcctgtagtcccagctactagggaggctgaggcaggagaatggcgtgaacccaggaggtggaggttgccatgagccaagatcgcaccgctgaacttcagcttgggcgacagagcgagattccatctcaaaaaaaaaaaatttttttttctgataataaacacaacagactgggcacagtggcgcatacctgtaatcctggtacattgggaggccaaggtgggaggatcacttgagtccaggagttcaagaccagcctgggcaacattgtgagacatcatctctatttaaaaacaaacaaacaaacaaacaaacaaacaaacaaacactccttaaatccccacacacttatgacagaataattgtaagacaaagaaaagtacagttaagaaaacaaaaaacaaaaattacttatatctgtaaccc

SEQ ID NO: 195397 - DNA, 1000 bp, Homo Sapiens
aataatcactgattacaaagggaaaaaaagtaactttcagtggaaaagcccgtcagacaccacctaatgaagtgatatcattagtaattagatgaactgatattggatgttacctgacagaacacaatgtgaaaaacagcatcgtttcctttttttttttttttttttttttttttttgtgagatggggagtctccctctgtcacccaggctggagtatagtggtgcgatctcgtctcactgcaaactgtgcctcccgggttcaagaaattctcctgcctcagcctcccgagtagctggaattacaggtgcccacatcatgcctggctaatttttttgatattttcagtagagacggggtttcacagtgtaggccaggctggttttgaactcctgacctcaagtaatctgcctgccttggcctcccaaagtgctaggattacaggtgtgagccaccatgcctggccacttgcatactatttctgtgaaagatgcataccccaaatctaatcatgaagaaacatcagatatattcaaatttagggacattttacacaataactaactgtaatattcataattgtcaagaaaagatggaggaactgtccagaatgaaggacactaaaagtgacatgtcaataaaagataatacatgattttgaactcagtcattttgccataaagaatgttattgggacaactggtgaaatttgaatgaggtttgaggattagattgttgtaatgtaccaatgccaatttccagattttgatggttgtatgcggttacatgcatacctcagagatcctgcaggtttcattccagaccaccacaataaagtgaatattgcaataaagggagtcacatgaatattttagtttcccggttcatacacaagttatgtttatactatattgtagtttgttaagtatgtgataacactatgtttaggaaaacaacgtacgtaccttaatttaaaaatacgttattgagctgggcatgt

SEQ ID NO: 195398 - DNA, 1000 bp, Homo Sapiens
atattacttctttttgacagataagaatactgaggatcacagattaagtaacatgctcgacgtcaaaatggctagtaagtgacagagctgggatttaaacccagcattgtctgattccaaagtagtttttgactacagtaaatcttcactatcatcaataggttcttggaaactgactttaagtaaaacaagatatatcaggtcttcgaataacactgttattataatgttgatgattaaaaattggtttatttgttgaatcacttaaagtcagttttcaagaacctctcaatgatgttaagtgaggactcactgtacatgcttaacttgattgagagcagaaaaataataatgatgatgacaagcacgagcagttacagagcatgtattatatgccaggcactgtttaaagtgtaactattaacatatttaatcctcataacaatcctatgagaatgagtactattattatttccatttcacaaatgaggaaactgagacacagagagactaatgtacttagtgttattcagctgccaattaggaaatcgggcctcaaatccagttccagagccatgctcttactaaagcactattaaaatatataatgaaagcaactgtttgggatactaagaatggtctcccaggtaaatatacattgacactattatatagctaatatttactgagtgcttactaaactcttctaatagacattgtaatgtgccacccaactccccctaaaataaagaataaaggatttatttccacagctaaaaagactgctaaaagacgacaccccttagttgttgtcagctcccaggaagctgaaaaaaacctgcctcagtgttggctgaggtctttgttggaatgcaccgcagctcaccttccacaggtattgacagcaccccctaataaatacactgaatgttaatctcaggtctgcttctctaggaaagcaacctgtgacaatacttaatctcatttaacttacatgatc

SEQ ID NO: 195399 - DNA, 1000 bp, Homo Sapiens
cttgagggaattatcttccgattgcttcttttttctatcagaaatagaaattatggtcatgagctgagaataaagaggatggaaattgttcaaggacagaggtaaaagtctaaaatagccatctaggactgtgaaagcccatgtggttcatgcactgtagtgttttcatgggcagcagtgaggcacctcttggtttaatgatcataaatttgaagtgagatcagttagtgaggctctgtttatcaccattcctgtgcaactgtgtggatgtgggcagaaagtaggtgggtatggtaacactggggaaaaatttcctgtgtgaaagttccagaattcagcatttcatcttaaagcaataatcaatttcagaaaggcttttcaagaggggatatggtgcatttagagatggatatgataagtagagtcttcttaaaatagggaccagggtgaatgttctgatcacgcagaaaaataattatgctgattacaggatctttttacagcagttattttacctctgatgcattctaagcagttactttgttcttctgcttttggattttcacagatattttttctttttatttggctttatctcaattcattactttttgcttatatttcacaaaaccagagggtgatttaatatggtgtaatgtatttcaatggtactatgattcagtgatagtattttgttcttatagctctatgttacattccattaagatggacttacctcaaaataatgtttgcacaaacagaagattgtgactttaggtcttattcactgccactcaataaaaaattccatattttgtttatagaaacagtacgtattcaaatacaaaataggcattcatttaaattacaagtcattttgaatacaacaattttagcttttcagggcctttttatattgtattatttaaaattcagaaataccacttcaaattagcacaagtgacagggcatttagctgggcaatattttcagtcagatc

SEQ ID NO: 195400 - DNA, 1000 bp, Homo Sapiens
attatccagactgtgccggggagaaatcaaaaacacctgtttgaagaaacggctgcacctgtgtgcttatttgtgccagagggtggcctagcccacctgcaggaagagatttggctgggttctgttgagggtgattgttaggacgttgtattttgttgccattattccaaatacctgtcttggagggaaagttgcccttctgagaactgtgactttaccaggagccctatcttggaataagagttacacctctggaccacgtttctcactagtactttgcttgactggaggaagtgggtgacttttggctgcttcggtgacccattgtagacgcctcgttacccttcttccttccgcttcaagtaatcatggcggcgggggtggcagcgtggctgccttttgcaagggcagcggctatcgggtggatgcctgtggcctcggggcctatgccggctcccccgaggcaggagaggaaaaggacccaagatgctctcattgtgctgaatgtgagtggcacccgcttccagacgtggcaggacaccctggaacgttacccagacactctactgggcagttctgagagggactttttctaccacccagaaactcagcagtatttctttgaccgtgacccagacatcttccgccacatcctgaatttctaccgcactgggaagctccactatcctcgccacgagtgcatctctgcttacgatgaagaactggccttctttggcctcatcccggaaatcatcggcgactgctgttatgaggagtacaaggatcgcaggcgagagaacgccgagcgcctgcaggacgacgcggataccgacaccgctggggagagcgccttgcccaccatgactgcaaggcagagggtctggagggccttcgagaacccccacaccagcacgatggccctggtgttctactatgtcacggggtttttcattgccgtctctgtcatcgcgaatgtggtggaaacagtgccgtgcggatc

SEQ ID NO: 195401 - DNA, 1000 bp, Homo Sapiens
tcacagggcgcctacagcagtgactcccattggtgctgcctgggaaccctaacacctgggatctttggaaaatcctgaggcctgtcttccaccaccagacattccacttcattgtctggagtgtggcccggacagtaagatttttaaggtgtccccgggtgattccaacatgcagcaaagtttgctagccattggcctagaaagtagaatgcactcaacaaatgtttgttctctccaggaccagctacaatttgtgggaccccttgtttacaaagttttcagaactttaagtggcgaaagcagcacattaatccagctctgggcattctgggcgcaggctgcacgggatggcttggctcaagcgtccatgacgccagtctgcgtttttctcccttcctcccctttctagcagagcaatgcctcacattaacttttttaaaaaatttaattttatattttttgaaacagagtctcactctatcacacaggcttaagtgcagtggtgcgatctcagctcactgcaacctctgcctcctgggtacaagcgattctcctgcctcagcttcctgagtagctgggactacaggtacgtgccaccacacccagctaaatttttttgtattttttgtagcgacggggttacaccatgttggccaggctggtttcaaactcttgacctcaagtgatccacctaccttggcctcccaaagtgctggaattacaggcatgagccaccgagcccggccaacttttaaaagaaaagaaatcacacaatggacaaagggaacaagaaatgaggcgatccaaagtagctcttgaggggtgtcatgctagctggggctacagcaatgtttcctcaagaagcctgggacttccgcaggagaacatgccttgggttgtgaggctctggggtggtgctgagaggccttctagaggccgggtgcagaactcctctcgcccccatgccagttcatacatctgcacgtggacatgtgtgaca

SEQ ID NO: 195402 - DNA, 1000 bp, Homo Sapiens
tcttagggataattctaaacagccacatatgtaaatatttctgtttgatagttatatattgagaatactttaatatatctaaattcttttgtttttgctaaggagagaaaggaaggtaaatatagtattgagctaccttatatgagttgccaaattatggtatgaaccaattatagtgaaagcattcccttcacatataaatgcttttctagcctgtaggcatcttttcattgctaaagttgggttaaattttcaccacagaaattcaattatgacttatacctgttatgaaaatatgtaaatacatcaaatatattttaatgttttaggtccagatatatttaaatgttttttatcccctaaaggagtgcagtttctttctgctccttctaggtctccaaagttacaggaccttgaagcatgtagagctcagcatggtacaaacctgtatttttcaatttgtgctccatgtgacccttcctggaactgagcagaagtgttatgctgccaacattgaataatggtggtcttttcacagtttgtaggggaaaaaagctgatggaattttaggtttttcattccaaaattttccttaaattctagaaagagccaccattaattttcaagcaagtattaggcaggtaaaatgtatgtatgaggaaaaaatggttattcaaggaaaaaaacttgtaaacaactgataatatctacttttataactgttctttagatatttgtagtcgtcatcattattttatattcaattaaaataaaccaaacattaatagcaatttaaacttagaattactaaatacataatttcatctaaaatgatagtttgtatgatagaatttaaaatatcagtatttactactgtcctgcaaagagcattttgacttcaagccttgcatgacattcactatatgaagagattacatttcgaaggagaagatgggaactctgctgcttattttctttctcatcttacgcatttcagatc

SEQ ID NO: 195403 - DNA, 1000 bp, Homo Sapiens
cgcctgtaatcccaacactttgggaggccaaggcaggcagatcgcttgaacccaggtgtgtgagaccagcctgggcaacatggtgaaacctggtctctactaaagatacaaaacattacccgagcatggtggtgtgcacctgtggtcccagctactggggaggctgaggtgggaggatcacctgagcccggaaattcgaggctacagtgagccatgactgcactgctgcactctggcctgggcaacgggagtaagaccctgtttcaaaataaaaaaattaaattaaataatttcccaatcccttttcacattggttatttcctacacattattcctaaatgatccacagttacctctagctcaaaatggtacaaatcagacttatctttgcctgttccccagccttccagccttgatccttcttgtttttaaatgatggcaataccatccagtcctccaagaaggaaatttttggtgaccactaatgtctctcatttctacatgcagaccctgttcccctccctatcccgtcattgcttttgcttgagtcttcactgttgcttggttcacgtggcaacctcttgatctgtcttctcagcctcatctcctgccactcccttcttttatgcctgagagcctttatgcctgagagctactgcaggtgacatttctcctacaatgccttcactcatcttgctcatccttcaagataaagccatcactaaagctcaatttcacagatgtttttatagtacaacaaggaattttacatttttccctaaatttctatccctgtcttatactattgtctcccctgctctgtgctctggtgattttggcctctttcagttccctgaataagccacctctttattcggttaattcctgctcattctttagaccctagttcgaaggccctcttttagaaaagtattccttgccgggcacggtggttcacgcctgtaatcccagcactttgggaggccaaggtgggcggatc

SEQ ID NO: 195404 - DNA, 1000 bp, Homo Sapiens
tggctccattgcagccatcccatcctcagggacctccttctggcttccccaaagagggacactcaggaagcctgggactacccccccacctccaccgtctgccagaaccagcaacttccccccaccaccactggcactcagggacccttggaagaggcccctccccactaagaacagtagttggcaaggaggagacctaagtctcccagctccaggaaaactgccactatgtccccaggtggtgatcgatgtccagagactgcgggtggcgcagcaggaggagggctggttccggctgcagcccgaccagtccaagagccggcagcatgacgagtaagtgcatggagctgggcagccggcctcaaggggtggggtgggggctgacatttgggaattggctacaggcaggcagggcaggggggctgctcaggggtgagaggtcaggagacacagctccagggtcccctcagcccctgcccacctagccagcatccttctcatcccggctgggctccacctcccctttatttattatttatttatttatttatttatttatttatttatttatttatttattttgagatggagtctcactctgtccccaggctggagtgcaatggcgtgatctcgactcactgcaggctctgcctcccaggttcacgccattctcctgcctcagcctcccaagtagctgggactacaggcacccgccactgcgcctggctaatgttttgcatttttagtagagacagggtttcaccatgttagccaggatggtctcgatctcctgacctggtgatccacctgcctcggcctccccaagtactgggattacaggcatgagccaccgcgcccggcccctcccctttatttttccccacagttctgcattcagctcagctctgtcttctgtcttttttttttttttttttttttttttgagatggagtcttgctctgtcacccaggctggagtgcagcggcacaatcttggctca

SEQ ID NO: 195405 - DNA, 1000 bp, Homo Sapiens
taccactgcacctggctaatatttgtatttttagtagagatggggttttgccatattagccaggctggtctcaaactcctgacctcaggtgatccacccaccttggcctcccaaagttctgggattaaaggcatgagccaccccacccagctgaatgaccttcaatttgagattggttgattttttcctcataattagatttgggttatgtaatttatttttattttttatttttgggatagagttttgctcctgtggcccaggctggaatgcaatggcgccagcttggctcactgcaacctccgcctcctaggttcaggcgattctcctgcctcagcctcccaagtagctgggaccagactcccaccaccatgcccagctaatttttgtatttttagtagatacagggtttcaccatgttggccaggctggtctcaaactcctgacctcaagtgatccacctgcctcagcctcccaaagtgttgggattacaggcgtgagccactgcacctggccctgggttacgtactttaggcaggaataccacagacatgatgttgtgtactttccagtgcattatatgaggaggcaaatactgttatttctcctgttactggtgatgataacttttataatttagttaaggaggtatctgccaggtttctacaaggtaaagtcactcttttattctctgtaattaatacatactgtggctagatacttttaaattatgttagtatcctactactctcaaacttacccattaattttaacatctattgatgattcttgtgtgaatccattattaagatgggtgccaaatggtgatttttataattttgtaatttcttttatatttattagctgacttctgtgataaagaaaagcttctacctctttattcacttacttattcatatcagtatggactcatgaattcttgttttatcattttgccaatgtctctatgattctttgagcattttcttactttctgatc

SEQ ID NO: 195406 - DNA, 1000 bp, Homo Sapiens
caacacatcatcaggactttagctagagtctgctttcttcacacctaagtcttccagtgctttgcattatggtagaatctagtgatcttcagctcctgccagagtcttcaacttctcttccatgttaattaacttactgctgttactaggaaataggccacaggaccaataatttatttgatgatagatttattggtgatagctttgatcataataaaaaaagcattagactttaagtaattttgtaattagttaacattcaaaataaatattttatgcctatattgtttagttttaagagaaggcctaataagggttgaatttttcttaagtgagatcagctcttcagtgtattaaaatgtctcccagactttgaatatcaagatttcagttaccttaaatctcagtagttaagtcaagtcttgggaagtaaaataaaatcaaattttgatgtgtattatgtttatacatgataaacatttaaggatagacttcaaattttatgctgcatttcttcatgaaatgttaaacatgagtgcttaataagttgtttcatcaatcattacatttcattacattcaaagatacctataaggaatactaaattattctttgtatataatctgtcaacatttaattcttcttttagaaggttactacatatgcatataagttggtttagattctctttcaatcatgttgtattaaatataacaaatattgcatattttatttacatttaattgacatttcctgaacgtttcacctaaattaaataaaatttgagagacaacaggaatgtctttctgaccaaaacctacaccatcagcagccctttatgaaaattttagttttaaaaacttcaattatgctaattttaatatataacactaataaagccttttttaaaaaataacctaaagtcctaaaaattatattatttaactgccagtaggaacacattaatgccattgccacaaaacagtcactttaactgatc

SEQ ID NO: 195407 - DNA, 1000 bp, Homo Sapiens
gttcaaaaggagagagcaacccaggagtggcaggtgagggaccctggttactgagggggcagaacgcaggtgctgaggctctgggtggagcagaggcattgtggcaggtcaaggagggacatgtggaagggacacatggaagggacgtgaatctaaggtttctgacatggctctgtaaaaaaggaataataggaagatttgaagatttgaaacaaagtagcaaaataaaaaaaataagtgggtaccaggctatgtgctaagtatgttattccacttaaccagccctcagtctaacagagcagatgctattattatcccctttaaacagtgaagaagcgaggcttagggggaactgtgtcatgccccagggccacatggccgggtaaggggtccagcagctttaagccagggaggtgggcccaacgtccataccctcagccatcttcatcctacttcatcacagggtcggggaagatacaagtgatgaaggcattgtggtacctgcaagatgctgtttgtgcatctcactggccctgagtggtgctgagcctgagggttggaggagactttctccactggcagctccaagggaaggggagctccaatccacttctctgtgcaaactgatcgactactgaactaataaaaatattggaaggaagccctgagtttggattctgcaaaccaggatgaactgtggtagagtcacaagaaagggctctgggaaaatggctttctttgaaatttgtttatgacaactagaaaaaaaaatgtgtgcggagtgggcggctcctggagaggatccagaggacagtacactgaatgatgacaagatcccagaaagttctgtatgttgtttgaaaatctagactgagtaggtgagaaaatatataaaatacatggagatctattgggttggtgtctttcttcccgccagtttactcatctgcaggcatctcagctcagcagcccctgcatcctgatgacagagggtaagaga

SEQ ID NO: 195408 - DNA, 1000 bp, Homo Sapiens
ccatttctggagaggcagtgattcaagggagacaagtgagcacatcctgcatccagatcttagccacaagcaagatgtttcagtgggcgccatggctgacaataaatcttttgcatgctctttcttttccaaagtacgtgcttcaagcaattctaatttgattcttaattaagatgcatgtgtaagtcaaattccattagagcctccttcttgctctctagcactcagaccaccaaagaaagcctggaagaccagccatggaaggaaagtatgcggtgttttagggagagctggcacctggcctctaatcttccctctgccattgaccagatgggtgcctttggatacatcacttaagcttacctgtataacagatgggtttaacattttgtgaatattgtatcttattcattactctatttttagggtatggaccctagtcacttattatccttgctattgctattattactactactacttcttttacaaatagcaatagagctggagaaaccggattttgaattaaggtcaggagaacccagcttggctatctttttaaaaaaatcagtatccccagcactttgggaggccgaggcaggtggatcacaaggtcaggagatcaagaccatcctggctaacacggtgaaactccgtctctactaaaaatacaaaaaaatagccaggcatggtggcaggtgcctgtggtcccagctgctcaggaggctgaggcaggagaatggcgtgaacccgggaggcagagcttgcagtgagccaagatcgcgccactgcattccagcctgggagacagagcgagactccatttcaaaaaaaaaaaaaaaaatcagtatccctaggactgcctaggtctgcctcaaaggactgcctaggactgctaggtctgcctaggtctgcctcaaagttttaaggattcatttgcatgaccctggcacacacggccttgccctgggaagagaggccacctgaaaaaatgtagatc

SEQ ID NO: 195409 - DNA, 1000 bp, Homo Sapiens
ttctgggagggatcagccttccttaaaggatcctgggaagtggaccccaccacatgcccatcctgctgcacccaactggctcactcctgcaggcctcctccaggaagccctccatgcagtgtccagggcctgccagtgacgatgacagggaacagcttgggagcaaggcttggtcctggggctaagcatcctcaagtggacccagggctagccccaagccctgcttttggccccaaagtggcctgtctctgcctcagtgctcagctccctgcctttggggttgtgagccccaaagttcactctgctggctgacttggcccagattccctacctggctaccccaccccaccaaggttatcccttattgtacttgttcctcacccgccctcactgcaggtcattcagcaggtgtttagtgagcacctactatgtgcaaggcacaggattttagccactggggacacagcaatgtgcaaaacaaactccggccctcgggggcaccggccagtccaagagagcctctgaacacacagaaatgtccacttctaccttgggaggtggggacaaggaggtgcagagagtggacgggaccaggactctgggcctaagggaccatgaggtagtgggaggccaggcagaggagtccgtgagccctgagaggagcatcatttctggttaagtgtcccggcaactggggaagatttttactttaattttttttgacatagggtctgttgcccaggctggaatgcagtggcgccatcatagctccctgcagcctctcactcctgggctcaagggatcctcccacctcagcctcctgagtagctaggaccctaggcatgtatcgccacatctaactaatttttttttttttttttgagtggagatggggtctcacaatgttgcccaggctggtctggagatgtggtctcactatgttgggcaggctggtcttgaactcctggcctcaagtgatcctccctcctcagcctcccaa

SEQ ID NO: 195410 - DNA, 1000 bp, Homo Sapiens
gtggagcatggaagccattcaggaaaaagaggtacttccatggtaggaggctctcttctgaatacaagttgctgagaatccacagaatgcttatccgtggggcaatttccgtactgttggcctgggccacgaaatttcaccaccagtgatcagtttcaggatgtctcaaagggttagtcttttgctttctcatacgtttgagattttggtggggatgattgtggcttgtggtttcttcagcatctattgtgaatttcatggtacattgagcacaacagtgccaggatgattttccactgaggttgtttattagtctgtttcgtgttgctataatgcaaaattgcaactcctataaaggactacctgagactgggtaaagaaaagaggtttatttgatcatggttctgcaggctgtgcaagaagcatggcaccagcatctgcttctggggaggcctcaggaagcttccaatcatggtggaaggtgaagggggagcaggtgtgtcatatggtgagacggggagcaagagagggaggaggaggtgtcagcctctgttttatttttacttttatttttatttcctttttttttttttttgagacagattctcactgtcttgcccaggctggagtgcactggcaccatctcaactcgctgcaacctccacctcccaggttcaagcgattctcctgtctcagcctcccgagtagctgggactacagatgtgtgcccccaaccccacctaatttttgtatttttagtagagacggggtttccccatgttggccaggctggtctgtaactcctgacctcaggtgatctgcctgcctcggcctcccaaagtgctgggattacaggtgtgagtcaccacgcccggctgtcagcctcttttaaacaaccagatcttgtgtgaactcataaagaactcactcatcaccaatgggatagcaccaagccactcatgaggcatctgccgccatgattgttggtgttgaccagatc

SEQ ID NO: 195411 - DNA, 1000 bp, Homo Sapiens
aaaaactagccgaccctttctgcacctgttctcctaggaaagagccacctgactccctaacctgcatgagctgatggcctggagacatggctcccctgagccagcaaacctgacttgtggaaaggtgcaactcctcttacctagtccaaaattgcataggagtttttgctgtctaatgacctcagctgccttctgaacacagaagtgcacacccagattggaataaagatgcgacaaatagaattctatctccgtgtgtctataccttgctcagaaacaaggcagaatagcaaaatggaaaagctatatgccatcaccagacagcaacaatccttcaagtaagattttaaaaaagaatacatggaatgtagccaaccatccccactaaaaataaaacactccacttccctcagccgattcaattatctctctaaaaaagggcttttttttaacacctcccagcaggcagcagattcagtgagttggtgaggataacagtgaataattaagcaaccagtgcccaaggtgtgaaggaaaacatggactggctcaactaggagcagcagtgtctaagctccatgaatataaatgtttagaaatgaatattattgcctagtgccatctggaatatttttcattatgtagagcatgttttggaaaactcttaatgatttccttttttgcatgcatgagacagggtctccctctgttgcccaggctggactgcagtggcgtgatcacagctcactgcagccttgacctcctgagctcaagccatcctcccacctcagcctcccaaagtgctgagattacaggtgtaagccaccgcatcccactaatgattttctaactgtgaagccatccctgtgacaaagactctgtccttgacatgatattgctctgagttgaaattctcacctggaaaatctgccaacgtaggccaagcgcggtggctcacacctgtaatcccagcactttgggaggccgagacgggcggatc

SEQ ID NO: 195412 - DNA, 1000 bp, Homo Sapiens
gtatgtgagtcacggcccatgttttctttaggatagatgctgagtaaacaactaaagagttacggtacatgcctgtgtatattttaaatttcaatagatacttccaaattacttcctattgaggatcccacagtggtatggacaagctctctaaacttttacctactgtatgcatgatgccttgctaattacagaatatataataataaaggccctaaaatatgattcagcatcactaaaagtaaagggaaaacagaaatgtttgttgtgatagaggtagtatgatgagtaactgctctctgtagtatcagtaatgaaatgcttgtacaataagccaggcgcggtgtcttacgcctggaatcccagcactttgggaagtccaggcgggcagatcacttgaggctaggagttcgagaccagcctggccaacatggtgaaactaccaaaaatacaaaaatttgctaagtgaagtgaaacacacctgtaatcctagctacttaagtggctgaggcaccccgaaatacctcgaaccacagaggcagaggttgcaacaagtcgagatcatgctactggactccagcctgggtgacagaacgagactctgcctcaaagaaaaataaatttgtaaaatatatatgtagtttctaagagacagggtctcactatcgcccaggctggttttgaactcctgggctcaagcaatcctcctgcctcggcctccaaaagtgctaagattacaggcatgagccgcccctaccactcccagcaaattttgtaaaatcaacttttttttaaaagcagatgagaaatatttgagctacacaaaacaaattcttagaggatcaatgctttaaaaattttaaattaataagtaaatttaacgcaatcccaataagattatcaggatattcttttagaaattcaaaagctggccgggtgcagcagctcatgcctgtaatcccagcactttgggaggccaaggcaggcagatcacgagatc

SEQ ID NO: 195413 - DNA, 1000 bp, Homo Sapiens
aagattataatgttttataatttgtttatttgaaaatatacattttaaatgtttgctagagagctctaatatcctcaagaatacctacaatgtaaacactgttctatgcatagactaaatccttagcaatagacagaaggaactgagtgctctttgagtgagggaatgggcttgaccagtgtttgaagatttaaaaatgaatatgaagacatgttgtgacactagggtatgattatatttttatatttaagtagaatctgattatcatcagaaaaactctaattttaaaatccatagctggcaatatccatgaattcagcccaggtcatcaaatgctgaaagcacatgggtcagattgactgtctccattttttcttgcttacttcaaagctatgaagaaatccaaagcccttgctgatactcttccatgatatattccttttaaatgcttgaaaagttttcccttcctacaggaatcccccaaacacagctgtccttacactgagcccctattcaaattttggttcctctttctaacattggtcgtcagtcaattttgctggtctataccaactgcagatctagagccaatgcttatagaacttttctgagaattcttttaatttcagataattttttaaaattaccacaaaattagtttagaagaattcgcagagaggtacattgggagggaaatagctttgaggccctttatggatttatgaccaaagctatccagtcaaattcctccaggtatttttgctatttcctatgggtatactgaaattacacacattttaaagcttccttaatcaacttaaacaaatacaaataataaaattcagtgtcaatgagatactgaatctaaaagataaaagtacatccatatttttataatgatttttcaattgttatggaaagaaatatgagactatgtaaacagaaaaaataaaatttcttttaattaaaaaacccacattaaaaaatatatcccaagaaa

SEQ ID NO: 195414 - DNA, 1000 bp, Homo Sapiens
agctcccctagtctcctgccgcccgctggcccggctcccctccctggtcaccacgactcctggaatccccgcgcgcgcttttcgtacctgcaccgccgcttccgggggcgtggcctctgaccggaagtgaggccaggcacttccggcggcgcgctgcaggcgcggggaacaccaatggcggggtgagctgggcgctgctgctgcgcgtgcagacagcgggagtggttgggggtccgcccggtcgccttcctcggtcctggcctcggggctgggtgccgagcgctgggcaccgtccccgcactcagcgagcgcgacaggggcgaggccaggattccgggtcgcagttccccgggaggagggcgccctcaggtctccaggggcagggccggcggggccgtggggaggccggggccggcggcggagtccaggtggggggcgcagcgccggggcccagatccaaggcgccgggggcgagcccggggcgggatttcgcttctgggccgggtagctccattgcccgcgcttcctgggctgtcgagtgggccctggcccccgggaccggcttgtgccattttcccgggagaccccttaagcgaggggaagacagcgactcacggtcagcagtcagtgcctcctggcttgtcagcacgctttggtgttgcagaagctagaagctttggccttggagccatgagggtggtaacttttatttatttatttaaatcagaaagatggacatagagaccgggcttggtggcccacacctgtcatcccagcactttggaagtctgaggcaggaggatcgtttgagcctaggagttcgagaccagcctaggcaatgtagtgagatgccatctctaaaaaaggtttttaagaattaaaaaaaaaaaaaaaattagcccaggcatggtggtgcacacctgtagtcccagctactcaggaggctgaggtgggaggttcacttgagacccagaggttatggcagcaatcagctgtgatt

SEQ ID NO: 195415 - DNA, 1000 bp, Homo Sapiens
ctgttattattaagtccattttacagatgagaaaactgaggcaccgaaaggttttgtagcctgcaagttcacccatccagtaattgagctgggatataagcccagggagcttgtctccagagtcagtgctcatttcaatcctctccagcccagcccatatgggattctgtcagatgaatctttctcagatctgtctgcgttagatccttttttttttttttttttctttttgtgagacagggtcttgctctctctcccaggctggagtgcagtggcacaatcacagctcattgtagcctcaacctcccgggcccaagcaatccttccacctcagcctcccaagtagctgggaccacaggcatgcgccacctatgcctgactaatattttaaatgttttgtagagatgaggtctcctggtctccttatgttgcctaggctggtctcaaactcctgggctcaagccatcctcccgctttgacctcccaaagtggtgggattacaggcatgagccactgtactcagcctgttgttgtgtccttcttgatggtccccagagaaaaaaggctgagccccttggcttggcatgtttcccttaccaactgtgcgatccttgttgcacagaggccctttatataagaagttacaaaaacaaatgcctgcagaaacttggaagtaacatgaaaaagagaatgtagggaaacccagataacatacactcaccctgtaaagaataagccttcaggctgggcctggtggcccacgtctgtaatcccaccactttgggaagccaaggtgggtggatcacttgaggtcaggagttcaagaccagcctggtcaacataatgaaaccccgtctctactaaaacacacacaaaaaaattagctgggcatcatggcaggtgcctgtagtcccagctactcaggaggctgaggcgggaggatcgcttgaacctaggaggtggaggttgcagtgagttgagattgtgccactgcactcca

SEQ ID NO: 195416 - DNA, 1000 bp, Homo Sapiens
gatgtcaggagttcgagacaagcctggccagcatgatgaaaccccatctctactaaaaatgcaaaaattagccaggcgtgatggcgtgcacctgtaatcccagctacttaggaggctgaggcaggagaattgcttgaacctggaaggcggaggttgcagtgagctgagattgtgccactgcacctgcactccagcctgggggacagtgcgagactccatctcaaaaaaaaaaaaaaaaagaaagaaaaagaaaaaacaatacagagagaagagagtaaaagagaagaagctatgttcgcaaaagtagaagagccaaggggaaaaagcaacaagtaactgcttggaaaaagaggcagaaaacagaaaaatgggagtaatgcagtaacatcacaagcacaagaaagcttaatatgtagattgaacattgtgaacttaaaaaataggagctcacaaaattatagggctttaaaagcagaagccacagtgtaaaaaacctaagtatgagactttttctctctctctttttttttcctgagacagggtctcgctctgtttcccaggctggagtgcagtgggacaatcccagctcactgcagcctcgaactcctgggctcaccttttgcgacagcctggaactacagccatgtgctatcaatcctggctaattttttattttttgtagagatgggttctcactgtgttgcccaggctggtcttaaatttctggactcaggcaattctcccacctcagcctcccaaagtgctaggattataggcatgcaccaccatacccagccaaatatgagacttaacagtgaaacaatgaatacttttttcttaagatcaggaataatgcaagatgtccattttcactactcctacttagcactccacagcaagttctagctagttcgatgggccagaaaaaggagtttaaaaatgtataaagatggaaaaggaacaaataaaactgtcattattaacagaagcaatcatgatc

SEQ ID NO: 195417 - DNA, 1000 bp, Homo Sapiens
ccagcagatccaggacccagggatgaaagtctgttgcttatggtggatggacgaagactcgtcattgtcctctgatataaggctcagggaccccaaaaacatgatggaggcagtttgaaaagcactgagcttcagcagcaggatggcaaatgtgcctggggtgctggctcaacccttctccccatcacagctctttcctgtaccacttgctggagtctgttcagaggtggggcatgggctagagaggaggggaggagttctgtgttgcaaggacttgcaggtaggaggttgctggactggttccgggagccctcttggtgtgtaccggccctgaggcagcagccagggtgtgcagggcctcatgcactgttgctgggctgggcccttatccccgcggggcatggtgtaaagcaggatacagcctggcctgcaccggctttggaaggtttctctggggagaacggactggggttggggacactgggagttgaaagacctgtgaggggtcatgccacattttggaaagtagttgggggcttcatgtaggcctggcctggttggagaaatgctgatgcccttcctacatcccagggaaaatgaggaaacccagtgctaagagctggctggaactgagctggctgtttgagtaagaagagatgtacgaccttgtgaaggtccttctagggacgtggccccaggccttcccagaggtcagaggccccaggttctcgaccatatggatggacagcctgagtcccggctctgccctgctggtcagcctcagccgaccatttcctgaggctccatcaccaccagatccgtcgtaacctggacagagcccaggctccaatgctgcccctgccactgaccacttagcactctgggtggggccagtcccctcccctcccagacctcggcttccccacctgcaggaacaggagcttggcctagaggtcttctagctctcacaggtgcctttccactttaagaacctgagatc

SEQ ID NO: 195418 - DNA, 1000 bp, Homo Sapiens
tgaacatagtactcaatagttagtttttcaacccttgccccctcccaccctacctcctctagtaatctccagtgtcagttgttgccatccatatgtccgtgagtacccagtgcttagcacccacttgtaagtcacaacatggggtattttgttttctgtttctgcattaatttgctcaggattatggtgttcagctgcatccatgttgctgtaaaggatatgactttattcttttttatggttgcatagtattccatggtgaatatgtaccacatttcctttatccaatccaccattagtggacaccaagattgattcctgtctttgccattgtgaatagtgctgtgaggcatatataagtgaatgtgtctttttcatagaacaatttatattcttttggatacatacccagtaatccagttgcttggttgaatggtagctctgttttcagttctttgagaaatctccaaaatgctttacacagtggctaaactaattacattcccaccaacagtgtataagtgttccctttttccgcagcctcaccagtatgttgttatttgactttttaataattgccattctaacttcatgttttattgctttgtctttgtttccccaagtgctgatctaaagttctggttctacaataagcatttatttggtctggaggactcccatacactccatatctctgagatgatgcacagtctaatataggccattatgatagtcttgtggtttgggagcctaggcggggcattgccataggaatatgtgtttcataacactcaattggtttgtttttttggtctttccaagggtgctatgttgttcacaccagctacctctgtgttagctccagagctaaaaatgtgtcctggtgctttccttattccttgagaactttttttttttcctttttgagttgtgtcttccttttaccagtgcttctgtagactagaatccacacttgggtccgtgactctgtgaatagatc

SEQ ID NO: 195419 - DNA, 1000 bp, Homo Sapiens
caaatgaagtttaggttttgcctgaccccttcccaagtagaaaatgtttctcaggcaacaggggcttttcccacaaaaaaggtcagttttgggattaaagagaggtacaaatgaatggttttaggagtagatacatcttaggtaagaaatagagaaaaggattcatacaagaactgtaaggctctgaattcccaggagagtatgtagagcactcagtcctgacagtaagcaccctctttgaataaatagagtcctgctagatggcaggattccaagctgatgctttgagaagaaagacctctggaaaaacctcacaatattaataaatacttgtcattagataatttcagctgcaaaaaatgcttcaaatgtctcttccaatataattcacctttgttctagatatcaaagatctcagaaaagcagttaagactatgatgtataagtcagcacttaaaagatcttaccttttaattaaaggttataaaaattattcacactcaaaatatcaactcagaaaaaaaaatctcacaatttgggccagttttgttatcctttagatagcactgaagtatttgcttattgcaatagtatagagtgtttctatacaatcacatatttttgcagatatagaggcagcacacacacagttgttgattattaattttcaaaaagaatataattaatagcttggaatcacagaatgaagaatgtaattaatagcctggaatgacagtattgttgagtgctaagaaagctatggtcttcagactggcgaaagtggcaaaaccgcatctctacaaaaaatataaaaattagtcgggcgtggtggcacacaactgtggtcccagctacacaggaagctgaggcaggataatcgcttgaacctgggaagcagaggttgcagtgagtcactgcactccagcctaggcgacgaagcaagactgtgtctcaaaacaaaacaaaatgacaaaacaaacaaacaaaaacacctatgatc

SEQ ID NO: 195420 - DNA, 1000 bp, Homo Sapiens
aggctgctttgaggactgctaagtagaggacatttttacctaacattgattaatgtagatagctgagacttacttgtattttgaaaaatgggaagaaaatggtcatggtaagaagcactgggtgataagaaaaacacatagtaacaagatttctacatgtgagccaatagcaaacttcctctatgtgttaaaattctccaatgagaaatacagcaactcgtttcagacaccatgagatggacaggttaggccaagttgtgcttgacctagtggtgaatgaccacacacttctttacctttggcacaagtggttcatcaatctcccactttccctcagatcctttttcagcgtagtattctaggcaccaactgccaactggccagtgttcacctgtttgtcattttcagcttaactaccaatttggacaattggagaggtattcgaaccggatggtaaagctgaaattagatctcaagtctcttcactgaagtctagtactcttatatttcatagacaatgaactggaccagatgaattcttctgttagtatgatgtatatcatatgaacttccaataattttaaagctaactttttattataaaaatgatacaggctcatggtaaagtcactgtgggaaacagtatggtgtttcttcaaaaaattaaaaataaaattaccaggcagatgtggtggctcacacctgtaatcccagcacttggagaggccatggtgggaggattgcttgagcctaggagttcaagaccagcctgggcaacacagcgaggtcccaactctacaaaaacaaattccaaaaattagttgggcatggtggagcatacctgtagtctcggctgaagcagaaggatcacttgagcccaggagttcaaggcttcaacaagccatgcttgtgccaatgcactccagcctgcgtgatagagtgagaccctgtctcaaaaaaaaagaaaaaaaaagaaagaaaaaggaattaccatatgatc

SEQ ID NO: 195421 - DNA, 1000 bp, Homo Sapiens
ggagtggttggcactgggtaccatggcaaaggcgtagaggagattgatcttacccccttccgaggtcagctttccccatattaggttacatagaaagctgagcacacccctaactttgtactacactttgtggaagagaaaaaaaaaattgttagaaaaaatatcaaccgggtgcagtggctcacgcctgtaatcccagcactttgaggggctgagacaggtggattgcttgaggttaggagtttgagaccagcgtggccaacatggtgaaaccccatctctacaaaaaatatattagatggacgtgctggtgggtgcctgtaatcccagctaccagggaggctcaggcaggagaattgcttcaacccaggaggcgtagcttgcagtgagctgagatcccgcccttgcaccccaggctgtacaacagagtgagactccatctcaaaaataaataaataaatctcactactggatctccattcattccttcaatgatcaagtgtctttcagggacctcgcacactgctggtgttctaccaggcgcttggggtcgagggctgaacacaaaattgttcctgttctgaaggtagttaggagtgttgctgccagatgaacacaggaagacagctgtaccgtaagattacactataggcggtggtagacatgtagttacatacagaatgggcacgaggaagacagcagccagatccaacgtactgtcaagtgaagcttcctaggagatcacaggggagtagaatcacgaaagataaacagaatgatctgatgtctgaaggatattcctagcaagaggcctggcatgggcaaaggaggcacagaaaagtctcgtagaaactacaaagagaatgaaaatgccgggtgtaaggcgtgtgtgggagagggagagagcgtaccagccacgggtagaagtgattttttttttccctgtaggaaatgcagactcccacctcacggtatttacggaggggaactacagatgatc

SEQ ID NO: 195422 - DNA, 1000 bp, Homo Sapiens
acatgtccttgtcaggcacccatcctccttgcagccaccagcctcccagaggctgtgggtgactgtgtcaacctcacagccaaacagtctttaatttaattttgccatcaggcaggggaattcattcagtgacttttttttttctgggatggagccttgctctgtcacccaggctggagtgcagtggtgcaatctcgacccactgcaacctctgccttctgggttcaagcaattttcctgcctcagcctcccaagtagctgggattacaggcgcctgccaccatgcctggctactttttaaaaaaatatttttagtagaaatggggttttgccatgtcagccaggctagtcttgaattcctgacctcaagagacccacctgccttggcctcccaaactgctgggattacaggcgtgagccactgcacctggcctcccatgactagttttaaaagctcatagtacagtctagcaaatgttctgggagatggcaacaaagattaacttttattttggcactgaataaaaataaacttgaggtattctacgtagtctgcctaagaaaatttctcatgtcttttttttgagatgtttgctcttgttgcccaggctggagtgcagtggtgcaatctcggctcactgcaacctctgcctccaggttcaaacgattctcctgcctcaggctccccagtacctgggattacaggcacctgccaccacgcctggctaatttttgtatttttagtagagacaaggtttcaccatgttggccaagctggtcttgaactctcaacttcaggtgatccaactgccttagcctcccaaagtgctgggattacaggcgtgagccattgtgcccggcctctcatgtccttttaaataatatggaatcttgggatttgagggaatgcagaatgtcaagatctttcttgtacctcaatttcctcactagtaaaaataagtaatggtaataagtatacagctttacctatcttgctgtg

SEQ ID NO: 195423 - DNA, 1000 bp, Homo Sapiens
gcagtgagccgagattgtgccactgcactccagcctgggcgacagagtgagacttggtctcaaaaaaaaaaaaaaaaaaagacaacaggcataaataggagtgtcacaggcaaattgggagacatggacaccctatctctgagccacggagtggcttggcccacctgtgttcaggagctaagtttggctcagctgggcccaggtagaagcggaactgcagacagtgaaagaggtctcatggctgaggcagacagcatttttccatgaaaactagtgccaaattttgaactatgggcaggccagaataatgaaatctcaaaggtcacccccagctgcctcaggaatgtcttcattttgggcaagtcctctaccttctcaatgggccccacagttagagccccctacctccagcatgtccagatgttgagggacctcaggaagtcaccgacctagttacaatcctcaacctgtctggcctttgtctaaaaatcattttcagatgctctatctcttttgggccacacaatggctttccgggaggagagtgcttggaatgatgggacatcaggacacccgtcacagaaacacatgacacagcagagtgaataaaaggacttctgtgtgagtaagcatccccttccccacactgggcagtattttacatgattaaatgtaatcatgcttaccatttattttcttactgcaccaaattagagggtgaaattatcctcataactaaaggattccccagattacaaaaggatctctttaagaagcagcttctcctgtgtatatttatagatctttaaatgctcagcagagggagaaagtaaaagctgaaggattccaagtcgctgcttattaaatattgttaaaaattaagatgaagcgaatcttggctgggcacgatggctcatgcctgtattcccagcaatttgggaggccaaggcgggtggatcacctgaggccaggagttcgagaccagcctgcccaacataga

SEQ ID NO: 195424 - DNA, 1000 bp, Homo Sapiens
atataatgtttccttgtcgtattactttcaattcagctttcaaagttatctacaaagagttttcactttgactctgacttcacacagcaacaggataacttagtggctttcctctatattttaccattacaatgagtgaaaatagctgatagttagaaattgtttgatactgccaggaagaaaacatgtccagtgtccaatttccatactcatacttccattctcaagaatgtggcagtgaaggaatattctccttttagaattaagctggtctatattcaagccacggtgtgcatgatgtcagggatgtaccttacctgacaattgtgatccccttgttgggggtatttacaccttggaaccagcaaatactaaagatcaggactctcctatcaccccaaagagccatttgttaaacatttaccagcacagcacttgttcaagcacattgaatttatgttactttgctcaagatatttaacctcaagatatttagcctcattttctatctctataaaatagtggcaagctagtactctacctacatcactcatttttcaatttggatcacttttttttttgagacagagtctcgttctgttgcctaggctggagtgcaacagcgatctctgctcactgcaacctctgcctcctgggttcaggcgattctccctgcctcagcctcctgagtagctgggattacaggcacctgccaccgtgcccagctaatgttcatatttttagtagagacgaggttttgccatgttagccaggctggttttgagctcctgaactcaggtgatccatccacctgagcctcccaaagtgctgggattacaggggtgagccaccacgcccggccaataactcttaacatagtatggtacttagcatttggtgaatggccataataataatgagactgataaaaattatcatttcaaacacaaatagattgttaagtgttaatttataggactgctttcctcactgttagcta

SEQ ID NO: 195425 - DNA, 1000 bp, Homo Sapiens
gcaagttaaagataaaatttgctttctgaaattatgagaaattttcttttgatagctttaaaaaaaaatcatcagggatcatataacagttcagttacactcccataatgttggtactcttgtttatatacaaagatttgacttacagacaccatttaaacaaatatcactaaatttcaaaacaatttcttcagctaatgtaagtcaagattttcctttttaataaaaggtaatagagatctacaacagctaatccaaataaaatatgcatgtgttatgtgattaatcttcaaacagttaacacccaataaagattagcaaattcttgtattatacctatgttgacaattcaattatcactctaggagtttcacctactatcttcatcaaacggttcttagcatatcaaaaggatcaggataatcatttgaattttctaacaatacctactgaaaatagcagacttaggtgaataaacagacttcaatgttcgaaagaaaagcctacagatacaatcaattactttggatctatggtacaatgaacatgcactggtaaatcagacagatctggtttccaattctggtgctgcttttcactaacaacaaaattttggtaataaagctaacaattttgcatctaggattttcttaaccttacattttctacttggcattctacatatctagcataatacaaactcagtaaagttttgcttccgtttgaacctgacaaacatgaacccgtagaataggctatgtcagaactataatcaccaatgacctcttcaacacgtacatatgagcgaaataaatgaaaaaaaatcttagtagaccttaagttttcactgtattttaccctgcaggaaagctctggtctataaaaccatagggtaaccaaaagcatatgcaattcagggaatacaacagctcagttcagtaaaataagttcaattttattttatttttaccacaaatagaataagaaagcagagaagatc

SEQ ID NO: 195426 - DNA, 1000 bp, Homo Sapiens
attgatatctgtaattttccacacatttgtactcgtggcaatgaaatgctcactctaacatcttatggtcctttggcctatgaaatatgccactatttctcttttctaataaccatttcatacattgggactgataatgagagctgtatgatacttacgtaaaaggtcaataaatcgttcacaacagagaaaattcacctggtagatggtccagattttctatttttctcatctaaaagtttcctcaactcgttttgctagctattacgtatgtattaagtgttacatctgtgtttatataacacattttcatactcaattttgtccttgaatagtttttacccttggctgtaaacctgtctgaaccttagggatctcatatttaaattgcctgatggttttaggccaatgtgattgaccagaattgtaatttatttatttagtctcatttttccacaccataggctcttcaaattaagtcagtattacaaaaaaagagagaagatggctatttaaagtgaacattgactaggaataaatattctcaactcagtcaaggtggtcacacaagacactttctaaacatgcctgggacgtctgctttgaacagcatctaaatgacacaagaggatttagcaaaggctactgctgttcagctgagaatattgtatgattagagagaaagcaggggaattgaaacgtttgtttctctctcaggtttgcaggttaggctggtcagaaatgctgtttgtgtctcagatttctgagctacaaggtggtgatcattctctcatgggcctgatctatctttatctgacttaaggcattctcgggggcctgtctgctctagttctcattctgcctgaaaacatcattttatgaggactttcttaatgaaacagcacatatttgcaggcaaaggcattcttaccaggaagagtgataactaacgggctctactggctccctctactatcactaactcagcagcaaccccctg

SEQ ID NO: 195427 - DNA, 1000 bp, Homo Sapiens
attacacggaattttctggataaccaaaaacttacaaaggaaaaatattcttttaaatggaaaactgcagcacatattagaagggtgactttctctaatatacaacgtactcctatatattaacaagaaaaaggtcaacaagtcaacagaaaaaaatgagcaaagaatatggaagttcacagaacagaaaaataagtaactcaaacatataagattgactattttttataagaaagacaaaccacattcgtttccctcttttcacctgttggataaaaaaaatttaaactaataaccagctttagtgagaatagcaaaaacaattactgctcacactaccagagagaatatgaattggtacagcttctatggagagtatatatcagaattataaatgcacacactctgactcagaaattctacttctggaaatgtattcacaaacatacccacctatgtgcaaaatcattttttaaaacaacagcatggtctctcatttcaggaacctggcatcttcagggacagttacctgctttttaaaggaggtgaattatagtttaatgtactacaggtcctatactatggatgggaactattacagtttataatgtcaaaaacttttcttagaccaaagatatcttccacaaaggtaacagactggattgacccatcattcaatgattttctagagtatagagacatctctactattactgccacatcattaggtgtgaataactcaagtcatagagaaaaaaatgagccttctacattagaaagtaagatatttccagctagaaaaataggaaatctgtcttccttagaacagatatatggtttagaaaattcaaaagactatctgtctgaaaatgaaccatgggtagataaatataaaccagaaagttagcatgaacttggctgtgcatgaaaagataattgaagaagttgaaacctggtaaaaagctcaagtcttagaaaggcaaccaaaacaggatggatc

SEQ ID NO: 195428 - DNA, 1000 bp, Homo Sapiens
tctcaagtcatgcagcatattttaaacagaagccctatcatttctgcctttaaatgtaaaacaggtctcctgaaaagcatacgatttctgaaatgtgctgtcatgtccaccaaacaaagcactttaactttgtttttcttaaaggcaaatttctacagaaacatgaatccgacagagcaataaacaccacctgaatcattttcaaatgtctcacccaagtttactggacacatgtaaaaggtggtgtctatcataaagacctaaaagatggtatgatatcagagcctttcgtaaagtcctgaaagaggtacttacattttgccgtcactttgtaccctcctagaggaggggtgtggccttccaatgcatcaaatccagcagatactaagaccatgtctggatcaaactctttggccacaggcttcacgatggtcctgcacagtaaaaatgcaaccggtcacacgtgggactggtgaatacctttaaaaatcgttcagtgaaaacgacctggcacaacaataggaacctcccaagaataaagaaaaggggaataaaaacattatttgaatgggacaaaagcgtatcatttccttaataataaatcgctgttattttagcatcccaattcagtcttttttggttcatcttttttcctccaaatggaaaaaaaaaaaaaactgctttgcaggtacattctaaagcccatcatattacacatacgtctgtggctgttttatcccactgcctataaaaaactgcttcttccaagggagtgactaatgttttacagaggaaagtcaaagctttagtgaaaacccggcttgctccagttagtgagaacttggtgtaaatttgaactataaatttcttttgggaaaagtttgctttcccaacttaaaaaaaaaaaaaacatttttaaatatttatcatggtagggggtgactcttgcaaaggagaaacacaaagttcccttaatagaatccagactacaatgttaagt

SEQ ID NO: 195429 - DNA, 1000 bp, Homo Sapiens
actttgggaggccgaagcgggcagatcatttgatgtcaggagtttgagaccagcctggccaacatggagaaaccctgtctctactaaaaatataaacattagctgggcatggtggcacacacctgtaatcccagctactaaagaggctgaggcaggagaatcacttgcaccaggaggtggaggttgcggtgagctgagatcacaccactgcactctagtctgggagacagaatgagattccatctcaaaaaataaaaataggctgggcgcggtcactcacgcctataataccagcactttgggaggccgaggcgggtggatcacctgaggtcaggagttccagattaccctgaccaacatagtaaaaccctgtctctactaaaaatacaaaattagcggggcgtggtggtacatgccagtaatctcagctactaaggaggctgaggcaggagaattacttgaatccaggagccggaggttgcagtgagctgagattgtgcattgccctccagcctgggcaacaagagcgaaactgtctcaaaaaaataaaataaaataaataaataaatataataaaaataaaaataaaaataaaaactcagactagactgggcacagtggctcacacctgtaattccagcactttgggaggccaaggcgggcagatcacctgaggtcaggagttcgagaccagcctggccaacacggcaaaaccccatctctactaaaaatacaaaaattagccgggtatggtagcgggcacctgtaatcccagctactcaggaggctgaggcaggagaatcacttgaacccgggaggcagaggttgtagtgagccgaaatcgtgccattacactccagcctgggcaacaagagtgaaactccgtcaaaaaaaaaaaagactagaatggactaaggcaaattttttaaaaaacttgaacattggtttttggcatgaccaggtacatgttgctgttaatacatcttgtactaaagctaga

SEQ ID NO: 195430 - DNA, 1000 bp, Homo Sapiens
gatctttaagaaaatgtaaaaagtgatagctctattagttttttttcctctacccttgtacttcatttcagcaaattgggtgatatacagagtgctcagctctggtaggtgtaggcagacaggtgacagcaccgtagtgaagggggaggcatgcagcatttgggtcaggtgggacaaacacaacagtggattgaccaagaatctaaagatctggtcttgaattttggctctgccacctgctgaatgtgtggctttgggtaaagtcccttattctctctgcaattgaatatccccacttgtaaggggcagtccattcccccagtggacaggtttgtgagaggcaacaagatgtgatacgggaataaaggaccgtggtaggtaggtgtcagatgttagctcctgcctttctgtcagttacaggctgtcttccctgggagcagcacatatatactgtgccttgtgataagttcttttctagcgaaggaaggagtgattaattatctatttaatttttcagcccgcctctgagaaagcaaaaaatggccgtgatacatgtgagtattttttgagattttttttcttgcttttaaaaagagagtcagctggctgggtgcagtggctcacgcctataatcccagcactttgggaggccaaggttggtggatcacctgaggtcaggagttcaagaccagccttgccaacatggtgaaaccctgtctctacaaaaatacaaaaaaaattagctgggtgtgatggtgggtgcctgtaatcccagctactcgggaggctgaggcaggagaatcacttgaacccgggaggcagaggttgcagtgagccgagatcatgccattgcactccaggctgggtgacagagcaagactctgtctcaaaaaaaaagagcatcagctaacccatgacaacaaaactatgtgaagtgccataaaaagtttatggaaaagtcaggagacctgagttccctttgtgtcatgtatgcaggatc

SEQ ID NO: 195431 - DNA, 1000 bp, Homo Sapiens
ttctctactttcttccttctctgtaacaaaaataggtctccaattctaatgaattagttttaggaattaaatgagttatcattagcaaagtctcaaaaatatttataacttggactgccatcaaagtcagttaaatcaattacacaagaagagttgttacatgactttatatagacacaacatcctgttgacttaattggcattaccactcagcttgatcatctcatttgtctgccttgattcagactttttaaatgtttctgaaaatcaaagctactttggaaagaaggtagattttccagtaccgaggctattcatctgaagcaggggtcgtattatgaactttcaatagctgtaagcatgtcagtggaactaatgttgtgcccttacagaaatctatgtttatctgaacaatgaatctactgggaaagaactcatcctaagttaagagtccaaggagcaaaacatgactcaaaaacaacaaaatagagagcgagggtcattttgaaatgtacatggaactagtccccagtggactcaagcttgtgtcctaaagtaaaagctatagtaaaagagttgctttactattatagatgtgagacattgagaccacaaggcatcagcagcccaaatatcagcaacaagagacagtaccctcaaagcagataaggaactatatattcaaatatctccagggactaggcaactaacaaaaatgagtaagtggtttgagagaggactggagtgaactggagaccacaggccttactatcagggggcagccttattcagctccagcagattgtgctagaagaaagtgaaaactactgcaagggcaggcatatgcctttaatgcctttagtcacagctactcaggaagctgaaacaagaagattgtttgagcccaggagtttgaggcaagcctggggcactccatcacttaacaacaacaacaacagcaaaaaaccctagtgccgccagaactttgcaaaagaagctt

SEQ ID NO: 195432 - DNA, 1000 bp, Homo Sapiens
tgatgcatgctaaggcttgagaactctaaagtttagatgaaggagaggattgggaagtttgaggaaggcccctataacattgctataagtatctagcataaatcttcctttcagtcttccccaaaagacatgcagccattcactagggtaactgtgtactgaggaagggggcatatccaggcttttggtagatttctggacattggttctgagtctatgctaatctctagagacccaaaatgcctctgacccattggaggggggtatcacttattggtaatcaggtagtaaatgaaatttggacctgtggctgcttcattggattccagtgggtctcttcacctgcgatgtggttatcttcccattcctgaatggagctgtcatctcagaaacaaaaagagcccatctccatatggattttctgtcttgtgtggtgagtattagtatggtaggcagggccaagtgaaagcttcttgggatttccccttcctatgtaagagtaaactgaaagcaataccttatccctggggaaatgacagcgattagtacttctatctaacatttgaacagtacaagagttgttctactgtgtcctcatttagctcctctgtctggcatgtacagaaggaagatggttattggagaatgactgtgaattcttacaacattaacaagttactagaccagatgtagtctcttttattggataacacagcagagctcttggcacttggtatgcagctacgaatctggtggatgctttttccccccgataccaaattagcaaatatcaccagaagaagcttgctctcaagcagctggaggaatggcaaaacacctccctatcttacctcaggcctgcgttacctctcctgctctctgacgagaactagtctgcaggagcctggaccatcttggtatcctgcagaacatcctgctgatgtgtaattgacatgatgagcagcaaggagcaaatatcgtacatgccttaataagacaa

SEQ ID NO: 195433 - DNA, 1000 bp, Homo Sapiens
atgagaaattgaagttcaatgaactttttagcactagactgtgctatataatatagtagccactagccacatatggctatttaaatttaacttctaattaattaaaattaaacaaaattagaaaccggtacttctagccaagatatagtaacagaaaccagagttatcttcttcctagagtaacagaaaaacagacaaaataacaatttgcaagacactgtcggttaggcaataaaacacatgatccctgagaaagggaaagcaactgaattggctcctgcaattgcctagcttataaccttaagagggtttataggttacagtatatggagaggtcagccagactgagcctggcagactgcattgaggcgatggagttgagcatccagggtcaccaagttggcttaagttcccaggaagagtaaaagagagaagagagctgcacagaaagggaattctaaagatctgcagagggtttcttcagagtgtttggctggagtactgatcaacacacgcgtatgtggaaactacccaagcctgggcaaataactagctgacagcattacaaggaatagcatccagtgctcacacagggccaggaagagtgcctgttcccaccagccaggcttgaaaacctcaagcatctgagaacattgcatagaggacaaggaagtgccttagttcaacaccaggaaaaaaatcctttactgagcattttgctagttccacctaacaaacattaaaaactagaactgaaataatcaaactgcttccaagtaacttaactgtgttcatgaaaaaaagctcaggagtatttatcaaaatacagaatcatacagcacccagtaaggtaaaattgacaatgtctagcacccaataaaaaacaatcaaacatggaaagaataaaaacatacaacccataaagagaagataaatcattcaaaagaaataaaaacagatgtccataccaacatttgtacataaatgttcatagaagctt

SEQ ID NO: 195434 - DNA, 1000 bp, Homo Sapiens
gtatggtgagaccactgttctgcgggagagaagtgccacatacgatcttgttcctatcccctaagggacccagtgcaatgcttggcagagggtagacatccagtaatatttgttgaatgaatgaatgaacttactaagttaacattaccacccctcaactgtcttggtatccataatctttgagaagtgagtgaacctttttttagagaaggggtctcactctgtcacccaggctggagtgcagtggtgtgattacagctcactgcagcctcaaactcccaggctcaaatgatcctcctgcctcagcctccagagtagctgggactacgggcatgcaccatgcccggctaattttttgtgttttttatagagatggggtctcattatgttggggtccaggctggtcttaaactcttggcttcagatgatcttcccacctcagcctcccaaagtgctgggattacagctgtgagccaccgtgcctggcctaaacattttgacctcagtttccccatctgtaaattggggagagtgtttcaattcagttcagcgaacatgcaatgctgtaatgatggaggctgggcatggggtcagccctgagggggtgcccagttggtgtggagagccagacttggagactaataagggaggaggttcagagtgaactccagaaagactgggcttctgtaggaggtgtgaacccatagggagggaggggactcagggtggagagggcagtgttcaggaaacagggagctaattgttccttgtggctgggatgcataacctgtatatcaacagttataaaccagccaggcacagtggctcacacctgtaatcccagcactttaggaggtggtggcgggcagataacctgaggtcaggagtgcgagaccagcctggccaacgtgatgaaaccccatctctacagaagatgcaaaaaatagctgggtgtggtggtacatgcctgtaatcccagctactcgggagggtgaagctt

SEQ ID NO: 195435 - DNA, 1000 bp, Homo Sapiens
gacagagtgagactccatctaaaaaacaaaagaactactgctccaggtgctcaaacaagaaaggcagacctgtgatgataagaggggtggatcacagtacagaggtacccccaaaatcaaaccagtgtgctgttacttcttttctccagtctttcccaaaccattccctttttgcctgaatttctggatctttccagggttcttcctaaatgtcctaagaaaggcgttttccttctggtgttttcaaggcctcacctttctaccctaccccactgcccagccaggattctcagtgccaagaagtctccctctgcagctcagattagagctacagagcctgcaagttgcctgaggctatgtgaaaaacactcctcctcttctggagcgtcactcactgatggtgagtagtggcaaggagaagtggtgactggctaggccagagaagtgaggcaataagatgaggaactggctgtgctgggacacaagctaagacttaacacttttggctggagaccaaggggtctcatcatgtcagttatagtcacttatcagctttcctttcaggcctttatctaaaaacactatccaagcttcccccagacacccactgcatattgttcacctgctcagcaggtgaagcaagtaggcaccttacacagcatcccagccacaggcacccccaggaactcaatcaaaactcctgccaccccagaaagccctgctcccagccatatcacaggaacaaggagactagaaacattcttccagagtggctggagagcaaggtatttcatgaactaatggagtcctctatgaagcatatacagtgcaaagggggagggtagatgcttttataagctgtttcatttgcccttaccacaacacgtaagacagcaattagtatgtctcctttacagctagacaacggcccaacggggatacatacccaggatctagaaggcaataaaagtaaaagcatttgtatacaggcatcaagctt

SEQ ID NO: 195436 - DNA, 1000 bp, Homo Sapiens
aaactttgaattccttcacttcctttttcaaacaacccacccgaaaccctctagcagcccgcatacctttctcgtttccctagtcttcaaacacatttctcactcgctattccagtgagaaacttacatagaaagcagcttttggggatgggggtcggtggccaagggagggaaagtaacgggatgcgtcgtgtaaatatttcacgttggaatcactactttttataacaggacgtagttgcgaataaataaacatcctgtgcctcgtaatactttttttttttttttttaacagggtctcgctgtgttgcctaggctggagtacattggcacaatcatagctcactgcagtctggacctcccggactcaagggaccctccagcctcagcctcctgagtagctgggaccgcaggcacgtaccgttacacctagctaagtgtgtgtaagttgtgtgtgtgtctgtgtgtgtgtgtgtggagaccgagtcttgctgtgttgcccaggttggtctcaaactcctggactcaagccatcctcctgcctcagcctcccaaagtgctagaattacaggaatgagccaccatgcccagcctctattaatacttccagactacagacttaaggacttagacacgtctttttcatccaaactcaaagggaagaagtgtagtttttttcttttccgtttttactctaacaaccgtaacatgaaggaataatttaaaatacaattttaaaagtaaaatgaaatttacccatcaagattgataccattacaataaatgagtacatctgaaataagcttctaatggttttcggtatttaattgccaccctacaatatgtaggcagaaatggtcacacttgacaattttcaacaaatatcagttttataaagaaccagtaaataaaagtggatgccaatttcccacctgcctctcaccaaaaaaaaaaaaaaaaaaaaaaagcacaaacacctctctccctgtgtgtgtgtgta

SEQ ID NO: 195437 - DNA, 1000 bp, Homo Sapiens
ttgtgtgtgtgctcttaagtgatgttatatactttattttgttttttaaaaatatttttaaaaattttatttttaaatgttcttttaaaaactttctgtatctatttatatctattggttatttgaggattttttggcagcatatataaatatgcagaccctttgagtctgtagcctaccaagagagatagctctcgtcttcatggtgattctgagcatggaaaggcccttgcacttggcagcatgacaaggactaagccactcgctccattaattgactgccatccactgggctaagtgagatccttgcgttctatccctagtgagagaagagagaggaagaagaagaaaaatagaaagataataagaaaatagaaaaagaaatgaataaatgtacattgtggggagcaggaaaggactaccagtaatgggaggcatcagctaggagcacagatccgaagcatgactcactgtgtgtcctaggacactggatgaatctatctggttctcagcttcctcacctataaaatggagataacaacagtgtctcgatcatagggttttcatgagagttcaatgaggcaaggcatacatgtaactgaacacagctccgactgctcaccagttgcaaagtccagtgaacaagaacgacgtctggtagaaagaaagtggctttattccagagctagttgaggggaagtagtacaggctgccttgaggaagccactaaagcctttggggcagaaggcaggagctttgaaagtggggcttggcgtgaatggcatgcaggggagagggcgatgaagtgcagagtctatgtgacttgcttcggatgtcttatctatcaggtggtctggctggcaccgtcacgggcagagctaggttgtaagttgaggcaatctcaatttgcctcctggtaggagagagttctggaggttcctggtttgctttaaggttcggtctctgtaacttctaagtaaacatgtagttagataagctt

SEQ ID NO: 195438 - DNA, 1000 bp, Homo Sapiens
tatgcggtgtttggttttttgttcttgcaatagtttactgagaatgatggtttccaatttcatccatgtccctacaaaggacatgaactcatcattttttatggctgcatagtataccatggtgtatatgtgccacattttcttaatccagtctatcattgttggacatttgggttggttccaagtctttgctattgtgaataatgccgctgtaaacatacgtgtgcatgtgtctttatagcagcatgatttatagtcctttgggtatatacccagtaatgggatggctgggtcaaatggtatttctagttctagatccctgaggaatcatttttttaaaaaatccatgagcctcactgcccaagacagccagggtacctggctctgatagcagacggcctctgctgaaagcctgagtcctgagcctgagttgggggaaggagaagcagtcagagctcattcccccagggagactctcacgcctgcttcctatgcctctacagcacctgcttctcgagattttctgacaattttaagacaattctatgtcatcccagcaattcctgttggtgcaagggttggaatcagtttctgttgcatgtaacccaatagccctggctgatgcaggaggaaaacctcaacagcccagccaccgagcagctgtacaggctgggtgtgcacttaacttcttgggcttcagtgcctcaccaggcaagttacaccaaatctcttcccatgcctaggattagaacatttatgattctaaatgtttctgctataagacgtaaattatctaaggctcagacatggtgagctgaactgcaggtgaacagcaatcctgctccggcttgtccctaagtcaagcagggtcatttgaaacttttgtctttaacaaccccctgaatacaaggatatgggagtgccatctcagttcgccggtcacactggcgcagaaatgcctaattgtggcatattataacatacagcaaactcaaagctt

SEQ ID NO: 195439 - DNA, 1000 bp, Homo Sapiens
atagtaagtcttgaaatcaggtaatgtctatcctataacttttttttcattaatatcatgttgccaattgtgggttttggcctttccataataaattttagaataaatttgtctatatctacaaaaataacttgagattttgattagggttgcattgaatctatagatcaagttggcaagaactgattttttttcttttttttgagacagtttcactctgtagcccagactggagcacagtggcacaatcttggctcacggtaacctctgcttcccaggttcaagtgattttcattcctcagcctcccaagtagctgggattacagatacgtgttgcaacgcctggctaatttttgtattttagtagagatggggtttcaccatgttggccaagctggtcttgaactcctgacctcaagtgatccacatgcctcggcctcccaaagtattgggattacaggtgtgagccaccgcacccagccaagaactgatattttgacaatattcaaatttcctatctgtgaatatgttccatatctttttaaaatttagttctttagtttctttcaccagagtttttagttttccttatatagatcaggtacatattttgttagatttatacctaagtacttcggttttgggagtgctaatggaaatgatatgttttttacttcaaattccagtagttctttgcttgtatatagaaaattaattgacttttctatattaaccttgcatcctgaaaccttactataattgttgattagtcccaagagctttttatccattcttttggattttcacataaacaaacatgtcatctgagaacaaagagttttattttttccttcccaatctgtatacccttttattgtcttttctttttttattcctttttcttgttttattgcattagctatgacttccagtacaattttgaaaaggagtggtaagaaagtgcatgcttgctttgttcttgatattagaaggaaagctt

SEQ ID NO: 195440 - DNA, 1000 bp, Homo Sapiens
tatgaccatttctaggtagaattatgttcaacatgaccaatagcaaacgttgcttcataaaagaatacttgctgtgaagatcaggctggatgcttaaaaactgagccctataggccgttcattttctttcaaataatgttgtgtttgccatattgcaatccaaatgttttcgtatcatggttgatgcttggtgtcacatttataaaacacttaatttgtttatgccattcctttttcttgtaaatacctaaccagacctccaaacaccagtaccctgtattggaaggcaggtgcacacagaagtttgatggggaggcacatgtgagtgccacgttgttctttagggagagtgcagcctgcagggcgaggcagcttgaaatcgtgtcctgtgctgagtgtgtctattaggagaagtcttgactacagtggtgaatgtagagagggatattccttgagagggcagaactagggctaataattagatgttagagggaaaggattcaagctcaaggcatagacaagctttcttacatggggagcagtaaaaaaaaacaagggggagagtattgaccttcctggcaaggaatcgaacatagcagtaatagtagagttaaaagaagagagtggatgagcacttagcaggaattttatatttaagtgtagagtagggaattgacttaagtggcttttaaggtcagtgactgagttagaagcaaaattcaaatttctcatttcctaatccgggatttttacctgattccttgaggtggtggctgaacaatgccctctaaatatgtcatgtcttaatccctggaacttgtgaatgctatcatatatgacaaaaggaactttgcagatgcgattaattcaaggatgttaacttaattatccaggagggcctcgtgtaatcaccatcattttataagagggacacaggagtagtcagaatcagaggagaatatgatgtgataatggaagcagagagcagggtgataagctt

SEQ ID NO: 195441 - DNA, 1000 bp, Homo Sapiens
aacaatacccagcacttctccccccgtgcctcatcctctgcccctctgtgcctctctctcatgcactcgtgcacaggatgcacactcacagacacacatatgcacactcacattcacacacactcatacgcacacacaaatgcacatccacacacacacaaaagcacatccacacacacatgcacatccacacacatctagacacacgtgcacattcacacacgtattcacacacgtacacttgcacattcacacatacacacatgcacattcacacacaaattcacattcacacacatgcacatttacacactatagacacattcacacacaattcacacacacgcacattcacacacgtgcacattcacacattcacacacatattgacacacttgtacattcacacacgtgcacattcactcacacattcacacacgcacattcacacgcaggtgcacattcacacacactcatacacacattcacacacatatgcacattcacacattcatacagacacatgcacactcagacacacatacacaccccattcacacatactcatacaccgacatatacattcacacactcatatacaccattcacacgcacactcagacacacacacacatgcacttcacatgcccacacacatgcattcacacacacgtgcatgcacacacagacacacatatgcaaacacagacactcaaactcgcactcatacatggacacattcacacactcatacacagccatccccttggacaccccagtggctctggtggcagccagctgatctgtgtctctgcggcacggacagagagtggccagagcccagtctctcttgggaggccccagggacccacctgctccttggtggaggccaaggtcacaggctgcaggaggggcaggaggaccagcagtgaaagcccaccccagaggctggtagggctgggcagtgagacacaatgtgacagggagagccactgggtgt

SEQ ID NO: 195442 - DNA, 1000 bp, Homo Sapiens
aatacagagtacttgagaattcccgctacctattcaatacttggcttctgtcatcaacacttggatttatgacacaactcatgactatagtacctccttagcagctgtatttctctattgactcacactgattagtgaagaaaccttagaatttacaatggtttgtggctctccaaagctcaatcttactcaaccaaatcttattccttggtatttaatttctctcagggagagagtaaattaaattaaaatgttctctttaggggaggtgacaatgaaagttatacagttactgtcttccacagaatacaggttatcttaatctgacagtataattttaattctacgaaggcttaaatgtttatgtatctttattatgaattgatctaaaccatcaataaaaaataaacatgttaaacgaagcagcaccttggttttaaacaccttggccacccttaagactgacatagtggtaatagctttgtatgattattcacagactgaaagattcctcctcataaacaacaatatcattcttagtataaaaatgtgatataatgagagatcggctaaggtctgcctgatttgaaaattcacacacttaaccacttgaatagtatctctcattcatatttctattcccacattcactaatatgttctaggctccatctaattggcatataattactgggattcactttttcctatttgaaaatttggttattttatcaatctctactttttctcgggaattactgcctacttccttaatcacattctgcaagttccttcagcaaactggcatggtatagatttgggcctgggaattaacttcacttaattgatatcagcttaccactgccagcacaattatagttagaacttagtatagaaagagtttgggaaccatccagattaggtaattaaatcccttgggagactgagcatttactggagaaataaacccctccttactaatcctgactcccagggaattc

SEQ ID NO: 195443 - DNA, 1000 bp, Homo Sapiens
aggaggcaggtgaagcaagtgtttgttgatggtccagcctgctgggggcttggaatgacccagactcacagggaatggaatgttgatacaggatttgaatgagcgaaaacatgagttgagttggttgactgaacttgaccaacttctgtcccaagaaccactgactaagagacacttcagtggtggttttagcgagaagggatgtttgctggcagacagtataaagagagcgcctatgccttggtggaaccatctgtatcagtttctgccgatttgctcctctgagattcagcccaatgtggcctaatgccctattctgccaaagatgggtctccctgcaacgtggcctccaggaagtgatctgtctcaccagaccccaccagggatgggaggctagtgtccaggacatcgccagctatcattctgacacagctatgcagaccaggaacagtctcagcctgctgcttggaagctcattccttgtctagcttttttctttcctatagaacaaaagcagtttctggacaactcatctaggtttttgttttgagccagcacatttttcaataaaagctgactgaaacctggtcatgtatttctctgtatctgagtctagaaagtcttccctcttaaaattctgttatttcctagggcttagttaaaaaatacattctatattgtttcacctttgaatttataaaaaatttccaggttaattttgatgtaaatatttatttcctcatgggtttcaaagaatttatacgacatgcgtaaaacatgttcgggctcctaggaattcattttacacactagaagtgactcagtgataggtgtaaagcctgatagctatgtgacttcattaacattcagcacctgccaccgtgtttttgttctttgaatgactgtgccacctgactcagagatgagacagttgcctaaaaacttctgggaacaaggtaatgatagaaatagagaagagtttcatcttctaggtgaattc

SEQ ID NO: 195444 - DNA, 1000 bp, Homo Sapiens
aagtctagctgggcgcggtggctcaagcccataatcccagcactttgggaggctgaggcgggtggatcacaaggtcaggagattgagaccatcctcgctaatccggtgaaacctcgtctctactaaaaatacaaaaaaattagtcgggcatggtggcgggcgcctgtagtcccagctactcgggaggctgaggcaggagaatggcgtgaacccgggaggcggaacttgcagtgagccaagatcgcgccactgcactccagcctggtgacagagcgagactccgtctcaaaaaaaaaaaaaaaaaagcctaaaaaggctgggggtatgataatggaaaaaagcttttgaaaaactgaattagaagtccaacctcttggtcacatgcatttcccctaactaaaatatgctatttcaaaatatcctgtagcatttttggtatatggaggtttttttttttaaataagaatggaataaacatctatatatagaatgaaataacatctataactcacagagtaaggctaagaaacttacaaccagctctaaaaactcatttagtttctaaggagacagccttagaaactgacagttagaaaaaacatttatccaatcataattaaaagtacaatttaacatctatattaagaattacatacttgaggccataggctggcactggcacctgaattctaaaattaccacttaagattcagaatggaatctttttatatggaatggaatctgcaatctttttataaagcattccctttctttacactattactgtcacaagtgatatccacttactataatgttctactaagtaaacactacagtgtcattatgaagaaacaaactacgatcaaagataataatgtagttctggaagatgacacactttttcactatacacagtataaaatggcacactttgtatggaagaaacatgcaatgaattggttgtagaaatattaatgtagttttagctacaccagaattc

SEQ ID NO: 195445 - DNA, 1000 bp, Homo Sapiens
ctacccctatcctatcccttcactgcatctccaaggccattttctccacaaagcttttctttaacacatggggctggtaggtaagccatgaacatttgtggaacaaggtaatcctccaaacaagggtgatttttctttcactgaacccttccctccctttgtgcttctttttggagcctcacactcttctgaatttgttgaatccccaaccagctggaaattccctaaggcccgaaactgtttctggcctaggctgtgctgatcttcctgggactaaggggtttcctgggtcacagatcttctgtgctaaaaccaggaaagcctctggtgacccagcatgtgttgatctccctagtcttgcctgtctttgattccatggattattaacagaaactataatgttgggttaatgtgttggcttgggcatggcctccgaaacatgttttttacatgtctgccaccagcaggctctagatccaggaatgaggcttttccactaagggaaaactccacgtgatctaggaagaaagtgaggatatccaaccagatgataaatttcctatctgaaagagaaggtcaaccctgaaataaggaggctgaagacccttagagaagccacagaagagactggaagaagaggggtagagttgcttttttaatggggcttccagctcctacttttcttcctgtctgtaagtctctgagcttctgttccagctctgtaaggttggggacgagaatgctctccccactggactgttgagagttcaatgaggggaaatgtgtgcatataccaggccccatgctgggtgcccagagacgctgcgccttcctggcatgcttctcttccccatcgctcagcaccgcgtccctcactccctccactcccgattctcacttcctactcactggcttcttccttcccatcttcctccaaacttcccattttccactatgtctctctcaccgtatctttttcacttaaacaaaaatggaattc

SEQ ID NO: 195446 - DNA, 1000 bp, Homo Sapiens
gctagtctaaaaagttatccctcttccttctcattaactgcattagtggttttccatctttgccaacattggaatcacctggggagcattacaaaaatctccaggctcggaccacacctcctgtcaattaaatcagaagctgtggacgtgggatccaggaacagtatttttgaaactgtgcaggtgatttcaatatgcaaccaagtttgtgagacagtacatcaggttagttgtccacgagctttacttttataaacctttccaattaagtttttcactttaagttaaaagcccttcagtattagaccaggtggggtggctcatgcctgtagtcccagcactttgggaggctgagtgggcagaccacctgaggtcaggagttcaagaccagtgaccagcctgaccaacatggcaaccccatctctaccaaaaatacaaaaattaaccctgcatggtggtgcctgcctctaatcccagctactctggaggctgaggcaggagaatcacttgaacccaggaggtagaggttgcagtgagccgagatggtgccactgcaccccagcctgggcaaaagagcgagactatgcctgaaaaaaaaaaaaaaaagaaaagctcttccgtattcttccctcacctgcataaccacttttcaaaaacaccttttgtttttattacaaaaagaacacacatttattgtgcaacctttagttttgcaaatacagctaagcaaagagaaggaattacaaatcaccagtgatcttactatgaggcaataattcctgctaatgtgttcatatggatttctctagcatcttttccttgtttctatcatgtgcatgtgtattttattgtacatatggttttgtagcctccttttctcatctgaacgccttttcgattgaacttctcaacctcctgtcttttcctcctctgacctgacctctgtaactttaataagtcagtttttcttgggcctttcaacttgaccttctgtgaattc

SEQ ID NO: 195447 - DNA, 1000 bp, Homo Sapiens
ttaaattaaataaatagttccatgtattgtagaaaattatgtattaattctggagatctctgttctgtcccaatgcctttttatgatttttggttttggcatgccattatttttactttttaccttataatcttctgttttcacaattattgaattataatccattttaatatcagataaactcaatgctctaaaattgggacaactgaggaaattctgaatatagctcgtggacttgtatattgcattaatgttaaatttactgatttttaatcattgttttgtggtaatctaagagaatgtcctttttaggaatgtattctgaagtataagggtatacataatacacacacacacacataaacacacacatacacacacacacggagaaagagaagatgataaagcaagtgggtcaaaatataaacaatctaaatctgggtgaaggatctgtgagttctctagttacaattttctgtaaattcaaatttatagcaaaacttttaaatggcaaaaaaacataccctaggctattactgtctctgtgtttctagaattttctcaagagactagtttcttaagagaccatcccactttcccccttagatattcctaagtttaagaaaactcaactgtcttggatgaatttaattgctgtcctaaaatatctggtgaccctaattgtcatcaattgttcccaacaattgctatatggagtatgtttgaccaaactctaactcattgaaagtaatcctctcagtggtttgtagactgctttgcagtaatttaatgtgttatgaaagcttagtcagaacagaggagagctttgtccagcttccacagcttttatgacttttatttaatgcatttgtgaaaccagcccaagggtgtgaaggcattatccatcggcattgccattttgtaggctttttaccaaaactggattcacacgcaaatttgttactgaaaaaccaatttcaaagggccaatttgtatccag

SEQ ID NO: 195448 - DNA, 1000 bp, Homo Sapiens
tcgacctactgggctcaagtgatcctcccacctcagcctcccagacagctgggaccacaggtgtggaccaccacgcccagctaagttttaaaaattttttgtagagactgagtctatgttgtccaggctggtcttgaacacttgggctccagtgatcctcccacctcagcctccctaagtgctgggattacaggcatggagccattttgctcccggccagcctcctttttaaaaatgaaggaaaagtattctgattctgaatattttacactttgtgtcttcttttaaaattacttttgactttgtataaatatgacccctgaaatctaaaatttgggccctcttttagaaacaggtaacaccctgaaatttcactgtggtcttcctgtatcagggtaccatggcaaccagggcatttcgtaaaagcaagcatctgatcctgatatctagttgggaacagcaccaaatgaggagaggaaaacgggttcgttcagtgattggaatcaccttgcaagacgcctgtcattgctggaatcctctttacccaagtgaagatgcggtagaggggggtggggaaacccaagggttttaaaaagaggataaatcacctttaatgcacacttccaaaactaaagttttaaaaaacacacacacaatcaggccttttggaggctctgggtcagggcagccagggctgtcggcagtcctgcctttccatactcaccgcgccggcaggaaatgtgtggcggatgcaactgtgcaaactgagatggggcgaaaggttgagctacaagcctaatcccgggactccccggctggctgcgcttcctatctggattgctggaaggatgcggagtccccagggcctgccccttaggtctggacgggaggaggcgctagcagagcctcgaaccccgctctcagccctcacctgcaagtggctgacgatacagtagggttcgggcttgtgcagcccgcacgtcgaggtcaccgaaagctt

SEQ ID NO: 195449 - DNA, 1000 bp, Homo Sapiens
aaatgagttcaccacaggtgggacgaggcatttgcaagaaactcgaatctcagaatgatgaaaaagggtgagctccctcacttggagtgctgacagtttagctggggagactccatgtgaagatataaaccctggcatggacctctaaggccacagatggagtcagtgtgagacagcatgataaagacagtgcctgtgactgctgacggggtcagaagccctgcatctacgggacagggttaagtgaaaggctacaaagaggaggcaagacttaagtggtgaggacagtggccatacatcccagtttgcctgggactgtctcagtttaaacccgatgtcatgggtaacccctccagtgaacagccccttttactctcacctgtgctgggctggacaatcaattattcagtcaccctagttatgagctaccaatgcctgccttgctggaaaccaaacgatgaaaagcaagtgttcactgtctcacagggagaactaggcaaaggatgactgaaaaatcagttcaaaccactaatccttaaactcacagccttaccttgcccagcacatttatctacacatgagagccattactaagacaaacacagactaggaagcagaggaactccgccgccaccgcacaggagccgcgggggtaccctggagaggacgatcagcctcagggcaggccatctagaagaattaccaataacaccaacccattcgtctctctataaagtgctgacatctgtgctctggaacttacagctgagagagcacaaaacttgtctgactcagcacagtccaggaagtcaagcagctcaatctcaaacaggacagtggtgtttggggggatcaagggagggcagcccagcgttccataggcgtagttcggtttgaacagaaacctggccagctctcctctccgcatgctcagaaggcccagctccatgccccacagtgtaatatctgtaagaatggacaaagaaggtgggtgaagctt

SEQ ID NO: 195450 - DNA, 1000 bp, Homo Sapiens
actaccattaagtgtgacatatcgtagtagattccgtctcagattgtactggattagtattttctcaaattctttgaaaatctcttacaatttcacacatatttttactgtcatcagatttggtatttcttagcagattctaccacaggttgtactaaattggtgttttctcaaattctttgaaaatattctcacctctagttgctccatgcagactatttatagaagctaattcttcagtcacttccaaattggcattgattccttgaatcagtaacaactgagcagtatcagtaacattgtgggctcatcgggaaccaagaaaaaccaccctaaattatttgtcttttttttttaaattgactattgatgttgcttccaatgtcctcaactctctgagcaattgttcttactggaaggctaaaggtcttaaacaagtttattttctctggacacatttctttggctgttgtaattgatctcaatttagttaactcaccatgggtaaaccgctttccttgcttggctaacaagccactcagaaacttctttggttgcaagctcattctcattttttgtttttgtgaagaaattctgctttgatgagaaattcaagtttaaatttttctaatcattgctttcctgtgagatgagaatgtcacaatgattgttcagtctggttatgttgacatctattgtattcttttagcataactatattgtcattgcatagtaagcaaaatgtcttgccaagtaattctattatatagcaaagtaatacacactccactgtatcttaaaagcttgatattcaaagtctactttttctttcttgttatcacttgatgggtatttactgttaataataagaaataaatttaagagagggaaaagaggaaggaaggaagggagagagggaggcggggagggggcagggggtagaaacaaaaacaaagaaagaaaagaggccagtcgcggtggctcatgcctgtaatcgcaa

SEQ ID NO: 195451 - DNA, 1000 bp, Homo Sapiens
tggcttactgcaacctccacctcctgagtttaatcaattctcctgcctcagcctctcgagtacctgggactacaggcgcctgccaccaagcccggctaatttttgtagttttagtagagactgggtttcaccatgttggccaggctggtctcaaagtcctgacctcaggtgatccacccatatcggcctcccaaaatgctgggattacaggcatgagccaccacgcccggcctctcctcttcttttctatggctaataccactttcctgctttctttctactgctgaatctccagacttgtcatcagggtgccagagtcgacctcggcctcgagctcctcgatggtaacactgcatccatggacagtcctgaagtacaatgaaatatgttactgttacaacaatgctactaagcttttacatgagatttttaggttataccttatatattaatatatactaaagcccagtcatttaagaccaaatatatgagggcatggtaaatgacaacttgcccacttcctctctccatctccaaagaaaagcaaccatttcctaattattattttttatgtctggttaaatttattttctttggagacagggtctcactgtgtcagccaggctgcagtgcaagtggcatgatccagcttcgacattccagactgaaggaatcctaccacctcagctccctagtagctgggatcgcaggcccgtgctaccacattgggtttttaaattttagcagagacggggttgccctatgttgcccaggctgttctagaactcctgaagttaaatgatcctcctaccttggcctcccaaatgctagggttacctgcaggagccatcacgcctggcccatttcttttctttttttcctctttttttttttttttttttgtctgagacagagtcttgctctgttgcccagactggagtacagtggtgtgatctcggctcactgcaacttctgcctccccagttcaagcgattctcct

SEQ ID NO: 195452 - DNA, 1000 bp, Homo Sapiens
gccaagagattgttatgtgtttggttccagcctaaaaatgattttgtagtgttgaaatcatagctacttacatagctttttcatatttctttcttagttgttggcactcttaggtcttagtatggatttatgtgtttgtgtgtgtgtagtttatcctctctctcatctttatctagagattgactgatacctcattctgtttgtaaaaccagccagtaatttctgtgcaaccttactatgtgcaatatttttaaatcctgagaaatgtgtgcttttgttttcggatagacttatttctttagttctgcacttttccacattatactccatatgagtattaatcctatggatacatattaaaacaagtgtctcatacaacattgtatgtgagagaaatataaatatttacaacctgatattcgttgttgttttattgttaaaagtttattatgcaactctggaggtatagagggcatataagctatgggacatatgctgatcacaggctatattcatgaagttacttttgaccaacctgaaaactgataggattttgtttgtcatttggtaatttctactgcattcttaccatccttctctcacaaattttgatagcttgaagatctttttaattataattttgttgtatttgtttcctaggagcaagtgttcctgctgccagttctttcctctttaggcgtggttgagaaaaagcagaaactttacataaagctgtatttcttaatcatctttaatttgaaacttaagaaaatgaatttattctgttatatttatgtaacttatttcctggaagttatatctactagttttgtttgataataataaaattagctataccttgaattttgggctgaggattatctgtagcctattttaaaaaaaatcaagttttgagacattccagtaatatataaagcagaagagtgtggcttgggagataaatcagaaaaaccacaatcaggatgtcctggagaagctt

SEQ ID NO: 195453 - DNA, 1000 bp, Homo Sapiens
aaataggcctttgttaccttttgaaagtagtagaaatacagtattaaaactgcagctgtttcttccatcttcttcagtcttggcttaggaaaagaataccatgcagaacccgtgatgaaataaattattaacagaccctacaatctttttacctagaccttagaaaaataattatgaatcccccaattacatgttaacaatgagcaatgattgatatgaatttgaggatctatgtttattagatgaagatcatcactaaaaaatccaatttattcataaataaatgaataaattacccttttatttatttgtctttgttgagacttacaacagtctcatgttcactcattttaagattcaaataactaagcaatattgcacttatattagaaaacaatcatccttctggattttctgtctaataacagacaataaaaatgtgcaaaataattagcaatttaaaatataagtgagaaattttgtacatcttacagaatgattggataaatttaaaattatattttagtaatcactggtaatgtcattgcaaagatatgaacttgcatgaaattgttctggcccttattctgtaatgggcattgccatctgttcagcataatcagttctttcatacttccctgataaatgaaaacaatacaaatttctattgaaacaatatatcagggaaagaatatgttctactgaatgaggaaactaaaaaaagaaagtcatattcagcaacctgggatgatttctttcaattttaaaagttctgagaccaataactttccttaagaggaaagctttataaaattggttgaaaattcaacaaaaaatagctcctgttatcaagtccataagtatcttatgtccatttaaaaactgaaggaatagctttttccataatcctttgacatttttatgcgcactgcttccatgatcaagccatttggcagtaataaaacagaaagctggctcaaccattatcctccacattaaa

SEQ ID NO: 195454 - DNA, 1000 bp, Homo Sapiens
tgctattgtagtgtttgcccgtcccagactaggagaagtgagatacagatacgtaatccatgaacaaagaaccttacctctttggacctcagtttcctcagagtcatgtttgcaatatggaaatttgctgtaacaaattagaaacttagaagtattattagagtacttttgttgacatagtattttgttcccttgctgagtgtaacaacaacaacaaaaatacaggaacaggtaaacagtagtttccaaagtgtaggtatcttgaggcttgaatctctgctggtaattactggaactaaagctccaatattgagaagactgtggcatccagaccttgagtttctgatctttcttcctcacatcgatgtgtaataaaggaggaaagacaaatggatctgagcctcaggacctgtggttcttttcattttaagaactggacagttgatggatgtggttcctggttctggtttagagctgaagcatctgtcaaggctctgggtcttactcttaatgttctctttggatagagaactgatgctcaaaggaacacttggctgtttctcagtccctgtcttgaattgtcagtgaagacaggaagagcagaaggtagaggaatactttataagaattacaatggagggcaagaggactaaagtagaaataataattaacatacagaacgcccaccattttccaactactgtttgaaaacctcgtattttctgttggaaccaaataacaactcagagaagttcatcataaatgaacttcttgccagacttgaaaagagagaagagaacaagctttggaaaggattttattacccacatcttactgtctcagaaaggttaacttgcctggagtcacagagatacttaccaaatgagaatcataatttttaaatgcaagactttacctcacaacatcctgctgcagtatgccaataatatactcactcaagtgcatatgaattttaccttttcaacatatcattacctta

SEQ ID NO: 195455 - DNA, 1000 bp, Homo Sapiens
ggaggctgaggcaagagaatcgcttgaacccagaaggtggaggttgcagtgagccaagattgtgccactgcactccagcctgggcaacagaatgaaactccatcttgaaaaaaccaaaaaggtttgatttacttacaataaactacatataattacagtatagattttgatacattttgacatatatatatacacacatatatatacacatatatacatatacatacatatatacacatatatatacatatacatacatatatatatacacacacccatgaaactatcaccacaatttagataatgacatacccaccacccccaaaaattatatctcacccctctataatcccttctactctataatccctgccttctttatccccaggcaaccaatggctgctttgtgtcactgtagattcgtttagattttctaaaatgttatatgaatggaatcgtataatatgcacttgtggttttggcctagtttcgttcactcagccagatgatctgacattcatcatgttgttgcttgtatcaatacttcttcccggctgggtgcagtggctcatgcctgtaatcccagcactttgggaggttgaggagggaggattgtttgagcccaggaggtccaggctgcaacagtgagccatgattgcgtcactgcactccagcctgggtgacagagcaagaccctgtctaacatacacacacacacagagagagagagagagagagagagacagacagacagatagacagacagacagagagagagtgtgttgcgtgactcagcctttaagcttagctttccctgtggcataagtttcgggggttctgagatttcacattttccctttacaggtgcatcgtagggtttagaaggtgatatctcactttgcacagctgagacagctctgggaccagtgccaggcatcccacttagccagttctcgggtggttcctggattgacccccaacctccactgcacatctgcag

SEQ ID NO: 195456 - DNA, 1000 bp, Homo Sapiens
agactctttttttggtcattattccataaacaattaggtattacaactatttacatagtatatacaccatactaggtgatggaatctagacataactgaaagtatataggagcatgtgcacaggtgacatgcaaatactaaaccattttatatcaaggacttgagcatccatggattttggtatccgaatgggatcctggaaccaatctcccacaaatacctaaggacaactctaattcatttgctagaagtggatgtttgactcttcatttctggtctgaaatactgtaccattcatttcgacagagaatagagcaggtggatgaagaagggaaggggttttagagaaaagtaaccggctctagctcctctgagtttcacaggcaagtgggataccaagcagcatagaatacggtagggattgcttgatatataaaatctatagctgaaaagtaaaggtttgagctgcaaattgaagcaaaggtgattgaaactgaagcatactgaagcatgaccatgcagctggaagccaaagcctttccaagcatgtaagagtgctggggagaaactggggaataaaagagccaagggaagagcccagttcaaagccgaagaacaaagttaaacaagccaccaacattataatctatagtcaaggacccctactataattgccaatataagttttaagtgtcaaatacagattttagagcacatacatatacaaaagtaagcctaccttttacattaggataagatatacatataagaagaacaagcaaactaaagacccatacgctcttctatctaaaagctatgtttgtagacaatctgaagccagctaggtgcagagtgaataaaatgtcacaaaaaaggaactgtttactaagacttatattggtgaaagttgctataacaactaacgattgcctcatgctattcaggaaataatgtaagatgtaccactttacacaagccttctgcaaacttccacaagctt

SEQ ID NO: 195457 - DNA, 1000 bp, Homo Sapiens
tattcactatttatttatcaaccaacatatttctccagtaagttcactctctcccactgccaaattttaccttaaatacctgatcataaaggatggctcctaatcccatccctccagaatcatccctcagaaaagttgacgtgcatttgggtcttttcaaaatatcacatataaggatcactttcgcaattactttttttttttttttgaaacacagtctcgctctgttgcccaggctcaagtgcggtggcgcaatctcgggtcactgcagcctccacttcccaggttccagtgatcctcccacttcagcctcccaagtagctgagactacaggcatgcaccaccacacccagaaaattttttgtatttattgacagaggcagggtttccccatgttgcccaggctggtcttgaactcctgggctcaagtgatccaccctcctcagcctgccaaagtgctgggattacaggggtgagccaccatgcccagcctcaattaccttatcttgaagaacaaagtactggttgggactaatatgttagtctgaaatgacagttgccaatagtagttttggatgtttacagaggtgagctagcaagactagaaaaaaagagtaggaggagaggccaggagtcatatatattaatacagatcaataataatacaaattgttagctgtgaaagcagtgagtactcataagaaaatgagtaggaaaaaatcactataatgatatggaactggaaatttatggcttggaataatatttttgacaagaacattgtacttttttaaaagttcaagtaacctaaaggagaagataatgtgctctggaaaactgtgtttgatgcccggatgtggctctatgatcatgaagactgatgtcacagacacatgttaagaggatttcacttgaccactcattcttgaaacactagtttcctgggttctgtgatgtctcattctcctgtccccctccccctgattttactggcaagctt

SEQ ID NO: 195458 - DNA, 1000 bp, Homo Sapiens
atcgcattaatcttaattttattatatattaaagtttctaacttttcaaataatgcagttttcgttgttttaaaacgtctgagaattatagagctatttggtgtggctctcaggcaaggactcctgccatttattggggccctggttttatttaatagccagatgaatggaatagttaataaaagaaatattgctttattccctgacatttatgtccttggtttccaataaagaattgaaattatgaatagttgatggtttaaattgatgttttatgttgaacgctagctataatttgccctctgaggattgtaataccgagaaacagatggtttctcacagtaacaaattgctatgtgtatacacgctatagtcttggctttcagatactttcacctttggttctgagctgctctgcagacgggagaggggggtcgtgcggggagatcagcctctggaggaaggggtttcctgccctgtgggggagacacagacaggccctgggggttcagggaaactggggaaatgtagctagcctggcatggtgtcagtacctggggccaagaggagcgttctgtccacgatcatggtggcagctgcaaggtagtgcctgcaggactgctgtgcatgtggctgtttgacaccatgccgtgctgcaaactccacatcttcctagaacaaccaggagaatgccgtggagacttgttgccagatttttgcagttgccctgcagtggagaggttaagagcttggactccggagccaggtggctgggccactttgggggaagtttcccaaattcccacatctcagtttcctcatctgtaaaatgtgcataagagcaaaagccaccaccctgttttgaggattcagtaaaaccatccctctaacacaacactgagcccagtgccgggtatggtgtcagtgtctgccaggtaatggtgtaacgaaaattacaaagcagattgatgtggtgtgattcttgacgttacaaaagctt

SEQ ID NO: 195459 - DNA, 1000 bp, Homo Sapiens
ggcaaaaactcgtctctactaaaaatataaaaattagccaggcctggtggcacacacctgtaatctcagctactcagaaggttgaggcaggagaattgcttgcacctgggaggaggcggttacagtgagctgagatcatgccactgcactccagcctgggtgacagggcaagactccatctcaaaaaaaaaaaagtattacatagtactgttcatactttcttgctttgaaactgtaatatagcgagttcaagtcaccataacgaaccataatgtattatatccaacatggtgggtgggaagtcagggttgctttgttcctactcataaatgactataaattgctggttttgctaattttgtgtctgattacttgtttttctattttcccttcaatgtcaggtactgagcagtaacctcctacctcaaatagtctatgacctcttagcttatatatgaaaccagataaatatggttgttagaattatgtgttaaataagagtactctagataagaccccatgaccaattcagtggtggccactattcagaagcctttttaatttacctacagtttaggagtattatgagggcattttggtacctcacttatgtaaccaaaccagagcacatgcaatgggtgtggttactggtaacctaagcattaggaaattaaaaaccacctcttacattgaattaatgggaatcaatgactgaagaaattgtataggtacaaagaagctacaacgctaaatggcagaagtgacaagggtcacgtgggaaaagctggtataaattctgcaagcttgttaacacacagaacatttttaacagctctttgtagcttcatattttttctcaaaccaaactgaaattaaaacacaactgcgctcattactgtaatgtctcccaacagtgcaaactataggttttacacatttaatagattcctgtgtttggcatatgctttactggaaataaaagactagtgactatttctat

SEQ ID NO: 195460 - DNA, 1000 bp, Homo Sapiens
ccacagtgtaatcaaattagtactcaggattaagaaactcactcaaaactgcacaactacatggaaactgaacaacttgctcatgagtgactactgggtaaataatgaaatgaataacgaaataagtaagttctttgaaaccaatgagaacaaagacacaacgtaccagaatctctgggacacatttaaagcagtgtctagagggaaatttatagcactaaatgcccacaagagaaggcaggaaagatctaaaatcgacatcctaacatcacaatgaaaagaactagagaagcaagagcaaacaaattcaaaagctagcagaaggcaagaaataactaagatcagagcagacctgaaggaggtaaagacacaaaaaaaaacctttaaaaaaatcaatgaatccaggagctgttttttgtttgtttgtttgtttgcttttaaagatcaacaggatagatagactgctagccagactaataaagaagaaaagagagaagaatcaaattgactcaataaaaatgataaaggggataccaccactgatcccacagaaatacaaactaccatcacagaatgctataaacacctccacacgaataaactagaaaatctagaagaaacagataaattcctggacacatacaccctcccaaggctaaaccaggaagaagtcgaatccctgaatagaccaataacaagttctgaaattgaggcagtaattaatagcctactaaccaaagaaacccaggaccagatgtattcacagctgaattctaccagaggtacaaagaggagctgatatcattccttctgaaactactccaaacaatagaaaaagagggactccttcctaactcattttatgaggccagtatcatttgatactaaaacctggcagagacacaacaaaaaagaaaatttcaggccaatatacctggttaacattgatgcgaaaatcctcaataaaataaaccaattccagcagcacatcaaaaagctt

SEQ ID NO: 195461 - DNA, 1000 bp, Homo Sapiens
atcttgtgtgagtctcagggactcccaaatcccagctctgcattcccagttctgttaggcgttccatgggttccacaaactcaactgtccatttatcctgcccccctccctccatccctggtcccaaatggcacttgtgttcactaaatgtaaacttctagaaccatcttctgccacctccttcttatcagagacatcaagtcaggacatgaagaacttggcagctcaaccaccctcccaacccgctcctcctcttcattctattccgttatctaacttaggtactcagcaacacctccaaagcatgctttcccaaaatcaaagtcttaatcatttcactctcgtgctcaggctggcatggtggtatgcacctgtagtcccagctactcagaaggctgaggtgggaggatcacttgagcccaggagttgaggctgccgtgagccatgatggcgccattgcattccagcctgggaaacagagcaagattccatctctttaaaaaaatatcttctgggctgggcgtggtggctcacacctgtaatcccagcactctgagaggccgaggtggatcaccttaagtcaggactttgagaccagcttggccaacatggcaaaaccccatctctactaataataaaaaaaattagccagacatggtggcgcgcaccggtaatcctagctactcagaaggctgagacaggagaatcgcttgaacccaggaggagatcacaccactgcactccagcctgggtgacagaccaacagtctatctcaaaaaaaaaaaaaaaaaaatcttccaaagctttcatgcctccatcactcagccagggcagtggttccacaggggagtggccaagacaatcccaccagggtggaggatgaaactgctgcaatgagtgtatctttttttttttttttttttttgagatagggtctccctctctcacccaggctggagtgcagtggtgcgatcttggctcactgcaacctctgcatttt

SEQ ID NO: 195462 - DNA, 1000 bp, Homo Sapiens
tttatattatttgcattggtggctccagccagagacagtggctgataggcatgggtgccagatgggggctcctccctataagttcatcttctattcattcactaataatcttgaaaaaaagtctgtctgttcatgccatttcatatgctgtttactaccaccatcctggaaatttcttttttaaagtcagttgtgcaaattcaccaggccctttagtacttaggacatttttgaaaaaaaaaaaaaaaaatctatgtggttgaatgcccaagaagacagaggaaaagggtgataagagaactaacttaaccaacagacagcaagaaagccaagacaatggtgtcccttctttgcttgtggaaatctactcatctttacacaggtcaaacagtagctcctcctagaagccctctctgttctttccatttgggattaatccttccttggtaaacctcagcatttacctaaaattatgattccacatttaccacccgtgttatcatagtctatctctgcatttgaattaagtcagattggcccatctcagctatgcaagattataaaccctttgagggcagaaattattcttttttatattctcctctcgcatctaatacagtggctaccatgtactagattataagcaaataaatgcacgcatgaatgaatgctggatggatgaacaaatgaatgaacaaaatcatgattagctaaacactgcaatcctaagttaaggaaagcaagacagaggtctcagcagatgcagagtctctgaggttgtaggaaagtacattatcccatgggtgatgggaggctataaatggacaccagatggtggcatgttcagatcagcagggaaggaagatgattttagcatcaatatgtaaagtgctttagaatagggagacactgaaagctgggcagccggcaaagcaggttacaggatcccaggcgtgaagtattaaaatggtaatccataagatcaagttcatggaagctt

SEQ ID NO: 195463 - DNA, 1000 bp, Homo Sapiens
tcctttatatcttcaatccccatcatgtacctcttatttatgtaagagttaacccaaaattcaattcatcatctctaatcacccacccatctctaatcatttgtttcttcagcacctgtataaacagatgtactaaatttgtaccatattgtttacaacttggcaaagttctctggcatactccatgttttctaggataatgtaacacactgcaagtattaatatagctgttagctaaatgaaatctcccttctggctattcagcatttttagaacacatacatcagaagaagacttgccttcctactaaactattatgtggagatttgtgttaggggcctgtcctgcacagcttggccagatcacttctgtttctcttcaccaacaaagaacacaaaataaaattatttcattcttcactatttaagtcagaagaacagcatctctctttggaagatactatataactcacagcccccagtgtgtcacacaattaccatgtgtcatttatccctttatggccttttttattttataactggatagaccaagtgaattaatgccaacactgactatcaactgtgctcaatgttagcattacttcatcattctggtccttgtatcaagaccattaagttaatcttgaccattttaaaaaaaattaagggtgggatctaaatattttatctcactaagaatgtccgtattatgttcttctgaacaatatacttgggggaagctggtggtgataaagaccttttcaatggtcaaactaaacctaatgtgtaactttcccagatttaccccacagtattttgtcatgactgtgtaattatttgtttcctgggctttgttccaaaaagaattttatgctgcttataaaatacacataatctgtaaagataaaacaaaggaggtgaagaaataagagcatagggaactgaacactcaagataagatgaagccaaaaatgctgttatacaaatctggctttaagctt

SEQ ID NO: 195464 - DNA, 1000 bp, Homo Sapiens
tcccacattgttgatgttacaggtagcagtggaggtaacagaaaagggaagtcctcagtgttacactggcatatgtttaccaaccaaccctgcagagggaaaaaatctaaacttatagcttttgttaatgttcttagtgtaaatattccgatcgtacatcattttaacctaccattgtggtgtcactggagttgtggaacatggagttgggaggatatccagggagcttgtgtgagctggctccagcaagccaatgcatgtcctttttgggatgttattatacttcttggcttttgcaagatgaagcatgtgattcactttctttttctttgactccagcttctccccatccttttattgcgtctatttctctcttgtatccactaataattgacttagttgagaattaaattttgcatcccttttttctcttccttggtgttttcttctgctctcatgtgttttgccatccctgtagcacaagtgatgctaaacccttgtctgtcctctcaaggtcatctcctcattccaactgtaattttttatcagataccctcccttttgcttgatattcagtagggctgaaaataggctctttagcttgcccctgccaaaaaaataagtactttcttctctatcctattaagaagtataaatgcaaactatatgccagatacatcatgaggtattttgaacacaaaatttgggaatgattatccatattttatagattaaaaaaattccaagctgaaataacttgattagtttatcaaattaacctatcaaataggcaacagaactcagatgtagacacaggactctgccacccaaacctatctttctttccattatagcatcagtgaatacaacaatcattttttctcacactgatttaaaatatgcaagtaatttttgagtttttctgtaattatcacatcctatttcatcccctgtgccagtgtttgtgcaggtgtctatctccttcctacgctataagctt

SEQ ID NO: 195465 - DNA, 1000 bp, Homo Sapiens
attcttccagttttaaaatagccccaaagatacagtttcagctggtggaaggtctgttctgctctcttagtcctaatcagaaagtcccttttatcttataatcccatactaaatccaaacccttagcaaatccttgctgccaaccagaccactcacaaatcaaacaaaatgtaagcaagcaatccagtactcggttacaccagaagactctgatctttgcccccgaaaactgtcctactttatccttatacctgaaatcactgcatacctgaaatcactgcagccctactgttttacccataccattaatttaaaaaggcatctatttctttatagaaagaaacattcacagtgaggtcttagtttgtgaacctcaaaatccagatattaatccactttagttattactttgtaattgcttctcagtcattggctgataatgcaatggtgtgataaatttgacttatctccacatacaaaagtcgatcagaagggatagttctcttcctttttttcccctcctactggctcttactgttttctaatctccagtgtaaatggaatgaacacatctatagttaaggtaaatgccaccaatcagaagattgagtgatttactgcttgtaaagcaactgtctttgaatcttatgaaataggtggtgttgctaccacagaagccaaaaaggtcttaaaattggaaatagatgtctttattgtacttcagccaacagcaagccaggggaaggaacatacataaatatgacaggtcatatatgaaatttggctctcctcctatcaaagtagcctaggagcttggaggaagcctaattaactaaaacaggaaaaaagcatactcatctgatgtaaaaactcatcagctgtaaattaccaacattaaaccagaagtcattaccagttaaaatgtgtggttttcatcttattcttaaataggagaggtggacagtagtgtaagtaacattgctttaaagacataaagctt

SEQ ID NO: 195466 - DNA, 1000 bp, Homo Sapiens
gtatgaacaaaattctgtttgatggcaagtcttgagaagaggaaaccttctcatgaaggctgaggtcttcagtgactgacaatgaggaagtagaggtatgaaggtgacgctcacgtggagagtgtgctacaactgaatggcatgaccttacttacagatgcagaatttttataaaataatggaagaagaatcattctgaacctatttgcctgcatctatcatctagcagttgggtgaaacttttttttgtatatatttctgaccatgttactccttataaaggaaaaaatttttttctctatttttctctctcacactcaacacagaacacttctgtgaccagatgtttaggttttttgtttttgttttccactcaccaagcaattctccaaaagacactaattgcgtgtcctataatccaattcaatttgacactatttacctggagacagtgtcaggtcccacaggttgagggctcagtcccacaagacttgcaccctactttagacaccagtcacaagcaaaaggccatcacctctacttctgacagacttggctacaaactggggttcccatggcctcctccttgaattcaattaatttgctacgagggttcacagaactcagggaaacatttacttacatttgctggttgatcattaaggacattatccaggatacagatgaacagctagatgaagagatggataaggcaaggtatgtgtggagggcagagtggagcttccgcgccctcattgggcatgccaccctcccatcacctccacatactaagcatccagaagcttatcaattctagttggagttttcagagagcttaatctccagcactctgctccctttatcccggatgttagtaggtggggctgaaagttctaaccctctaatcttctaactatttggtctttctggtgactggccccattctgaggttatctaagagaggcttcaccttcggagcttgcagtgagccgagattgcg

SEQ ID NO: 195467 - DNA, 1000 bp, Homo Sapiens
tttttcatctttttcctagtttctgacctcactaccactctgcaccacgttgggatgggtatccttgtacatccgtgcagcttttctatgatttttaatgtctgattattttcttaggttaaatttctaaaagtagaagtgaacagcgtgtgcacatttttatgactttgggtacatttcattacattactttccagaaaagttggaacaattcatagcagtaactgcactgaatttcttgtattacttacctatttttaagcaagtaatataatctcttggttccaaaaacaaagcataaagaaaagtctcctatctgcctacctccccacccactgttgttgattttttggtgtgtatccttccagagtttcattatatacacagaaacaaataccagtgtcaccctcctttgtatgcacatagtctagcatgccatgcacactcttgtgcaagtggctttttattttttaaaattaacaggccaggtacagtggctcatgcctgtaaacccagcactttgggaggccaaggaaggcggatcacttgaggtcaggagtttgagatcagcctggccaacatggcaaaaccccgtctctactaaaaatacaaaaattagctgggcatggtggcgggcacgtgtaatcccagctactggggaggctgaggcaggagaatcgcttgagcccaggaggtggaggtttcagtgagccgagaccgtcccactgcactccagcctgggtgacagaacgagactctgtttccaaaataaataaataaaaattaacagtgtttcttacacttttcaaatcagtacattaaaatccctccaattgtgtgtgtgtgtgtgtgtgtgtgtgtgtgtgtgtttattaaagcgacaccattgttcaatgatatgaataggtatattttatatacttggttccattttgatagatatttgggttgcttccttgaagaatgttgtgcgtacaccgtttgacacaggtgcaagctt

SEQ ID NO: 195468 - DNA, 1000 bp, Homo Sapiens
agattattctggattagccagttaggccctaaatgccattaaatgtatccttgtataagaaggagacagagaaataatgacacacgcagaggaataggcgatgtaaagatggagcaggaaaggtttaaagatgctagcgatggagattggagtgaggcagctacacactgaggaacaccgcagccagccggaactggaagaggtggggaacagattctccctgcagagctgctggaggagtgaggtcttttggcaccttgattttggctcactgaaacaggtatgggacttctggcctccagaactatgagagaataaatttgtgtttattgactcctccaaacttgaagaaaatgtgttatacagtagtcccaggaccatccttgcaggtaaaatggagacgtgggtctagaagacagtgcaagtaggtgtcaaggtatttgaccaactctgtctgttattcagtcacatgggaaatactgactgactactcaaatctacagtgcttcaggcactggagcagtggataaggcagacaatatccccactgacactggggtagggggaaggagcagctaataaataggtaaatgaaaaatatgaacaaggtaactttagcaattgacaagtgccttaaagaaaacaaaacaggataatgtggaatggcggacggggatccttttagactaggtagtaggaagccctttctggtgagaaagccttggagctgagtcctgaagatcatgaaggagctaccatctggagggagagcattccaagtggaatgagtggcaaacacagaggctttgagatgggaatgagcttcctgtgtgtgagaagcaaacagaaggcccagacccctctaagtcaacagggatatcattgctcagggagggctgtgggattctgtcctaggctctgccctgtacaattttcattttttataattaaattggaagaaaacgtaatgcatcataaatgtgcaggcaatataaagctt

SEQ ID NO: 195469 - DNA, 1000 bp, Homo Sapiens
aaaagtttaaaaaattagctgggagtggtggtgggcacctgtaatcccagctactctggtggctgaggcaggagaatcgcttgaacccgggaggtggaggttgcagttagctgagattgcaccactgcacttcagcctgggcaacagagctagactcagtctcaaaaataaaaattaaaaaaaattgcaataactgcacttcaaaataattgttttccttggtccttaaaacatgattagacttctgtccaataatggccttgtggacttacgtctttaaaacattccaaatagatgcctgtattcttgacaagacttccagaggggaccgtggcaaaggaagggttaagcatctgcgtcagactgacagtgtcttgaccggatcctcctccgtctttcccccaccgctttgcacagtgccacatgactttttatttgttttgagacaggatccagctctgttgcccagactggaatgcagtggcgcaatcacgactcactgcagccctgacctcctgggctcaagtgatcctcccacctcagcctcctgagtagctgggactataggcaagtgccaccacacccagctaattctttttatttttagagatggggtctcactgtgttacccaggctggtctcaaactcctgggctcaagcgatcctcccacctctccctcccgaagttctgggattacagacaggagtcacagcgccaggtccctatttattttactctttgtgtgtttccttatatcctgtaaaaatgggtacagtggaaactgggcagtaattctacacgtattctggattttagctactcacatttatggttacttttacctatcaattaattgcttttcttttcactcgagttttagtgattttcactgtccaaaagaatcgtgtatagttgacccttgaacaacacaggggttagaggcactgacccccgacacagtgaaaaatccaagtacaacttttgactcctcaaaagctt

SEQ ID NO: 195470 - DNA, 1000 bp, Homo Sapiens
tcaacaaattaaaaaaaaaactataaactttaagttaattaccaatgatatctacggatgtaaacaaaacaccttcagtcacaagaatagtactttttggctgggcacggtggctcacacctgtaatcccagcactttgggaggccaaggtgggcagatcacctgaggttaggagttcgagaccagcctggccaacatgatgaaaccccgtctctactaaaaatacaaaaacaactagccaggcatggtggcgggcacctgtagtcccagctactcgggaggctgaggcaggagaatcacttgaacccgggaggcagaggttgcagtgagccgagatcacgccactgcactccagcctgggcaatggtgcaaaactctgtctcaaaacaaacaaaacaaccaaccaaccaaccaaccaatagtactttcctacttacctcagcttctttttccagcaagatctggtctttattcatgtcctcattctccactttcctaagaatcgaaagaaatcagaatcataacactgcaacaaatagttatttgctacccccccaaaaaattctactttaaaatttaaaatgacatgtatttatcatttctctttttatattgagatggtgtctcactctgtcgcacgggctggagtgtagtggcatgatcttggctcactgcaacctccacctcctaggttcaagcaattctcccaccttagcctcctgggtaactggcattacaggcacgtgctaccacgcccagctaattttttttgtgtttagtagagatggggttttgccacgttggccaggctggtgttgaacctcaagtgatccgcccaccttggcctcccaaagtgctgggaatacaggcatgagccaccacgcccagcctatcatttttctaattaaagatataatgaataaaaagggaacagaatgattttaaaaagttcgaacaacatgaaatggaacattcaagagacttttcttactctaagctt

SEQ ID NO: 195471 - DNA, 1000 bp, Homo Sapiens
agaataagtgattcatatgtaaatatgtcaacaagaattgtcacatgaagaattcccatatgaaacatatttttctacaattcataactgagaattatatgagcttatcgtattgcttcccattccaagcaaccctgtagaatgagccatcatgtttcctataaaatgctgctccacatattggagaatcaaattttaaaatgaacagttgtagtgcattagtcaatcttgtctttaatatacgatttgtctctcatactaattttgagaataacagcaaattctgatcaagctataaacgtataatggaatttggcatagcaagtgcaattgaaattcctacttgtttacttttgtacaatgtcatttactatgattggtctaatatttgaagaggccagacttgtgaattaaatatgatatgaatataatagatactacaattcctgaagtccttaaatttttgagggtcacgccaattctcccccagtgtaatatagttttattatgaaaattgtttctgggggtggtgagaggcagttttagggagttacatttggcctttcctataacaataactcttactctacaagtcaaaggcttactctacaaaccttgaatgaatgtatgttctgctaccttttaagtatgtctattaggattttactcctaattggcatatgtctgtctctaacaagagggccacagtggtgccttggtccccagatattagtgtcaccttaaatcatttatcaagagccctcacaagatctaggtattgcccttttcctgtgtattgatatcagaataaatgaccatatgtccttttgagaaaagattcaagggatcactattctatacacttgcacaactattgtagggtgcttttcttagaacctggcttctatttcaactaaaagagtttgagccaaagaactgcttcattctgaaagtgggcacagagtcatgacttttcattacaacagtagactttaagctt

SEQ ID NO: 195472 - DNA, 1000 bp, Homo Sapiens
tcaaacttaatgtgtgttaagactgtcaaaaatatcacttaatatgccaattttattacctaaatatcacctttgaaagtatttgccaaaggagatggcttctccgccaggaaaatgtgtgtcccataagcccagtggaacagtttccttgggacaagtaaactatagttagatacagtaagagggctgggctatctctggtctctaataaaatgtaaccaatccacagctaacatcatgcttaatggtgaaagatgaaaagcttctcccctgagatcaggaacaagacaaagacgccaactttcaccacttctattcaacatagtattggaagtcctcgccagagcactgagacaagaaaaagaaataaaagggatccaaattggaaaggaggaactaaaatcatcaaggttcagagatgacatatgacataatcttatatgtaaaaaccctaaagattccataataaaaaactatcagagctagtaaatgagttcagcaaaggtacaggatacaaagtgaacacgcaaaaaccatttgtgtttataaattaagaacaatccaatagataattaagaaaacaattccatttacaatagcatcaaaaataacaaaatacttagaaatacatgtaatcaaagaggtgaactacttgtacactgaaaactaaaacattgctaaaagaataaagacataaataaacggtaagacatgctgtgttggaggaactaatattgttaagatgaaatactacctaaagcaatctacaaattcaatgcagtccctatcaatatcctaatgatatttttttttgcagaaacagagctgagggtgtgtgaagggctgatcttgtgaagttctgtgagcaagctggctaagattgaaaggggatgatttaggtttttctgtaggttgaacatgaaaatgaaagcacactgatgcagggccagaatgtgggcccatgtgtctgagtaacagggtttccttaaaaaaagtgatc

SEQ ID NO: 195473 - DNA, 1000 bp, Homo Sapiens
tatagctacataattgggcattgtgtggatatattttacataaccagttgtccactgctggacatttaggttatttcccatctttaacattacagataatgctgcattgaataatcttgtgcttatatcttttcatgtttttgctattgtgtctttgggatagatgcctagaaatgggacaaaggataaatacaaatatagtaatgttagatattgccagattccctttcccaggggttttgctttctatctgtattggcagaatctttttcctcctgatttctttttaaattatgccttttattggaaaacactatatattcttgaattacctgggaaatagatgttcctcaggctctttaactttctactctagtaggaccagcttatatttatggtacccgtgtcttgaagttcactggaacagtttcctcattgatccagcctcttgggtaattgtataatgttattttgtggattcctcctagaaattctgtagaaatagagtctagaaggcttaatattttaaattgcacattcaaatctggaacatgttgttagtgtgagtgggttgcctttttatggagtggaaataccattggatttatgagggtagcaaatataattgctctttattgagtagttattatgtaccaggtcctgcctgtgctaaatactttacatgttttgtttaatcttcatcatattcctgcatagcaaggtagaagctgttctcccctgttcttagagaggttaggtaagaacttaatctttagtcacacaacccataagtggtgtagagttgggagatacgccaaggtctttctgaactcgaagcttcagttattatggccattaattgatttactgaattattttgtttctgttaggaaacttttaagttttaaatactgcttactattagatggtttgtcatagtcacttgaaattcttaaattggagggcatacatcattttacaggatttggcactgatgatc

SEQ ID NO: 195474 - DNA, 1000 bp, Homo Sapiens
aggcctccccagccatgtggaactgtaagtacattaacctctttcttttgtaaattgcccagtcctgggtatgtctttatcagcagcatgaaaatggactaatacacacacacacacacacacacacacacacacacacacacacacgtacatatacatatatatattcaaactctggttggttgtacaatgacatcttaattaaattttcatattacactggaaatgatattcttccctttgaaaaataaccattctctctttagagaaaaaaagatttattttccttagtcttttattttcccagattttgaataagatatagatatgagaaatagttaacattcacataactttaagattaataaaatcaatatcacaagtgaaacgataggtagcaactgacattcaaccacatgttcagaaaacccaggttcattttactgtagcacaaccagaagaacaacaggcctgtgcttctttggagacagagagctccatctacaaacggcagctgcagcagagtcctggctgggtgctgccgtgctcatgtggccctagtttgcatcttttgacctataggtttcttagtgtcagcaacaacatatgagcacatgtaataaaataaaagtgttaaactcatcatgattacaaaaattattaactacttacaaataatctttacaggaattgttaggccaataaggaaaaattacaaaactttatggatggatataaaagaagatttgaataaatcccaattataccgcatttcagtaagagaaaaccaaatcttatgactattgtgatggttaattttatgtaaatgtggctagaccatggtacctagtttttggtcagataccagtccagatgctgctgtgaagatactttttagttttgactaacatttaaattagtagactttagtaaagcagatgacgtttcataatgtgattggggcttgtccaatcagttgaaggtcttaagaggaaagctt

SEQ ID NO: 195475 - DNA, 1000 bp, Homo Sapiens
agattttatataagttaatggcttatataaagccatttatatatatataaagccaaaaacttatataaagattttatataagttaaagtcatctatgacttaatgaaccttttagctctagctaaaagcacattgttgaaaagcacagacataagtcagacatacctgggtataaaacttcctctacctgacacttgagagtgagatgggtgctgggcgcaatggctcacgcctataaccccagcactttgggaggccgaggcaggcagaacattcgaggtcaggagttcaagaccagcctggccaacatggtgaaaccccgtctctactaaaaatacaaaaattagcccggcatggtggtgcgcgcttgtaaccccaggtactcgggaggctaaggcagaagaatagcttgaacctgggaggtggaggttgcagtgggccgagatggcaccatttcactccagcctgggtgacagagcaagattctgtctcgaaaaagaaataaaataataaaataaaatagagtcttaccccctcctcaaaaaaaagtgagatggctttcgcctcaaaatgtaacagattacagactgtaagaagactgtatcttatcttcaaacacaataacatatcttcctcataaggttattctgaagatgaaatttgatactgtgtataaagcacttcccacaatgtctggcaataaagatggctcagcaactgaaagccatcattatgcgccaaaaacactaagttgtgaggaattgatgatagctcctaccatccccaacgccccccatgcacatacatacaaaatgagatattcttctaaaaagaatgccaatcaaattttagtgtacacaggagagagaaaagaaaacatgtttcaattagacaaggacacagatgttaggaatcatttcttaaaaaacaagctaagtggccgggcgcggtggctcacgcctgtaatcccagcactttgggaggccgaggcgggcggatc

SEQ ID NO: 195476 - DNA, 1000 bp, Homo Sapiens
atatacccaaaggattatagatcattctactataaagacacatgcacacacatgtttattacagcactgttaaaacagcaaaggcttggaaccaacccaaattcctatcaatgatagactagataaagaaaatgtggtacatatacaccatggaatactatgcagccatgaaaaacatgatttcatgtcctgtgcagggacatggatgaagctggataccatcattctcagcaaactaacacaggaacagaaaaccaaacagaaaactgcatgttcttactcataagtgggagttgaacaatgagaacacatgaacaaacggaggggaacatcacacaccagggccggtagggggtttgagggctagcgggggttagcattaggagaaatatctaatgtagatgacaggttgatgggtgcagcaaaccaccatggcacgtgtacatctatgtaacaaacctgcatgttctgcacacgtatcctagaaattaaagtataatagaaaaagaaaagaaaacattacgctaagtgaaaaaagccaaaaataaaagtgcatacagtgtcatgtgactagagataaaggtagggtggtgatgtgaatatatgtgaagatcccttctcaggctgtgaatatggcattaagaggagtgggcgtgggccactgggtttatgtacacccagtttgggtggcacagtttgggggtgaagaggcttacagagtaagtgactccagttcaaagagcttatgtatctgaaggcagtttccgggtactccaagcttaggcgggattcacacttctaagacttaatgtcaacagtttctattggatgactgcagtcattctaccccagatgtcacaaaattgcttatatttcatgatttttgagttaaaagatggcaatattttatggttcaacccccatacaactgggaataagaatgggagtaggagaaaggtcactttttgactcattatacttcgcaaagccagctaagctt

SEQ ID NO: 195477 - DNA, 1000 bp, Homo Sapiens
acacatttactaaagaatgctaacagccggccagggcggtggctcatgcctataataccaggactttgggaggctaaggtgggcggataacgaggtcaggagttcgagaccagcctagccaacatagtgaaaccccatctctactaaaaatacaaaaattagccaggcatggtggtgcgcgcctgtagtcccagctactcaggaggctgagacagaagaatcacttcaaccagggaggctgaggttgcagtgagctgagattgcgccattgcactccagcctgggcaacagagtaagactctgtctcaaaaaaaaaaaaaaaaaaaaagaatgccaatagccacttcagtgatgaaatagattttaacagactcaaggagtgatttcataataagcaagaagacagtggatttttaaatgattctttacctgaacaaaatatttcaaaaaaaggaaaacaaaaacttgtgaaactcagtagctctatgagtgttttgacccagactgcagtgcctgcgaagctaggggaggttgttggcccagtttcctgctgagagactaaaagccatgaaccatccaggaagatgaaaggcaaggaggctctgaaaacccaggaggatggcgaagttcaagggttacaaagaggcaaaattgggtcattacaatcaccatgatcctagctatatttaattttcaaaggctgcataaaaattcaccatgaaacactactgtagagtttcggtgtatttctgtattcattatttatagtggcctttgtagcaactaaatctgagaagctgcattttatagcttctatgtttgtgctggcaataagctggctttagagtgcagataaaaataggcattcattctccacccttccctctccaaccttcaggctaaaatctacttccttttctctcttcctgcttgttggaatggcaggagataatttagcatagtaaatctcaattaagcctttggctttagcttaaagctt

SEQ ID NO: 195478 - DNA, 1000 bp, Homo Sapiens
attccacgcaatgctgtgcctctagactcattacatattctgtttcttgtaattgaaatgttcatctgacctttcttctttgtccattgaattgttattcacccttcctaactttgcaaaggctttccccattctcctcacaccacatttcccatgcccagctttgaatattgcacttcattagccaatgagtttatatacaaataactcaaaacctgaataacagtggctctcaaccaaaagacaaataagaagtctgaaagggaatcaattcaagactgtttcagtagctcaattttattattcaaaactcatgccttttccttccttcaatcaaccatcatcagtatattggcttttcatcttcttgctaattgactcatggttgcaaggtggctaccagaactctaacatcatgccctcacaccactgttccagttaagtgggaaggagattatcagaagaaacatgtttttttttcatctgggaagtaaatctgcactcacagacatctccctgtgtctggttagccacaactgttccacaagaatatgcccttgtgaatctctctctgtagggcatctgcaaaccaagaaatcagggattgggtcttattcactttggattcctcagactccagcagaacaataaaacaaagttttcctctggaaacagagtttggattcagctgccacacccaacaaaaggcaactggtatacctgggatcaagaccaggtcccaaccatctctctgtaattccagccctttctttccctctcaaataagtctgcagctcagtatccctcagcaatcctggcccactctatatataactagatgatgatagtaaaataactgtttatattttacataccactttgcaaggccttttgtttaaccctaacatctaccctgaaggtaaatagtatgatccctattttacagagaggaacagaggctcaaggagggtaagtgtagttgcccgagtccacgaagctt

SEQ ID NO: 195479 - DNA, 1000 bp, Homo Sapiens
aaatccagtgaattttgtgatatagtagcacacagcaaggaaaatttatagaggccactaaacatttaaattgtatctgaaaaaatgagaagatatgatccaaattttaaaaatgaaacaaaggcccaggtaacgagaacttattgtctataaattagtctcattggggtacagaatgctaatgttgtagtgaaaaagagaaaaagctgaagaggcaagcagagccaggtaggataggtcttttaggccaatttaagtaagtttttcttaatctaagggcaactagaagccacagaaccattttaagcagcagaatgctggtcagagaagaattttacaaagaccactgactgcaatcttgagtttaaccagcacttcagtgaacagagttgaaactgattcaaatatcaaatatactcttatttattcaataagtgaattttaaaccactatggaatagaatgctacagaaaggtgaaataaggtactgtgctgctctacttccttaactgagggcttggaacaatcactgttgcaagtcaatttaaacaaccagacaatcagaccatgttaaagatgagacctctaataataaaaaatcatagttgattctcactttatcataaaatccaaaacggacaagtatgggcccaaattcatgcagttcactcaacaactgtactcttacttctccattgtaggctaaacaaactgtcataccccccccccctttttatcctgcttttttgcttgtttttttttaattttttatttatttaggttgggggagacagggccttgttctgtcacccaggctggagtacagtggtgtgattatggctcactgcagtctcaaactcctgggctcaagagattcccctgtctcagcctcctgagtagctgggactacccatgggcaccaccacaccagtctaatttttttttttttttgagacagggtctcactgtgttgcccaggctggtgtacagtggcatgatc

SEQ ID NO: 195480 - DNA, 1000 bp, Homo Sapiens
ttacaggcatgtgccagcacacctagcccaggttttcattttaactaaagggtcaaaatgatgacacagacactccattttgagcatgcacttgttaaagaatggaattaaatttcacatccgtaacaaatgaataaaacatccaatgtattagtttgctagagctgacataacaaaataccactgactgggtggtttaaacagaaatttatagtcttacagttctggaggctagaagtccaagatcaatgtgtcagcagggtaggtttcttcttagtctctcctggccttgtagacagccatcttcttcctgtttcttcacatggtcttccctcttcatgtgtctttgtcctaatttccttttcttgtgaggataccagtcatgttggattagggcctaccccaatgacctcattttaactaaagtatctcttcaatgaccttatttccaaatatagccacattctgagtactgggagctaggacttcaacatatgaatggggcaggggaggggacacaatttggtcgataacatccaaaaaggcattaataatatcatatggattatttgataccagatctttaccttgatacaaatgctgttctccaagtttttgtttaggggctaggaaaggaagagagattgagaatacgaaagctcctctctgagaacagatccagaaaaacagcatgtaataaagatttggctaagcccactctcaaatatctgtcctggaaggacaattcacattgatgacaggaaagctaatataaagataactttggttatttaactctttgtgagcctccgtgaggatgggcaactttgctgaagaatctgtttcaggctgatcttttttttctccgttaacaattcttagctaaagttttggtgctttactgaagaatggaatctcatttctggacatggttgaacagctgtttctgtgttctttctaatttcagtgaggcaaggctccaaaaacaaatagaaagctt

SEQ ID NO: 195481 - DNA, 1000 bp, Homo Sapiens
taatgggagagaggtattagtgggaaacaccaccctccctctccactaatcccagcagtttcagttaacctgtgggacacattatactgcttctccctgcccctgcccacagggatgttgactgaaccagatttttttgttgtcaaaaaagttcttttggccaggtgtggtggctcatgcctgtaatcccagcactttgggaggccaagccgggtggatcacctgagatcaggagttcaagaccacactggccaacatggtgaccgtctctacccaaaaagacaaaaactagctgggtagtcccagctactcgggaggctgaggcaggagaattgcttgaagccgggaggtggaggttgcagtgagcaccactgcactccagcctgggcgacagagtgagactctgtctcagaaaaaaaaaaaaattaaattaaaaaatatgtgaagtcttctcagaaagattattggataccaaaggtactttctggcttcaggcctgtggcccttggggctgtccttggacaaatgctaggaggtccttggaactcaatgcctgtttataaaagggtggggggtggggggtgggggtgttacagacagcctccaccaggaagcggcctcagcctagccatattatctagaaacttccactgcctgttcctgttactccactccttacccttcaagtgccccagacacaactatatcccctaatgttttctcccctctgattctcccagcctttcaaccccatttcttcccattccaaccccaactaggagcatcctctgtcccctagtctattctccatcatgccctcacttacagctcccattagctcaaggcaaaagctgcttgtccctcccctcccagtcactcgctcccttgggctataaatagcatagctgtgccttagatcgtgttgagagctttaagacttagtcccccttccccccatcccttcccctttaacacaacagggagaacaagcctaaagctt

SEQ ID NO: 195482 - DNA, 1000 bp, Homo Sapiens
gttggaccagcattagacagtcagatgaggaagggaatgttctgtgaggcaaacccaagccctaagcttggtctgcatctgtgacctggttctgcaactttggagagatgcacaagaggctacgtgcatccaaacagcctcgcaatcagaccgcacgagatcatgcagctcacaaatctggacagacctgaaagatcgtatctcgaacgaagccactgaatgtcgctggctcccatgcaggcccgagcagggaacagccggcaaccacacagttgcacacaggctgctggctgtgccctaggaccggcccggaatccagctggggcttctccttctctcttgagaaagtccccaggggctgtcttcagcagtcctgaacttgggaacctgggctgcatgctgaattaagaactcacagtgaaaactctgctaatctgtaaagtcaatttgactctttgatgggcagagaaatttggcttgctttatttatttctttattttcagacagagtctcactgtcacccaggctggagtgcagtagctcaatcatagctcactggagatttgacctcttgggctcaagagatcctcccatctcagcctcctcaatagctaggactacaggtgcacgccagcatgcccagataattttgttcatttttttgtagagacagggtctcactctattgcccaggctggtcttgaattcctgaactcaagtattcctcctgcctcagcctcccaagtagctcagaccaccagtgtgccctaccatgaccagctatttttttttttttttaattttttgtagagactggggtctcactgtgttgtctaggctggcctcaaactcctgggctcaagcaatcttcctgccttggcagcccaaagtcctgggattacaggcataaaccaccatgccaggtgccaggtcagagatgtggttttttcaatcccagggtcaagaaaccagaattgcagccctggctctgctgtcaaa

SEQ ID NO: 195483 - DNA, 1000 bp, Homo Sapiens
gttaataaagttttattggaacacagccacattaattcatttacatattgtctgactacttttgtgctgcactagctgagttgagttttttgtaggagagaccttttgtggcccacgaaacctaaaatatttataatctggccttttattatagaaaaagtttgttgagccttctttagagtgttatgagcactgactttttatgacctcaatcacacatgcagtttccttaaattccttattatatgtttaaaagttaaattagctgggcgcagtggctcacgccagtaatcccagcactttgggaggctgaggtgggtagatcacctgtggtcaggagttcgagaccagcctggccaacatggtgaaaccccgtctctactaaaaatacaaaaaattaaccgggcgtggtggcacatgcctgtaatcctagctactcagaaggctgaggcaggagaattgcttgaacccgggaggcagaggttgcagtgaactgagattgcatcgttgtactccagcctgggcgacaagagcgaggctccatctcaaaaaaaaaaagaagttaaattttaagtggctgtataaaggattatgatgatgcctaccttgaatggtaaacttttagatgtaacttttcagttatttctgctgaaaaatgctaaagtgatgtgctattctattgaaagccaagtgtattgatttgctaggcctgccataaagtactgcagactgggtggcttaaatgacagaaatgtattttctcacagttctggaggctagagtttcaagatcaacatgtcagcaggtttggtttctcctatcacccctctccttggcttgcaattgttgccttctctctgtcctcacagggcctttcctctgggcatgtattcctccctggtgtctcttcttacaaggacatcagtcatagtggattaggcccccccaccttgtaacttcatttaaccttgattacctctctaaagcctctatttccaaa

SEQ ID NO: 195484 - DNA, 1000 bp, Homo Sapiens
atattaactcgacatggggcagagcaagtcattcatattaattctttttaatttgacatatgtgatggacagcaacaattcaggaacatttttgtctttttcttcagtcagactgattcaagtaagctctactaggtacactggaataaatcgatttaaatccttagaaaataggctgggagatgaagcacacttgaaaaatgcataacaaatatactggtattgtgctttttctgccgatatgacccaagaacattagtgtcgttgtacagatcttaaatattttcattagtaccttgagattctagacaaaggatttcccttcctcaaaacatggaggttcagtttatcaaacggtttagcaaatgcaatagtttatattcaaaagccgtttctagagcacttagctccttaatatcgagtgctgctgatcattttctgtaaatgggactaagctcttttaaagccaagatgaatccattgtattaggtatagtttgggataccatcaaaatacaccgtgacatataacattttgttaattttgggggtctcattgaagagttatatagagcagcagtccccaacctttttggcaacagggactggtttcatggaagataatttttccatgttgggggagggggcaggggatggttttgggatgattcaagcacattacatttatggtgcactttatttctattattataacattgtaatatgtaatgaaataattatacaactcaccgtcacgtagaatcggtaggaaccctgggcttgttttcctgcaactggatggtcccatctgggggtgatgggagacagtgacagatcatcaggcattggattctcataaagagcatgcaacctagatccctcacgtgtaattcacaatagggttcatgctcctatgagaatctaaagctgctgatgatctgacaggaggttcaggtggtaatgtgagtgatgaggagtggctgtaaatacagttgaagctt

SEQ ID NO: 195485 - DNA, 1000 bp, Homo Sapiens
ttctgtgtccgtgggtaaggctgcagctgctgattatgctaattctcgcttacttgcaaataggcctgtgtttattttgtgcctcaccagctgtcaacaaagacattttaggaataattcccacatttaaaggcagactttgttctagtgtcccactgtgagctgtcccagcattagacgcttccagggtttgtgtggagagctctgaggctaaaacagtgggcaaaatcccagggcagcattctctgccaatttgcccatcgcctgctctgtctcccttcacctgtgaatgatcttcgccttagtgggaactctcgcccagctttttcgagaggaacctgaagcactactctaacgggctcttcatagatttgggagatgcctcattttaccgtagtcagggaggttgaggctttcattgcttcctaatcggtttgagaaaacaccttctcaacttggaaattctaacgatcttcagaaagcctgttttaccgttccaaaggctttgaaatgcattcttatttagcaatcagaagggaaagcaaacgacattttttaagcaaatagttgtgttctgaatcttactttagggttatgttctatttatatgttatagtccagatttaattttatttgattccatggaagaagtagaggaatttttagtttgcttttgcaactgatgatacttcaaataaaaaagggaaaaaagtaaatcaaagagcatttaattttccactagtgttttttcctaaccattgtctctgctcagccatctttttagttaataagtgaatttggatgaagtaatgtttgcatgagaaatactttgacactcatgtaaatcaaggaaagcatgcctctgttcttggttttggttcactacttaaattactctaaaattatgtttacaggctccatctcaattttctcaagccacaatgtgaggagaggaaaaaatctacatgcttgggattttcttgaaggaaaccacaagatc

SEQ ID NO: 195486 - DNA, 1000 bp, Homo Sapiens
aagactgtgggaggaagggtacaggaaataccaatagcttacttttttgagtgcttattatgtgctgaatactggtttaagggctttgtacagcaaatccaatgaaatccttacaaattccctatgaggtcggtactattactagcccctttttatggacagaggaatctgaggtataaagagatttaagggccaaggtcacatagatggcaagtacagggccagaactcacaccagtttctgtgtgtatgtaaaatgactgtgggaggcataaactcaccttttaaaaggtgagtcacggaaggaaaaagaggagagtccctttgtttttctgtattatgtacttttgaatcatttttagtttttttctttttggattgagcttgtacttccattataatgttttgagatggggaaaggctcttgatagaaaatttaaaatttactaaggaacagaaagctctaaaacaaatcactagcctgggcaacacagtgagacccatctttaccaaaaaaacaaacaaaaaactggcccgctgtgctggcacgtgcctgtggtcccagctactcgggaggctgaggcaggaggagctcaagttgggagctgcaggaagctatgatggtgccactgcattccagcctgggtggcagagtgagactctctcaaacaacaacaaagaaagcattaaaacaaaacaaaaacccacctcattcagggcaataattactattttgatttttcagctcacagacctacattctgcagtcttgtgtatttgagcttacaatggtacccattaaatttggctaaaacacttgggttgctgttttccctaaagaaacactattaagtcacatccccaaaactaacttagtggtcatgacgcatattagtcagtgtactgaaaattaagtattctggcccattaaaatatataaaaaattttaaaggttgtttctgtgcctgtggcatcttttattatctaattaactaaggatc

SEQ ID NO: 195487 - DNA, 1000 bp, Homo Sapiens
cctccaaatgaccacaacacctctccagcaagggctcagaactgtgccaaggctgagatggctgaaatgacagaagtaagcttcagaatgtggataataacaaacatcactgagttaacgaagcatgttgtaacccaacacaaagaagctaagaattgcaataatacaggagctgacaggcaaaatagccagcttagaaaggaatgtaactgacccattggagctgagaaacacacaagaacatcacagtgcaatcacaagtattcacagcagaatagaccaagcagaggaaaacctctcagagcttgaagactgattttcagaattaagacaggcagacaaaaatagagaaaagagaatgaaaaggaatgaataaaacctccgagaaataggggattatgtaaagagaccaaatctaagactgattggggtacctgaaagagacggggagaatggaaccaagttggaaaacatactttaggatatcatccagcagaactttcccaacctagtaagacaggccaacattcaaattcaggaaatgcctagaaccctagtaagatactccgtgagaagatcatccccaagacacataatcatcacattctccaaagtcaaaataaaagaaaaaatcttaagggcagtcagacagaaaggccaggtcacttacaaagggaagcctatcagattaacagtgtacctctcagtggaaaccctacaagccagaagagattggggaccaatattcaacattcttgaagaaagaatttctaacccagaatttcatatccagccaaactaagcttcaaaagtggaggagaaataaaatcattttcagacaagcaaatgctgagagaattcatcatctctaggcctaccttgcaagagctcctgaaggaagcactaaatatggaaaggaaaaacctgtaccagccactataaaaacacactgaagtacacagaccagtgacactctgaagcaacaacataaacaagtctg

SEQ ID NO: 195488 - DNA, 1000 bp, Homo Sapiens
aacaatgctacacgcaggaaagtagataatataaaatattaaaaagtcaggttccaactacccatgagtatttcagagagatccagcaggatataacttaggaggaaagttccattgttcagaagcttcaagccaattaataatttatgcttttcacatcctcatgttctcactgtctcccacttctgcctcctcttctaaggattattatctcactgacagtttttcttcccagcctctgtattactgcaattcctattaaataacagaaaacgatttccccttcacattgaaaactgttctttgttgtgttttgagacacagtctcactgttgcccaggctggagtgcagcggcccgatctccactcacggcaacctccgcctcctgggttcaagcgattctcctgcctcagcctcccgtagtggggactacaggcatgcaccaccacacctgtattttcagtagatacggggtttcaccgtgttaggatggtctggatctcctaacctagtgatccgcccgcctcagcctcccaaagtgctgggattacaggtgtgagccaccgcacccagctgaaaactgtttttacctcttttcttttactaaggaattcccaaattgggttgtatgtcagtcagctgaaggagtttttaaaattacatcctagatacactgaacaagaatactggggtgagaagctgggtgcagtggctcacgcctgttatcccagcactttgggaggccaaggtgtgcagatcacctgaggtcaagagttagagaccagccttgccaacatggtgaaaccaaaatacaaaagaatagccaggtgtggtggcaggcacctgtaatcccagctactcgggaggctgaggcaggagaattgcttgaacctgggaggcagaggttacagtgagccaagatcacaccactgcactctagtctggttgacagagtgagactccatctcaaaaaaaaaaaaaggatacggaggtgagatc

SEQ ID NO: 195489 - DNA, 1000 bp, Homo Sapiens
aatttcatctttatacttaatgttattttattaaataatcagctatttaaagggaaacaattattacataagctatacattgcatgtagcaatgaattatcacataactacagatatgaggaagaccgtattgtctcagaagcttgatttgggctcagagatataagcagcatattaaacccatttctcagaagcctgtgtacactaaagcagagattccaaacaaaggaaacagtttttttctattttaacctaataatgatattcatttcagcagatccttagggaaatctaccagaaaaaacttgctcatcaaattcgggtttggttgaaagtgataaatgttggtggcacatacagggctcttttacatcccatggagccttgatgtggcctcagattcatcacaacaccctgctctggtcattcacctcaaaacatctggataaatacgtggaatgaaatctattttctatccctgtaataaagtcctgttacttgggggaaaatgtttgtaattcacactgtactcattcaggctggtccatctgttgctggtctgattagggatattggtcttttctttaaaacattgaggtttttatgtcttaaaatagtccggccaccagacactacagtctagaaagtgaattcgtaataattatacttcatgtaggaagttcataaagaagttaccagtttatttcttataaatcaggagcctctggctgtcactcaggagactgaaatatgttcatcttaaggtaggtatgcttaactgtttttaagaattccaaaagtgggccaggtgcagtggctcacgcctgtaatcccagcattttgggaggccaaggcgggtggatcacctgaggtcaggaatttgagaccagcatggccaacatggtgaaaccccgtctctactaaaaatacaaaaattagtcgggtgtggtggtgggcgcctgtaatcccagctacttgggaggctgaggcaggagaattc

SEQ ID NO: 195490 - DNA, 1000 bp, Homo Sapiens
ggtgcatgcctgtagtcccagctagtagggaggctgaggcagtggaattgcttgaacccaggagacagaggttgcggtgagccaagatcgcgccactgcactccagcctggcaacagagcaagattctgtcggggggaaaaaaaaaaaaaaaaaaaaacaatcccaggagcaaagctaaaatgtagcaaatcttcatcccctttcagcttttacccagctcaaagtgtcagagattctgacatctcctggaattacaaactaagagagagaaagaattgtgtgtattttttagcattatcctatatggtctctcaaatcatttttatatgcttcaattaaccattgtacagaatatcgaaaaatctaaaacttacccctttcttgagctccctggaatacactaaacttgcaagaattgtagcttttctcagagatacttttggataaataatgactactctaagaaatggcattaccagtttctcatttgctcaaaagatgaaagtatttgtattaacaagttgatgagacaaggagagcggggacaaggcagagaaaggacagaaatttaagctttcagaatttttagctgtaggatgaggtctaatacccaccctgcttgagattttcctaatctgctcttatgcaagctgaaaaaatagcgcctgaccaaaaaaaaaaaaaaaaaaaaaaaaaaaagcacctgtctcttgaacaactttgtaagtcaacaatcctgccaacaactgagcccaaaagaagtatatttatttcagcaattctgagacttcccaacatcaaatggttttattttatatggcagaaaaacaccagaaatgactacaaatgctgattctgggtttatatctcattcgaagtgtagcatggctagttatccttaacctgatccatagaaatagaagatattttctgaattacttcccatttctttctgaaacacacctgagctaccctccctcatgttgacttgagagtaca

SEQ ID NO: 195491 - DNA, 1000 bp, Homo Sapiens
aacaaaaataagcattctgcccagaattgagagagagagagagagagagagaaaagctctctcctaaaatcccacaagtttgctgccagtgattcagtacatacctgaccaaaaaaaaaaaaaaaaaaatgttgcttaactggtttggttgtttcagctggctactaccaagagaagtaaacaggaccttatcatttcagttaagtctggcttgagcattattttcaagtaaatatttataatttcaatgctattccattgctaccactgctgtctttggattggaccgactgaaacattgtcttggattagcccgactccatagcaacaggccaggagaggctgcaccctccttgcctgtcctttctgtggctggggaggagaggaggaggtatttggtgacactcgccatcaggactttgcagctctcttgccagatagcagctgaattgaagaatatccttcctttgccatttgggctccagtccatcaggatttttgctgatcactttgcacatctcaatgaatttgacacacgggcatttttttctctctctctctctcctcattcaggaagtggagagctgagccctgagattctttctgctccgatgatataaacaaattgtagaggaagtcaagtcaaactttcccttgcttcttttgttctcccaaatagcaattcagaaaacagagccaacttttcttggatgacttttaaagattgctctttaactagaaaggcagaaaccctcttgctttattttgtatctgtaaaaacaaagattctcctaaacatattttgttttcaaaaaagcagaaatgccctagaagttaaaaaaaaaaaatagctgttttctgagacttttcaaaccaaattgctcttttgtcattacacagttacctaattgttttttctttccttgacaaatctccaggctaaaatacaaacaagagagcaataacgatctttgcgtggataatagctaaacctgaatag

SEQ ID NO: 195492 - DNA, 1000 bp, Homo Sapiens
aatttaatttcctgcgtaaatcccacattggagcttggaaatgagtttctggagaaagcctctacagaaaactgttttgaaaatgtctccccagaatcttatttaggagttttctatttctgaacatatctcaagttatagatattatagagtggcagacgactgatgtaaattcagaacttaaggaaattgtgaagaaaatgagaaaacaaaacctattttaaaagaaaattaaattttaaaacatgtttaaaagaaatgcgaagaatataagaagaaaatatatttggcataattacattcagaacgtggagactgtggtttcacatacacagacacctttttatttatttatttatttatttatttatttatttatttatttattttaagaaatggggtcccatctctaaaaaatgctcaaactcttggtgtcaagtgattctcccacctcagcctcctgagtagctgcgattataggcatgcatcatgatgttcggcgcagagactgtggtattatattaataatttttttcaaggaagaaaacaaaccagatctacgctgaatgagttctgaaagctgactgaaagaatcctgttaatctagaaggatgagaagaaagattgcctgtaaaaaaaaaaaagaaaaaaataccaaaatgaatctccctcattgctgaccactgagattcagccttcttattcagaggggagtacgtggtgacccctgaattatgctacaccaattcatcttaaattaagggtaatttgtacaaagacttcggaatttttaaggaggagtgattcctactgtcccagctatgaaaatcagagtttccagcattgtagtccaatctcttagtatgtttttctaattccttgagggcagggaccaactactgaatccctccattactcctggatcccataacacccaatgcctgccacgtgacagacacatacttttcctttctcctgactgagccagatagttgaattc

SEQ ID NO: 195493 - DNA, 1000 bp, Homo Sapiens
ggcaacaaagtgggaccctgtctcaaacaaaaaaacaaacaaacaaaaaatagtgcttgtctctggaaagtggggttggagggagaactatcatttttacttagtgtatgtctatgcttttgtaacttttttaaaaagaatttgtaaagttctcaaccttaaataacagaaaactatccattatggtgacagactcttaagagtcccagacgcaacctaaatgatgagggtgcagaaatcaaactgtaccaaaatatacttacaaaatctgtgtgcctgagcgtagcatcagcctcaggtcactcagccagctgcctaccagctaccaccccaaacccaggtcttctggttccaagtccagtgctctttctggtacatcaggcacttttccaccaaccatgagaatattcacttgtcagatttggggaagtttcttcgaactgccagaataaaaatgagagtggaaagtaacttgaacagtagccttccttcatggccagcttgctaaaagttggttgcctaaggtctatgaaggcacaactaggtgacatgctgcccttatgacagcagtgccagccatggatgtaagcaaacagtgagcaaaaacataccatgatcttaaaactgaacaagctggtagaaaataatttttctactagaattgggttgcataattaaatagcataaattatccccaaagttagtgaactggtcccaatcagataagattcttttttgtttttgtttttgtttttgagacggagtctcgctctgttgcccaggctggaatgcagtggcatgatctcagctcactgcaacctccacctcccaggttcaagtgatcctcctgcctcagcccccctagtagctgggattacaggcacgcaccactatgcctggctaatttttgtattctcactagagatggggttttgccatgttggccaggctggtctcaaactgctgacctcaggtgatccacccgcctcggcctcctaaa

SEQ ID NO: 195494 - DNA, 1000 bp, Homo Sapiens
aaagtgccccaggtaaggatgcgcttggcctcctgagcagtggctaaggcttgcctggtttgtcaggaccctggaagaagtgatctgcaaaggagtttgggaaagaggcctgcgggtggacctaggggagtcacccagtgtgtgagacttttggtatcttcatcgaggcccagccaggaacatccactttagaggaggcactggataagcagatggtcagcacgactcaccttgatgtcagccagccgccgtcctcagccagcccagtgttcacaccatgggcccaccaggggaataactttggtgggagaggtagaggttgtgaatgtgcctgacagcattggatcactaaggctaatttgactcctgctctgcctgtcagtagcagacactaatactgggctccatgacatggtacaacctctttctttttttttttttttttttttcgagatggagtctccctttgtttcccaggctggagtgcagtggcatgatctcagctcactgcaacctccgccttcttggttcaagcaattctgcctcagcctcccaagtagctgggattacaggtaactgccaccacacccggctcatttttgtatttttagtagaaacggggtttcaccatatcagccaggctggtgtcagattcctgacctcatgtgatctgcccgcctcagcctcctaaagtgttgggattacaggcgtgagccaccgcgcctagccaacatggtacaatctcttgagaccacttaggcacttggcagcaagtcgattatgttagagactttccaccctagaaatatgtggcagtgatttctttgtgaccagaattggtatagcttccagatacgggtttaaattttttgccactactatctaagggcacacaaaatgcccaatttattgacaggagatcttgcaaaacgctgccttgcatgatggggctcacttcatagctaagtaggtgcaacagtggacacatcaccaagggatc

SEQ ID NO: 195495 - DNA, 1000 bp, Homo Sapiens
actttttcctctgtttaataagctactaataaaatcctcataatactatttttagtgaatttttccatgatgtctgatgttctctggtaaccttaaaatgccagagaaataaggattctcggggtttagtataggaaatgaatatggttacctattgtgacaccacaaaataaagatgtagaaaacacagtttaggaaaactatctaggcttagaattaaacaatgtctgattcagagtttttttttaatgcaaaacagcatacgtacatgtacatacacaaacatatgcactcaaacatgtatgtgtgtatgtatgctttatataaacaaattatgcatatgcatataccttcacatgtaaaaactggttaaaaatttttaatagaggaagctaaatttggaaggaagcaatcctgtgtaaatactccacttttagggaatatcatagctaactttaatatatttgagtataaagtacccaaattcattcacgtattttcattcacataattcactgctaattaaaatcaagtagaaaattaaaccacacaacaaaactattctagcttctctaccaattcctttaagttcagttgcagttcattttcagaatcttttttggccaactttataggcattggaacaggtatacactccattgattgttttgtgctaattattactaagtattcaatttggcaccattcaaatacgatagagcgagacctagtttaaggtggcagttaacagaaaagataaaatccaaattacaagagaatatcctgaatatccaccaacagatgctaaagtcgtctccaatcagaagaggttttttcaatcttcagaactggaaaggcagttcatatgtaagtattttcaataattggcatgtggatttagaatgagactttatcattaaagcttgcttaacaaattttttgagcaaactaagaattcttatggaggacaatcatctactgtttcattttatgcttgatc

SEQ ID NO: 195496 - DNA, 1000 bp, Homo Sapiens
gctcactgcaaacactgcttcccaggttcaagagattctcctgcctcagcctcccaagtagctgggattacaggtacccaacaccatgctcagctaattttttctttctttttttttgagatggagtcttgctctgttgcccaggctagagtgcaacagtgcgatcttggctcaccacaacctctgcctcctgggttcaagtcattctccagcctcagcctcccgagtagctgggattacatgattaaccatcatgcctggctaatttttgtatttttgtagagacggggtttcatcatgtggccaggctggtcttgaattccttgacctaaggtgctccacccaccttggtctcccaaagtgctgggattacaggtgtgagccactgtgcccagtctatccactttaaattgtcctattgtcaacaattacctggccctccaaattctactctcaacaggcacgattccaaatgacaagaaatgatatcattactgttttgtcacccttaactcgtagatttatcctcccagggacacagaacaagagctggtgccattatctgtctcagtacaataatcaattccagatcctccatatgttcctgtgggttaaaggcctaccatttaactctccggcctccatttctgtaattagtcagtcatttggtcaccagcaatagaaacccattttggctgacaaaaaggaaacttattttaaggaggctatgtggtagtttatacaatcaaaggaaaacttggacaaccaggcttggagaataggagccagcatactttggagatctcctttcataaacttttaaatggtttctttagaacactacgatcagaatgactcaactctgatcactttgtggtcacctttcttaagaatcaaagtccttgtgggacagaacgagcttgcattgctcaaacctcagccagggggcatgaggccggagtactgtcatctacatttccactaccaccacacagaatgg

SEQ ID NO: 195497 - DNA, 1000 bp, Homo Sapiens
cacaggtggacaggagtgctcccaggctgacaggtggacaggagtgctcccaggctgacacaggtagacaggagtgctcccagtctgacaggtggacaggagtgctcccaggctgacaggtggacaggagtgctcccaggctgacacaggtggtcaggagtgctcccagtctgacaggtggacaggagtgctcccaggctgacacaggtggacaggagtgttccaaggctgacagatgggcaggagtgctcccatgctaattttattggcactcttgtttattataataatgtaagctttcttataatattaataaatgggcttgtgttttagtttatcatggaactgaaattcagaaacttaactcagacattgtcatggcatatattttaaaacaactattttttttaagaaatgctgggcctggcaaaggcagtggtggacagagaggacaagggagagagaggacaagggaggcgcctggctgggaggagcaagcagcccccctcccccattagctcccacccctccgctccatgccttgcaggcaggaactgtgtggcagcaaggacagcttcgagatgtgcccactttgcctcgactgccctttctggctgctctccagcgcctgtgccctggcccaggtacgagaagaggtgggtggggtaagggatttgagagtcggggatgaggagggcagctccccttgtcctggtcctgactctgcctgcaccagcccctgtcctgcttgtcaccagctaaaggcagaacgctccatgagctccttaacctttgttctcttgcctggaactggggttacacccggcacacacctcccagcacttggcagagtggcccatgttagtgcttcccacttgaggacaccccacaccaggactctagctctggcactctgggggcacctggcccttggctccaaggcggacaaaccctggagaccccagggcacaggcaaaaccaaaggttttgagcagaattc

SEQ ID NO: 195498 - DNA, 1000 bp, Homo Sapiens
cgcagtcgtaacgcacttccggcggtctacgcgaggaagatggctgcatcccagcagcaagcttcagcggcttcctcagctgctggtgtatcgggtcctagttcggctggcggcccgggtccccagcagcagccgcaaccgccagcacaactggtgggccctgcccagagcggcctcctgcagcaacagcaacaggacttcgatcctgtgcagcgttataagatgctcatcccgcagctgaaggagagtctacaggtgattggccttaagcagcgagaagcaaactggatttggtagtctagaggggcaggccgagggccaggttagtcggagagagcgctaagcagaaagaggaatagaacctgctgttttggcctggctggtgcacgcctgtgttcccagcactttgggaggccgaggcgggcggatcacttgaggtcaggagttcaagaccagcctggtgaaacctcgtctctactaaaaatacaaaaattagccgggcatggtggcgcgcgcctgtaattacagctactcgggaagctgaggcaggagaatcgcttgaacccaggaggcggaggttgcagtgagccgacatcgtgccattgcactccagcctgggcaacagagcgagactccgtcaaaaaaataaataaataaataaataaaactgttgttttctgcgagacctaagcgaagctcggcagagatgggatcagcgctgatgctgaggctgggactggccggagcttgagtgaggggttgtttaaaggagaaactgggctctggtcgttaaagcctgaggagagtactggcttatacggagattctgcccttgattgataggtgagggaggacccttaggttattggcgagaagctcaggtgagagcgggcctctgggaggatggagtggtgacagctataggaatggaaacgaatattactttggaaagtcaggagggaaggtgccagttgaaaagaaaacctgagactgagtgatc

SEQ ID NO: 195499 - DNA, 1000 bp, Homo Sapiens
cagtaaaaattaacccccacatgcaaatataaagaaaatgataatgagttttaacagtttcatatgaataattataggtagctgtatacatacttttaatcaccgtttcaaaattgtatgcaatctaggcattcaatgcaagaacatccctcttcactcattcactcatgaggacactcataccacagtgtcctcattcataaagacgggaaatagtccagaaccggataaagtgaatactagtataggagcagtgcaccaggcaagaatccaggtctccaaaatcctagattgggactctgtcctttaactgcactttctatacattaaaaacaaaaagttctacctgactctccaacccatgagtcagcatgtagggcagcataaacctgtggaagaaaacctaaaactgaggaaacagagggctctttttgtctattcctaaggtgctaaagcgctcctccatatactgcagaccagggatatattcctaaccaagctgtacaacaatttctttgcacatttctaagagactgccagaaaacattaagtaccccacctcctcccacctcttattcaggaacagtatagaacacagaggtgttgggagggacaatataggaaagaatcatgttcagaaattataaaaaaataataataaaattatagtttaacatcaaagcatgcaaacaacttctgttctcataaaaaagttcacaatgtcacatcacgccactgtgtacaatacatagtgtgtacttacaaggcaagttagtatcaaaaaatacacaaggtggcattttgtcttccaaagacttcgaagtatctgtcaaatgttcttgaaagggatgaaggcagtcaattaaattcttgagcccattttacagaaaagaagccagaggcacaaagagatatagaagatgtatttcatgtgacatgagaataagcagttgtttaaggaacagaagtaggttctctccgtttcatttttgaggaattc

SEQ ID NO: 195500 - DNA, 1000 bp, Homo Sapiens
atagttcattctttcacaatagtttgagaaatgttttcccaaagtcaaatttgaatctctcctagtgtgatcatatacccttcctaactggcctttcagtaatgaaaataaagaataattgggccaggcatggtggctcatgccagcactttgggaggcccaagtgggcagatcatttgagcccaggagtttcagaccagcctgggcaacatggtgaaaccccatctctacagaaaaatacaaaaactagctgggcatggtggcatgctcctgtagtcccagctactcaggaggctgaggcgggaggattgtttgaagccaggagattgaggctgccgtaagccatgattgtaccattgcattgcagcctgggtgacagagtaagaccctgtttgaaaacaaactaaaaagaaaaatttttgataaatttgaatattctgtcaattcttttgttattctgtcccttctcctccaaaaaagagaagcaatattcacgtccaatgttgtcaacactccataaacggtcaaaaaacaagcagtgtcaagctccctagaggtggtgggagtctcaacaggtagccagagcatgggaacagggatctgggacaaaagtgctcaaagttggtaatcaggatgttggcattctattataaagaggtccgctgggtgtggtggctcacgcctgtaattccagcgctttgggaggcccaggcgggcagatcacctgaagtcaggagtttgagaccagcctgaccaacatggagaaaccccatctctactaaaaatacaaaaatagccaggcgtggtggtgggcacctgtaatcccaactactcaggaggctgacgcatgagaatcgcttggacccgggaggcgtaggttgccatgagctaagatcatgccactgcactgcagcctgggcgacagagcaagactctgtctcaaaaaaaaaaaaaaaaaaggtcccagacaccagactggaatgtaagggccagaaagctt

SEQ ID NO: 195501 - DNA, 1000 bp, Homo Sapiens
gttggtgggatcagggtggtgggtgaggcgtggcccctgcaggccagggtctccagccccagccccacagcccacagctgcacgtcgacccatggctggcgggtggctctgacgcctgcctccggtgtgttccttgaggcagcgtttcggccgcacggtgagggcggcgctgtatgcgcctaaggagccggtgctggactacaacatggtcatcatcttcatcatggctgtgggcaccgtcgccatcggcggctactgggccgggagtcgggacgtgaagaagtgagtttcgcatcgtgcgtgtgctgtgacggggtcgggcggctctgacacgggccgggacggccagtcttccagaacagcagtgagtgctttggcctcggcaggcacggctcgccccgtggagcccttcgtttcttcctcaggaggtcctgggacagaatcagtctcttttcctgccagggtgggctccgggcacctggtgggtgtgtagggctgggcaggtgtggatgtggcaggtacgggcgtggcaggtgcagggctgggcaggtggctggggccagctaccctcttcctgctgagccgcctgggtctggggaggccccatgtccagggctctttatgcagatccaagctgcggttgctgcccacacgccagcctctggcccggcctagtggccaccccagctcaacccagggacgcgggccctgccaccctctgctgtgtggtctcctctgccctggggacgttcggggcggttccttgcacttcagtcccccccgggtcccctcctgctcccgggttttctgccccgttcccccgggtggctgtgggctcccgagccccgtgtcggccagccggccccagggccccacgaccccatggtgtctcccaagaaggtacatgaagcacaagcgcgacgatgggcccgagaagcaggaggacgaggcggtggacgtgacgccggtgatgacctgcgtgtttgtggtgatgtgctgc

SEQ ID NO: 195502 - DNA, 1000 bp, Homo Sapiens; identical to SEQ ID NO: 114823

SEQ ID NO: 195503 - DNA, 1000 bp, Homo Sapiens
ggaccgcggggagctgaagctgctgcttttgggtgagtccagggtcggtgggcggtgggtggtgggcagtgggcggtggccagccggcaggggtgtcggggcaaggaggcggatcaggctaggtcagacattggcatcgtggagccgtcgcctcctcccagggaatggggagcctggaacccattttccagatgagaaagactgaggttcagagaagccaagttccttgtccaacgtgcgaccagcggccaggtgcccaggcctgtccactgtgtggggcatatacaatagcagacgtggctctaccgggcccctgccgggcaggcccagcacgccctacctgtctgtgtcatggcgagggaatgatgagctcaggtgtgcaacccgttctggccagcccacccgtaagggaggggccggctccagcctctccttcaccaggacgctccctctcgcctttacctccctgccatggctggagagggcttgtctagggctcctttgggggctagaaaggatggattgattggttcattggttcattcattcattattcattcatttaagatttattgggtagctcccaggaacgaggcagccaaacaggggaagatatttctgtcttcctggatctcatttcctgtgaaggagccaagacatttagtctgtaaactcataagcagataaaataattctggcaacaagaattatctaggagaaaacaaaacagggtgatggcttccatgcggaggcttcagatgggggagtcgacgtcagtaacggttcaagattctgaactctggctgggtgcagtggctcaagcctgtgatttcagcactttgggaggcccaggcgggtgggatcacttgaggtcaggagttcaagacacagccaggccaacatggtgaagccccgtctctactaaaataccaaaaatttgccaggcatggtggctcatgcctgtaatcccagcactttgggaggccgaggtgggtggatc

SEQ ID NO: 195504 - DNA, 1000 bp, Homo Sapiens
ccctattgcagtggagcaaacctccaagctaggtcaggtctgtctctctgcctgcctgcctggacctagcagagccctttccattgtaacagtccatgcattgcttgcatgttaaccttagatatatttcttctctttggggttttgacggtagaggtagggtgggtgccaggtgcaaaaattaaaaatacctaggaagtagaggagcaaggggagttatctgttggttgatcatcagaatctcaggtgacaacacgcagatgtagaggccagaagaataattttaagagaatgttatgtattctgtttaatcttgattgagtattcacagttgggaaggcactgtggtaaaggcagggctacagaagtaaagatagacaagaattactcttgaatcttccctttctctcctctcttctcatcccaccttttctattccatcaatttctaagtccttttatttctactaatacttatgaatatttgctggatctgcccagcttcctcccctccccccccccctttttttttgagacagaatttcgctgttgttgcccaggctggagtacaatagcgcaatctcggctcactgcaacctccgcctcctgggttcaagcgattctcctgcctcagcctccccagtagctgggattacaggtatacagcaccacacctggctaattttgtatttttagtcgagatggggtttctacatgttggtcaggctggtcttgaactcccaacctcaggtgatccacccgcctcagcctcccaaagtgttgtgattacaggcatgagccaccatgcccagccagcttcctccacttttgtggccatcactctggccttctgtctggatattccagcagttcttcccggtcttcccctccctccaccctagctgtgcgactgtcctctgttccaactgttctgaaattcacccagctttttgcaatgcaacttatttattttgcctgtaagtcctcacacatgtgaattc

SEQ ID NO: 195505 - DNA, 1000 bp, Homo Sapiens
ggagaccctgtcaaaaaaaaaaagaaaaaagaaaaaagaaaagaaaaaaaaaaggcaggcacagcctatttctttcctaaactgatctagaaactccaggtgttaatttggagaaaattccaataggaatagagcactctcgtccactgaggtgagaaagactgggagcagggagctgggccggggaagcccatagcgtcaaagcacaggtcattttcctcatgcaaagaaataaaaggaagatcacattcaatgtggaggcacattctctcccacttgggatgagtcttacacactatacctagttccccaaggggcaaaaaccattttattcagaggaaccaaaagagcagtaattcctttctctattctgttcatgaaaaacagaaacagaaaacccttgcctcactcaggctggacaaggacctcaggctgcaggttaccaggtacccgggcatcaatgccaaatatctacctacccttccatctatctctgccactatcaagaggaaggccagtcaaccaatcaaaaacatctcataatcagcaaactaaaaaattgcttcttgtgggtgggtagactcttcttccttcctttggacacacatctatccaaggaatctaggaatgagctcttccttctgttccctgccaccaaacacactttttttttttttttttttttttttttgagatggagtcttgctctgttgcccagctggagtatagtgccatgatctcagctcactgtcatctctgcctcccaggttcaagcgattctccttcctcagcctcccaagtagctaggattaaaggcatgtgccaccacacccagctaatttttgtatttatagtacagacagggtttcaccatgttggccaggatggcctcgatctcctgacctcaggatccacccccctcggccacccaaagtgctgggattgcaggcgtgagctaccacgcccggcccggacacacttcctccagcacagaaacaag

SEQ ID NO: 195506 - DNA, 1000 bp, Homo Sapiens
cgatggggacgctgagagcagtcagtgtttgtctcgcatctgccctcaccatgcgctgcgctgtgcttcatgcgcagcctctcacttgagcctcacagacgctcccagctggaagctcttatgattccctcttttgcagggaggaacttgagccccgggctaaacagctgggaggtggtgaaagcaggacgtgcgtccaggcctgtgggtctccagagctctgtgggatgtgtttgcaggtggctcctgggtccctgtgggacacgttgtgtggctgccgtctcggctttggccttgcttctctgcctcagcagagaccctgggtcatggatcctgcctggtgctgttttgcctgtttgaagccccaggcatcctcctcgatgctgacttaaggtagagccggctgagaagtccacagaggggagcccctgagggccgtggatgcagatggagctcttcatgttggggtctgccctggcctcccctgcctcccctctgtgcatcggctttcccagaagtgcattccagcctgggctgtgatcgccgcagtttgttttgaagatcccaccttgctgcctccaggcagaagagcccttggcctgaagccacaaggctggcatgtcctggagcacctggccgtgtggtgcttccaggtgcctgggcctggcctgtttcatctactgctgccatcaggggcctgggcagcgtcaggaggagtcaggcccttgtcaagcataagggactcgagagtcattgggtgtgatgagtggatatcaccatgttttctgtcacagacggtgcttttctgagcctcttcctgcctcaggtttctgtcacctcccaagagtgagtgaagatcagtttactagttatgagtctttcctgctgttggtcccaggtggttaggccgtcctctcaaggacgtaacaaggccttgtcacctggcatctgaattatggtgcacttgagtcatccagagaccagcaaggcatacgagatc

SEQ ID NO: 195507 - DNA, 1000 bp, Homo Sapiens
acaggcacataaacaaatatatccatccatccatccatgcatccatccgtacacacttctctcaaacacatccactaacaaatccatgcatacagtggaaacatacaacaaggagacagacggccggacatttgtggagtttattctgggaagcctgcgtggccatagagagtggtttttaacaggatttccaattcttctcctagtagcctttgtaggtaacattgcttccttttctaacggagtgatataaaaaggagcaggtcataagagagctgctgcttcctatgttagtgtatttgtcactgttagttcctagtaagcagcttcttaaaggactcagatttcctgagtttgagagcctaccagattgacagaaaggaggagaaaatcctatttgcaacatggaggagatagcagctgacaaggagcagtgaagccctgggcagaaaagaacagagctaatggaacatggacttgtccctcacactccagagctctgtcaacatatgaggttggtgctaaaacataaacacaagcacaccacctcattggatgcagccgttccttaggcccacagctacttgcctgtgtcccatggacaggaaagactagcatgatgggtgaaaggaaagacttgacggagagatccaggaagtgggccatagatgggattaggaggaggaatgcctacccagtggagttgaatttaaaagaaattcacccacaaaaggctgtctgtcgtgcattggccagctccagtggtacagagttttggtgaactcttgagtcagtgagtcttagatagatgtgctgcaatcatataaagtatgatgtgtagggtaaatggcatggcagattccaaagaaccaaatacacacatgacttctctaagggtaaggcaatttacaggttgaaaagtagttggaaggtcgggtgcggtggctcaggcctgtagtcctagcactttgggaggccagggcgggtggataacgagatc

SEQ ID NO: 195508 - DNA, 1000 bp, Homo Sapiens
gacagaatttaaaaatttttttatactggtgaagtcttggtatgttgcccaggctggtcttgaactcctgagctcaagtgatcctcctgcctcagcctcctgaagtgctgggattataggtgtgagccaccgcaccccgccatccatttctcattgattttcagttgataattgtttcctatactttaacttcaatttttttcaacttcagtagtaagaattttataaacaaacatgttctttgttaccattttacagaggtcacccaacttttcacagaagagagctacttttgattccccaatcctgtggttggtatttagattggagtttaacagttgcttaataagaggtgaatggctgccagctcagcttccctctcaactgggcctccatgggagcctgtgggagaaagcaggaagctttcacaagtctagaatttcatatttgggatagacctgtaattaagcaatcccccccaccttttttttttttttttttttttttttgagtcggagccttgctctgtcacccaggctggagtgcagtggcgggatctcggctcactgcaacctccgcctcccgggttcaagcgattctcctgcctcagcctcccgagtagccgggactacaggcacccgccaccacgccagactaatttttgcatttttggtagaaatggggtttcaccgtgttggccaggctggtctcgaactcctgacctcaggtgatccgcccacctcggcctcccaaagtgttgggattataggcatgagccaccatgcccggcctgtcacattttttttaaagcaatttaaatctaagtgaacctacttctaaaacaggaaagaaaataattcatttcagcaagagattaactgaaatagagtatctccgtttcctttgttttctaggagcaggctgccctctgggggtaagcagtatgccatcaagaaggcttttaatgcatttcatgcattttggcattaactacaagctt

SEQ ID NO: 195509 - DNA, 1000 bp, Homo Sapiens
tgttttggtaccagtaccatgctgttttggttactttagccttgtagtatagtttgaagttgggtagtatgatggctccagctttgttctttttgcttaggattgtcttgcatatatgagctcttttttggttccacatgaattttaaagtagttttttctaattctgtgaagaatgtcaatgatagtttaatgggaatagcattgaatctataaattacttggggcagtatggccgttttcacgatattgattactcctattcatgagcatggaatgtttttccatttgtttgtgtcctctcttatttctttgagcagtgatttgtagttctccatgaagaggtccttcacatcccttgttagctgtattcctaggtattttattctctttgtagcaattgagaatgggagttcattcatgatttgactgtctgtttttggtgtataggaatgcttgcgatttttgcacgttgattttgtatcctgaaactttgctgaagttgcttatcagcttaaggagcttttgggccaagacaatggggttttccagatataggatcatgtcatttgcagagatgatttgacttcctctcttcctatttgaataccctttatttctttctcttgcctaattgccctggccagaacttccaatactatgtcaaataggagtggtgagagagggcatccttgtcttgtgccagttttcaaaggaaatgcttccagcttttgcccattcagtatgatattggctgtgggtttgtcataaatggccctcattattttgagatatgttccatcaatacctagtttattgagagtttttaacctgaagggatgttgaattttatcgaaggccttttctgcatctattgagataatcatgtagtttttgtcactagttctgtttatgtgatgaattctgtttattgatttgcatatgttgaaccagccttgcatcccagggatgaagccaacttgatcatagtggataagctt

SEQ ID NO: 195510 - DNA, 1000 bp, Homo Sapiens
gggctggatgcttttccaatcctgactgtctgcgagtcccccaggaagcaggggttttggttttcaacacccttttcctagtctacccataaggacagaggagcagaacagctgagtgaggctttctctgctccatctagaatagcaacagccacaagcacagtaatagccccaagatgagtccctctaccttcccagcaccccaagccacccctttccaaaccttaccttttggcatcatccttagaatattaaacacttgacttctctcaatgagatgcttggcctggaaaaagtgcatgctgggtgggaatatcagggtcctcatggcctccttcatctcagcgattttgagcgtcatgagcctctcattggccagctcctccttggtgttcagcaccagccgcccccccagccgcatcatcttttctttcaacaacagatgcgcccgtgtttcatctatggatagagctgagccgaagaaagacattgccacagccaacagcaagaagcacagggctggccgctcagatgggccatccaccaacatcgggatgcctggactaggaaagggctcagatggagactccacgggactgcaaaggagagtgggggagtgaaaacctacagatttaagggtggaactctgatcttccttttctcgccctgctctcagattaccagaaggcaagatattgaaggattcttcttccagaccccagagaaaagacctacaggtacagacaggtaggggtttcccaatttttttttttttttttttgagacggagtctcgctctgctgcccaggctggagcacggtggtgcaatctcggctcactgcgagctccgcctcctgggttcacaccattctcctgcctcagcctcccgagtagctgggactacaggtgcccgccaccatgcccggctaattttttgtatttttagtagagacggggtttcactgtgttagacaggatggtcacgatctcctgacctcgt

SEQ ID NO: 195511 - DNA, 1000 bp, Homo Sapiens
tcctaatttaaaaacaggtttattggtagataatccacattctacacaatttgcctatttaaagtgtacaattaaatgatttttaacatattcagagttgtgcaactatcactaaaatcaattttagaacattttcatcctcctccatcctaaataaaccctgtacccattagcagccacttctcttttacctctacccactttcccagccataggcaaccactaacctattttctgtctctatggatttgactactttggacatttcatataaatgaaaccatccaatatgtggtctttggtgaccggcttcttatacttggtatgtttttgtggttcatacatatcatggcatgtattggtacttcattttcattttatggccaaatattccactgtatggagatacaacattttatttatacattaatcagttgatggacacttgggttgtagccactttttggcaattatgaataatactgctatgaatattcacatataaatttttgtgtggatgtatgcttttatttgtcttgagtctattcctgggagagaaactgctggatcatacaggtccacgtttaacttattaaggaacagctaaactgttttctaaagtgactacatcattttatatccccatcagcaatctatgagggttccagtttctccatatcctcgtcaacacttgttaatatttgactctctgattacagccattgaagtggatgtgaaatgatatctcattataggtttgctttgcatttccctaatgactaatgatgttaaggtttttttcccctcatgcttcttggcatttgtaagtctgcttgggagaaagtctattcaaatcattagcctacccttaggttttgaaatctattgttttcaaatacacagctctgggtcaactggttacatcctgcatactaggttgggatttttttctccttttagctcctagagaaagctgggtctttatctattgtgggaattc

SEQ ID NO: 195512 - DNA, 1000 bp, Homo Sapiens
cccggggagtgagctccagcctcctctcagctcaggcagaggcctctccagcaaggcgaccagatgacccggacaagaaacccctccctgtgggagtccgggatgccctgcatctgacctgccaggatggagggggagaaggttctgggtcctttccaggatgccggacccccaaagcccattggaggacccagtgccgctgtcccctctggccaccctccacccccgaccaggagctcacggctcccaagcggccgtccacccgtactggccccacgtcctctcagcctccctggcctgcacgacctccccagcccccgccctttgggctgcacagagcccaactggggtcccctgagatccctggccctgctctgtctacctgacatttccttagagagagagagaaagttctctctggtttttttttttctttttttttagccaggcgcggtggtgggggcctgtaatcccagctactgtggaggctgaggcaggagaatcgcttgaacgctggaggcggaggttgcagtgagctgagatcgtgccattgcactccagcctgggcaacaagagaaaccccgtctcaaaaaaaaattattttactttttttttagagacagggtctcactctgtcactcaggctggagtgcagtggcgccatctccactcactgcagcctcaacctcccgggctcaggcaatcttcctgctttggtcccccaagtagttgagattccagacatgcaccagcgtgcttggctaatttatgaaatatttttttttagtagagatgaggtttcaccatgttggccaggctggtctcaaactcctgacctctggtgatctgcctgtctcagcctcccaaaatgctgggattacaggcatgaaccacagtgcccggcctgaatctttttttaattttttgtagaaacggggtctctctatgttgcctaggctggtctagaactccgggcctcaagcaatcctccctacttggc

SEQ ID NO: 195513 - DNA, 1000 bp, Homo Sapiens
gaagttgggttggagtcgtcgagctccacatttccaactgtgtgaactcggccagatcttttaacctcttgaacccttgggagccaaaataccagcccctcagtggagtgcgagcaagcgtcttcagggagactgtaaacctctgtggacgcctgtcaagaccgagtgttgaatgccttgctggatttttgtgtcgtttaatcctcatctgaggagtctttctcccagttttacggatggggtagtggaagtcttgatgaaagggagcagatgcccttgttcctggggcagccagctagaagcctcctgttgtttctcaggccccttttaaagttcctaaaatggagtgctgggaccccaggagggaggagaggcacacaggataattctggctgagagcagaggtctccttcacttggggtcttgatctgaggaactgaagtgggaacctggtgaagacaggtcaccttcaggccctcactttttgggtggcagtatatttgcccagtccccatcggaggttgcgggggtctagaaagatacaggatatgggctggttgtgggaggggaagtctcccttaattctatgaagtctcctcaggtatcccttttccaggaagggcattcatattttatcaacagagggccaattatggggcattgaccagaggtttacttttgtttcagtgactcccaacagcagctccttgggaggagctacttccccccatttcacaggggcagaacctaaggccaggagcagtgaagtgaaaagtgacttaccccaggtcacataatgagggagcaaaaagagaaggggatgggatttgattctaggtctggtctggccttgccttcacaccaaaaacctagtcctggcatcccccccccgcccgacttctgcatctgacttatgatatcccttagagcggggtggttctgaagttggagcctggcccatttaagggacatttccaggacaaagcttgcctaagattct

SEQ ID NO: 195514 - DNA, 1000 bp, Homo Sapiens
ttgcatcgagactgtgctgttacccccatgcttggggacagtacagttgaaagtgaggactagccagacatcatagcacaattggggtcccaggcctcctgccctcttgcagaaaaggaggggcgtccctcaagctgctggcctcagctgtccacaggagccccacagggcccagatgggccagtgactggggatggtggcttgaacagggaacagcagtggcctgctgtggagacaccacaccctgaggcagcctctccatcaaattcctctatgagaaggtgtgggtttccagagtttggattgtggctttttcaaggtcctgttctcatctgggtttcagctgaacaaagataagctaaaaaggaacaggacggagttgataggaccccacgccaaacaccaaagacattgtgcacacgtattttggtataaaaggcatcttcctcctcaggtgcaacctctggtcacttttctatgtcgctcctcgtcacacggacctcaaggtaaaccaccacctgcaacgcgttctcgaacctttttcaaaggacagtccggtggtgggacgtgggaggggccttcgtgcatcgggaagtgccttcagaaatatcttaacaactgaaacgagcagcttcagaaggcccagatgtgcaaggcaggttctgagctaacaacggttatgctgagctttcttccttggtttcccccttaattcatcctgccaggctgtgattttgttcttgttttggcaaagccagctcgaatgttctgcctgaatggaggaggagcagattgccaggtactgagatgcaggatccctgtggaaggaagggccagcgcctccaggtgcagaaccttctgcagcggcccggtgctgccccctgctgtcttccaggttcatgtatgtcggtggggaggagagcctgggattccctagtcagggaggtctgaaggctttctttgctactaccctggataattgaaagcactttacatgcct

SEQ ID NO: 195515 - DNA, 1000 bp, Homo Sapiens
accatttatcccacttaattagtattttcctgacacacaataacttgcactaaaataccattctctcgcctttaaatttctaattattgttgcgacctacaccattacgcatctccactgctttctccatctttcatgccatttaagcggtaagattttcaattatctacgcaggacggacagagatacttttaaggaaagggacataatatgcaactcaatttctctaaaagccaggagaaatcatttttagtcagaacaaacacactttgtctttcatcttttttttttttttggcaaataaagagtaaaacaggctatttaaaacatccatttaaatgcaaattttgatatcccaagagaaaaatgttaatcatttaaatagacaggattatcgcccacccttaccacttccctcctctcccaagttttagaaaacgtagccttagcccacacaagtcaagtcagccaggagtccttacatcttaagaactcccactcagatgagagggctgaggcagatagagggggacttttccttcttttgaggaaggagatggaaaagagagaaaatagtctaacatatcctataagccaggcatggggcaatattataaatacaaacacacacacacacacacacacatgcatgcacacacacacacccacacttaatcatcacaactgtcttggaacggggaattatcatcctcatctacagacaaggaaactgaggcttagaaaggtgaagcagtttgccccactggtaggtgacccagttgggagtagaggcctccatagccctcccagtccatggtgacctgcggtcctgtccagactcacccagcatccccatgccaagcatgaacgcgtccatggtgtaaggcagtccccgggcccggcctcttgtcccaggtgggaacatgacttctttcggctgagctttcttacattctacctgttaaacagaaaggcgaacaaatgagatgcaaatgaattc

SEQ ID NO: 195516 - DNA, 1000 bp, Homo Sapiens
tactaaaaatataaaaaattagccaggcagggtggcgggtgcctgtagtcccagctacatgggaggctgaggcaggagaatggcgtgaacccgggaggtggaccttgcagtgagccgagatcgcgccactgcactccagcctgggcgacacagcgagactgtctcaaaaaataaataaataaataaataaataaataaataaataaataaataaataaataaaataaaaataaaaaatgtgccgggcatcgtggcaggacacctgtaatcccagctacttgggaggctgaagcaggagactctcttgaacccagggggtggaggttgcatgtgagttgagatcattccaccacactccagcctgggcaacaagagcaaaactccatctcaaaaataaataaataaaagtacatgcaggccaggccggatggctcatgcctgtggtcccagctatgcgggaggctgaggcgggagggtcgcttgagcccaggagggtgaagttgcagtgagccgtgtttgcaccactgcacaccagcctgggcgataagagtgagttcctacctcaaaaaaattaaaaaacaaacaaaaaaacactatgtgcaaatattgcctcgcagctgtatgtgttgtccttttaattttgcgaatttgctaattattaaaaaaaaaaatgggaagggctcgggtgagggagcggcccaaggcacctgggtctcccgtgggaggggctccagcctacatagaagtgggagccggcacctgagggccctgaggcagccagaggcagccggggatgaagaccagaatccgaagagctcctgagctagcagacagttgagcactgtctgtccttccgccctcctgccactgggcccctgaagtgactgtggaagaagccagtggagtggggtaaccagagcccccagagagggaggtacgcggggaaagccaccccgtgaagctgctcacgatctgctaggctcactccatgctgcggatc

SEQ ID NO: 195517 - DNA, 1000 bp, Homo Sapiens
ctgtcacccaggctggagtgcagtggcaccatctgggctcactccaacttccgcctcctggattcaagggattctcttgcctcagcctcccgagtagctgggattacaggcgcccgccagcatgcccagctaacttttgtatttttagtagagacggggtttcgccatgttggccaggctggtctcgaactcctgacctcaagtgatctgcctgccttggcctcccaaagaacaggcatgagccaccacacctggcttgtcaactgattttctaccaaggtgccacgacaattcaatggaggaaacaaaagtattttcaacaaatagtgctacaaaaatggaatatccatatgaaaaaaaaaccatgactcttacttctcacagcatattaaaaaattaacttgaaaataagtttaaacgtatgagttaaaattataaataatgctgaagaaaacacagagagaatctttagaactctgggttagaaaaagagttagggccgggcacggtggctcacacctgtaatcccagcactttgggaggctgaggcgggtggatcacctgaggtagggagttcaagaccagcctggccaacatggggaaaccccatctctactgaaaataaataaaaaaaaaaaaatcagctaggcgtggtcgcgggcgcctgtaatcccagctacttgggaggctgagtaacgagaatcgcttgaacccgggaggcggaccttgtagtgagccaagatcgcgccactgcactcctgcctgggtgacaagaatgagactccatctcacaaaaaaaaaaaaaaaaaaagacttagttaggactcaaaaaacatgaaccacgaaagaaaaaaaattgataaacaggtttcatcagcattcaaaacttcttctctttgggacatcttttgggggccgggtgggagctacactccaggaggaaatatttgcaaagtatttatctcataaaaggcttatatccaaaatacataaagaattc

SEQ ID NO: 195518 - DNA, 1000 bp, Homo Sapiens
acttccccctgagaacttagtcgatggctgcaccatgctaagtgcttataaatgtttcaagactcttgtcacaactcagagatatctaagtctcagaaacgtaaataagttgcccgggctcacagggctagtaaatggcaatacagacgggaacttagggctcctgcttttgctgttaaccaccagatcacactatctcttcttggaggtggctgctgtaattcactcaatgtgcttgcagtcctgtccccataaaactcagtatttctagatcctgcactcccacctgtccactttttctttcctgtcttcatagaccagaagcaggtccaatttgtcttaaaggttatgaccctcctaattcctgtggggacacagacagaggagaggaacagagatagggggacagagtcacagagatgatcgagtgttacagcgtttttacagctctaggttctgctctgtgaatcctgactccattctgagatgaaaaatggtagtgccattgacttctgccttctgctttcgggttcttaaagatggacttctcctgacctccccttcttctcccttttggcccagactttcagtgcagttgaggctgcgggagaatccgggcagcactgtaagtgccctcggcccgagtcaggccatccagtgtttcgccagtccttcaaggaccctggaggagaagggctaggcagggtcggataccactggctccagagagtgtcagaaaaacctaagcagaaagaagagaagggggagtgcaggacataggaagatggcaaacagacgcccacagaagaggagagtgcatgcatcctatgaggacggagcgtggatttatgatgccagagaaactggaaggtttaggagtggagaggtcagtcttagcctgggtcccactggatggaggctgtgtgcttctctctgccttggtttcatcattcaccatcattgggaataatgtcttttgtctccttacttaaagtgatcc

SEQ ID NO: 195519 - DNA, 1000 bp, Homo Sapiens
ctcctggtacttttaaccccttctctccatttttcccaaggaatattctagaggaagggtttctgggaatgaccttcccaaggggagggatcgggcaagtattgagtcattcctgctcgtctggattgtgattgcgacccgtgcctcatggagtgtcgctggatacgcgatcagtgtcccttgaggcagtgctgcacatggtgcagttccagagaaatgagggaatgagaatgaacgtggctgctcgtgtgttccgtggctgtttaggaaggttgggtcagtggagatcagggcccgaagagcagtttcagcctgcgtggtcttgatgtggtcttggctgatgagaagctccctccaattctgtgattctgggtaaagcagaccatgtgccatcgggagtgctcctgtgattctttaagttagtaattctcatccctggccacacataagaatcatctgggatcatttaacaaaaaacaatgccaggatcctacagtctactccacgcccttcattttcaaacttgagtgggcaccagaatcacctggaggatttgtgtaaacacagattcctgggctccagcttccgagtttcagtggctccaggatggagcttgagaatttgcatttctaacaagctcccaggtgactcgctgctgctggcctgggaccacactttggaaatcacgattatgaacaggaatcagaatttctgaagatgtggcctgggcatctgaattttttcacattctccaggtgattttaacatatagctctggctgaaaacgatttctgatcattgatttttttttttttttgcatcatccaataactattcattggtcagactgtgtgctaggcactgagttagagttgaagaccctcaagaattccactgacaactgaatcatcaaagggaaccgagccctgcccaaggacatacagttgttttcctcttccttgtcctttggagaagcacagctgaagcttcctgcccacac

SEQ ID NO: 195520 - DNA, 1000 bp, Homo Sapiens
tgcaggtcagaggcaggtcatgatgaccttgatgagcaaattatccttatggcaatgctttcacattttgagtgtcactggcacttaccgcagttctctgtgagaaatttcaaattaagctgatatagtttcaagagaaaaggtgaaacagctcctcctggagcatgtaggtggtaggtcacaccccaataaccagtgaaggagtaggccatttattttaacttgtttttggttctggtgaattaggcacaggctaactgttctgggattattaacactgattgttgtgggtgcttctcctccgctaccccgtgactttgatttgtgtgttacataaacactgttgccatagttataattcaggaagctttgttgtttgaccttaagaaaaattcaacctcaaatcaggataacactgactctctagaccacaatagaccatcagagggtaggatctgccaaatttcttcaagcttctagaaggaactactgtattttgggtaacaagcaagcaacaagaggaggaaatgctgcaatgttatgcaatttccttgcatttcatattcagcaatcctgaaaacctttataagcaacttccctagctttcaaccgaagattggagtcacagccaacataaacaaaaactggatgcaaaagaggaagaaagaaatctaagtaatgtacaagtcagaaaagtgtttcaggaaatttttaaaggcagcagaaagggcaaaagctcatttgctatcaagtgcatgacagttaagtagatggcgtgcaagctgacatgtatgtaggatgtggccaggtcacagtgtgaggagtcttacggctctagcacttcctggcttcaggctgatgcaacattaaaaagtggatgtgaacccactcatctgtcagcatgccgttttcatggtgagaggagagaccacctcccatcctcccaaaagaaactgaaatactaaacagagaatgtctttatgtgctcccctccccaacc

SEQ ID NO: 195521 - DNA, 1000 bp, Homo Sapiens
ttctgcaaggaaccagagattgaaggctgccactgggcattctatgaattcccatggagtgggggtactcactggcattgagcccatgagtggcccacctgtttgcacaccacataggaaggatccacatggatagcttaagttccccaaaaccatttgttttatctaaaagaaacacagtcatcccagaggcttatggatgtgcagtttagtctcacttttaaaggatttttatgtatccttgtgtctttaaaggcaaaactagcaagtgctttttacatctgtccaagctaatctttccctgctttaagcaggcagacaggaaatgcagtttgcctctattacctaacatgcacgaggtatataatacagagaaataagaaaaaaaaaaagtgagagcataaggtaaacggattggatgagatcaaaaaaggaaaataggagcctggtgagcaatccttggcagggtgcccagagcagcttcaggagagggacagagcccagcaagagcatttcctgctttgggttaaaaaaataaattcaactatcctctatgaggtggtctatttatcctgtgcagcattaggtcattaatttgaaaattacaggtagtaataaaagcagcagttatttttttaacacctagatgaatgggcctctccctgcttcacccactgcacacctgggttatattaatattatctggtgtgtgggtagtttcccagaaaatttcagcttgcgtgaaagcttgaacagccttgttgcttctctaaaacttcttatgttttctatatcctactatttccctcagaccataatcttcaacagaaactaaaggataatcaccatataggctaagaagaagcatttttttcataatcataataattgctggaattaacaaaatcctaaattgtcttctgtcattgcatacccgagtggcttcatgttttgcctgcctttcagtagtcatcagtttccctcatccacaggactttgg

SEQ ID NO: 195522 - DNA, 1000 bp, Homo Sapiens
actgtcatccagcaagggccttagaccctaataattatagctaatgtttattgaggaatcactctgtgccagggactgtgctgagactttacaggcatgatatcacttattcctcaccacagccctttgaagatagttattcttttgcccccattttacagaagaacaaactaaggctcagcaagattgagtcatttgcctggggtgacaagctagtaagtggctgggtcagggctctgctgatgacctggatctgcttcagagcatctctcttcccattgccctgctctgcctctgaatacccactggcatcatcccagagtatttggacagtacctaacctggggcagggtggagtgtgggcatgaaaggcttattccagctgtctttgagcagagtcccacagagggccaaggacttgtctggggtcacacattaaactaatactgagccccagtaacagcctttgatttctccagccttctggttggcgagtagaggaggcttcatgtccccattcatcagtggggagactgaggcccagagcagggatactaggtctcacagaggtttctccctcatgaacattctagccggggctttgcttagaagcttcctattcttgggcatgagtgggtggtgctcctggccctccaggacccctaatggactgttctctctctgcaggtcatgcgacatctacatccgcatcaagatgctccaaactgcccagcagcaccaagtcgggctggccccgacagaacgaaaagaagccctccgaggtgggtagtgatgagcttcccagagatctgtggggagtgagagtgagctgccctgcggagactggggcagagcattcctggcagagggcacgggcagtgcagagggaggccagcgtggccgagtggaatgaaggggagtaggggccagtttccctcagccttccaggttgttgtgaagatgttcctattgaactgagcaaggggagaagcctttcaag

SEQ ID NO: 195523 - DNA, 1000 bp, Homo Sapiens
tgatgttggtgtagacaccaggccgattgggttgaccgcagtccattccccagctcacgattccaacctgataccacagtccatccttgtcacagaccaagggtccacctgagtcaccctggggagcagcatgggtgagcccaggctggggcagagtgggtggggcagcagaggccatgagagcaggaggggctgtggggctaggcagactgaatgcaaaccttactccttcccatggaatcaagtctcagtttctacactttcaaagtggggcaacagcctccaggggttggtgggttaatcagtgtaggcagaatttatgaaaaatgagaagcatattttgtaggctcagtaactgagactgcactggttttctcctaagaaatctaagcaatgggttgggagtggttgggggagaaatggtagctgctctcaggtgtagagctggagagggtgggattccctggtggggtagaggcactcactttgcaggtgtctacactgccatcctcagcaccagcacaaaacatggaatcccagatcatactacggctagagggctgttcaaacaggtaattacacctggtgttgtttaagatggtgacctgtgcttcccggaggttgtaaggaggtggcagaggtgctggagataggacagaaaaggacagcacccttcacctctcctctgctatctggagcagggagaggagaaagggcatgtgttataggggtggggagaaggtccctgacacacccacaacacccagcattgctcttgactccccagcacccagtgcatcaaaagcaatcaacaatatcacagaataacccaatagatgggccaggctgttgcagtgcttcctgaaactcggtttctctatctgtagaatggagatgatagcccctgcctgagtccgcggagaaatttctcaaccaaagcatggcaggaagaagggctacagtagatgagaatgtttatgattaacacatgacagctgtg

SEQ ID NO: 195524 - DNA, 1000 bp, Homo Sapiens
aattaaatctatagatttattaggccataaattagttatccatgggtaaaaagctttgtaagacacatatgaggattttaaagacaatgcgcaatatctgaagttattacatatatatttagtgttgcaattttcaagtcacaaaagaattacttggctgggcacagtggcttatgggtgtaatcccagcaatttttgaggctgaggcaggaggatcgcttgaggctggtagtttaagaccagcctgggcaacacagggagaccctcgtctctacaaaaaaatataaaataaaaaaaaaatagctgagcatggtggtgcgagcctgtagttccagctactctggaggctgaggtggggggattgcaccactgcactccagcctgagcaacagagcaagaccttgtctctaaaataaaaaaaaaaaaaagaaaagaaaaaaagaattattcatcatttggattccatttgaaagagattctttgaattttaaaaatattggccgggagcagtggctgatgcctgtaatcctagcactttgggaggctgaggcaggtggatcacctgaggtcaagagttcgagacctgcctggccaacatagcaaaaccccgtctctactagaaatacaaaaatttgccagttgtggtgctacatgcctgtaatcccagctacttgggaggctgaggcaggagaatcacttgaacccagaaggtggaggttgcagtgagccgagattgtgtcactacactctagcctgggtgttactgtaagactctgtctcaaaaaaaaaaattgtttattgatcataaggagtgactattgattaccatcaatcagaaacagggatgaattacccccaaaataagaatggaaaaaaatttataagaacatgcccagaattttccattacagtgtttatcaactttttctttatacttataatattgctaaacagactgccttcagtgcttaataaatgtctgtggttgttgatatagtag

SEQ ID NO: 195525 - DNA, 1000 bp, Homo Sapiens
gctggtaacaaagctctaaagtggagagactggcaagacacagatgagaagggttggatcttggacaaagtagcagagggaaatgcctgctgattctgagaagatcaaacaaaaagaatgtgactgaaagcagtggttcccaaacctcgtttcacatcgtaatcacctgattgtcgctagatccagggctgtcagggaatctgacggtgaaggagcttcctgggtgattgttttcagctgcctagggccagggcttgtcataggagagaaggaaagtcctcccggctcagggaggaggctccttgtgggcaggcgggtcagggcatcaggataagagggagctgcttggatgtgcagggggagggctttcttgggaggctggagcgatgcctctcacagactcagggagcagagagggagggggagcagcaggggcctcctcagctttagtggggtgtctgctgcaccgttagggaggaatgaggggaaatgtgaagtgtcccccgtgttgatatcactagcaccttgctctgtgcctgggcattgtggccaatcgataaatatttcgggaatgaatgaatgattgccactccattaggcaccttcctatatgttgcctaatttcacaattacagctacccctgggagagagactgttatcctttgtagagagggcatcttcaatgctcagagaagtgaagtaacctacccatcgtttcacagttagcaaatgcaatggatattttagcaaagaatgagcagagataagcctgccctggtaggtttctttccacactattgggattctgacaatggacttgagtgtttcatatttgaaaacatatgaaagattgatctcttcatgaatgattaaattttaaggtcaaaaccagtaagtttcaaatgtttcctaaggaatgtgtctatttttgatataagttctatggcattaaattatttaataatggctctagactgggggacagagggaaactagatc

SEQ ID NO: 195526 - DNA, 1000 bp, Homo Sapiens
acggatggatgaggccgtccccagagtgaacggatggatgaggccgtccccagagtgaacggatggatgaggccgtccccagagtgaacggatggatgaggccgtccccagagtgaacggatggatgaggccgtccccagagggaacggatggatgaggccgtccccagagggaacggatggatgaggccgtccccagagggaacggatggatgaggccgtccccagagggaacggatggatgaggccgtccccagagggaacggatggatgaggccgtccccagagggaacggatggatgaggccgtccccagagggaatggatggatgaggccgtccccagagtgaatggatgagcacccagcctgagcccgggaaggtgctgagggttagcacaggccgcctgctgctgcaggagtgagaggggcccactcagggaaagaggggttcagggggagcagccaggtgtgtacagatggctgtagccatgtggaggcgcgcgtggggaccggcaggcaggcagggagttgggctttcttctgggagcagtagggagccacggttgaccgtggagcaggggagagacctggtttgatcttggtcttgacttccaagccccttggtccctccgaccttggaggctgctggaaggagagggcatctcatttaccatcctggctgcttcatggggatttgggagataaaaagcagctctttcagtttaactttggttgtaggagtcacagtgaattagttctttattttgttttttttttgaggtggagtttcactcttgtttcccaggctggagtgcaatggcacgatctcagctcaccacaacctctgcctcccgggttcaaactattctcctgcctcagcctcttgagtagctggggttacgggcatgcaccaccacgcctggcctattttgtatttttgatagagatggggtttctccatgttggtcaggctggtctcaaactcctgacctcaggtgatc

SEQ ID NO: 195527 - DNA, 1000 bp, Homo Sapiens
ttctgaggaaagtgttcttggagctatgccaggtctcagtagagcaaacagattttcaccctttagaggtgtgatgtgtgctgtaattaatggtatgaaagccaatagatatttgtaaacaagttggacaaagtgacaaacctagcctaaatttgaaaaaaaaaaatcttgactgtacagaatttgagattcagatttttgcccgaggagaatcatagttcataactgtcttgagttcagaggtggtacagaccagagacatccatttaaattttgatttgagcgtgactttttcagttatttatttatttatttatttatttttagagacagggtctcactctgtcactcagactggaatgcagtggcgtgatcttggcttactgcagcctcaaccttccaggctcaagtgatcctcccacttcagcctcccaagtagctgggaccacaggcatacatcaccatacccagctaattttgtttattttttgtaaagatggagtctggctatgttgcccagatgagtctcagactcctgatccaagcgatcctcctgcctcagcctcccaaagtgctgggatttcaggcatgagccaccacgcctggcctaaatgtgactttttctgatgagttagagagctttctctgatcactgtagttctctgtatttcatttctatgagagagacagtatagtatgttcctgagagcaagcagacctgagttctagttctggctttcccgttaatgggatcatcgtgtgacgctgcactctccttctcagccttggtctgcacttctgaagggggaaaaggatggccctgatgatctccaggtgcccatggacattgaaataatataatttaatttcactcacataccattcttaaacccaatacccattcctgctcctactgtcttttgtaaatagaattttccccccaaattgtatttgggtttgttttggttttagatgatggatggcccaggagagaatgatc

SEQ ID NO: 195528 - DNA, 1000 bp, Homo Sapiens
atcctaagttcaagatctgccttgtattccaccaagtagagatgtctctgggcttcctagcatttcatttaaattgtaaaatatttcctgtcattctcaccctagtctgaattacttgaatgggctgatccagtgtgtatagataacccaggtcacactgaagacctggaagtttagttcgcaggcctctaggtagggggccattggatgggtgaacggggacctgaatagccaaatcatgtgatttctgaatttaaaggggtatcctgagaataagaactgaggaaccaccagccacctgctctaccctatagattataccctgcagtggcacaatccatgcctcctttaaaaccacttctgtgcaggttaagtcacctttcccatgcctgcctgggcagagaaaagctggcctcctaactcttgctccatttccaatcccccaaggaccctttcttcagaagtcttcagaggaagctcattctagtgtttctcttcatcaaaatcctcttgaatttcttctgcagccttaatttgcatttcctagaaacttgtggctgataaattccagtggttagagaccgcgttactgagccaaaggacccagttctaacctctggcgaaggaagcagttcagtgtcactctgttgcacgaccacagaccgcccaaactccagccaacaggcctgcaaaagcagggacccgagagccaagaggaacaggagggggctggatacagcctcagtgatgagcacctctggttgtcatcttagtgccttgccctgccaggaccagtcagcaatgttacccctgtgccagggactgcagcagtttatgcagttgatgcatagtgggagctatgaggtacaaatggagtgaaccggaactcacagattcccacccactgagactcagagggggctgggtcagtcccttctccagcacatggcagaggggaaaagtgccctgcagggagaggcaggagacggggtctcaacca

SEQ ID NO: 195529 - DNA, 1000 bp, Homo Sapiens
agagctactcaaggagatcaaaggtccttgtgttggacagactgctcatcatctaccaatagctcttccctcctcatgtagagtggaagatgtaactgtccagaataaaggcatttcccagcctcccttgcagctgggtgtgactttgcaactgattctcaacagtaggatgcaagcgtaggcaatgtgtttaagttccgagaatccttaataatgagataccagccacatgttgaagacagcagagcaataaaataggcggagcttgggtctctactgcttgtggaactgctgtatcagtcctagactggtttcctgagagacaaataaacttctaacttgttaacatggtgtttgggttttctgccccctgtggtactgcttaattcaaacaatataccattaatgtgaatatagattaatagtaaagttaatgagctactgtgcctagctcatagtcaggtcaaaagcgatagctgtttctattaaatgactctccatatgctttaataagcaagcaatgacaagaaaatgttaatagttttttaaatatgtgttttcaaaaggaaaatttaggggtaataatattcaaaaatttattgtaataaagcaatttgatgaagtttattcatcaaaatgaagcaatttgatgaatctagagaaagcaaaatttaaaaataaataagaatttttatgtgcctcctatgctatttaggaatgagggtaccatgagctagacaattgatcccaatttatcagacctaagatctgtgatgtggaaaatgggaacttccttatttcatggaaatattcctaaagaccaacttaccttgttcttgttcaccatgctagcatctcaaaatttgttcaccagactctacttagagttctccaggataagggtgcccctcatccccagaaaggaatgctaatatggataggttaagaacaaggatattagtgagcatgctcctgagagtcaggcttttggagagatgat

SEQ ID NO: 195530 - DNA, 1000 bp, Homo Sapiens
gggtcatggggcgcccgaggctgaagtcgggggatgggttggtgggggccgcgtgcacccttagtcggaattggcgtggggaggggaggtggtctccgttcgggcgctctgcgcatgcgcgggtctgggggctttggggagatacgtgcgacctgttaggccgctctgcgcacgcgcggggctcaggcctgagctgctatgggggcagtgggggaaaatgggagacgctccggggggtcccttggggcaattgcgcatgcacgagttcttggagcgcgaaatttgattaaaaggggcctatgagctctgtggatgttgtggttctggaggaaaagggagaaggaccaaggtctgggggagtctcccatgaaggggtggcgcaggaaactcatgtttattcctccaataaagcaacagatactcaccgtcgcccacagtttcccctctactcccaagcccaaatgcagccagtccctgaagctactcgcttcccccgtgtgcccgctgagatctcttgggactggctctgtgctccagcattgcctgatggagtctacacacaactcataaatttctcccattttattttagttttgagacagggtctcactctgtcgctgaggctggagtgcagtggtgcgatctcggctcactgcagcctctgcctctagggttcaagcgattctcgggcctcagcctcctgagtagctgcaactacaggcccgcaccaaccaccacacccggcccacatttgtattttttgtagaggcagggtttcaccatgttggccaggctggtctcgaactcctgacctcaagtgatctgcccacctcagcctcccaaagtgctgggattacagccgtgagccaccacgcccggctgagttttcccattttagagaggaggaagctgaggcttggggtcttaggttggacattatggatagaaggattggggcacaagcctactgggctcttgggccccagtgtccttctggatc

SEQ ID NO: 195531 - DNA, 1000 bp, Homo Sapiens
gtgtttccagccactgaaaacttggattaaagcccaaagtaaactttcccttttctggctttgaggtgtggtgtttaaattcagagacattctccaggaaagcagaaacttcttggctaaaatccaaacctagggaatttattgcagagatggggacgtggttctcatttctgcccatctcagagtacagattaattaactcagaagattcaaaagattatattttccatattccttgctgaacataatattatacccttttctctccagttttatgcttctttttttcttggtgctaaagaaattgtaaacctttgtcttaaaactggagtcccttccaactgctggtgacagaaatcccagcaagataagaaggagcaaatgtccccgcttcccagacaacttgagatgtaagcagatcctattcagcatcctacaatgttcttgcaaagattatttctgtcagtggagctctgtaaaacacccagactccagagaccatcacttggtcctgtgaaggtaccctcttagccttcaaatatctgaaattcagatgaattgcctgacttacttttttttttttttttgcaacagagtctcactctgtcgcccaggctggagtacaatggcgtaatcttggctcactgcaacctctgcctcccaggttcaagcgattctcctgcctcggcctctggagtagctgggactacaagcacgtgccaccacacccagccaattttttgtatttttagtagagacggggtttcaccgtgttagccaggatggtctggatctcttgacctcgtgatccgcctgcctcgacctcccaaagtgctgggattacaggcgtgagccactgcacccggccttacttacatttattaattcaatgcccaggacataatgtgtaaatggacaactctgttgtctagaatttatgcaaatacttgtgatgtttgtttgtttatctggaaaatggcttttcagggaggaaaagctt

SEQ ID NO: 195532 - DNA, 1000 bp, Homo Sapiens
agatggtgccactgcactccagcctgggtgacagagagagattctgtatcaaaaaaataaaaataaaaaaaatgcagtgctcatcctatagggttgtaaagattaaatgacttgtacccacagagcacatcacatatatactatctggcacctactttgaacatcatcattcaaactcaggggtacgcgtctcctcttccctcctcatgtaccaaaagtacccattcctcagaaaaaacacatgttcacacaaacttttccagttagttcttttttcatctttctattaaagatgaaaatgtaacttttaatagctactcctaatttgatcttttaaaatgaagtttccttttcaaaactctagaacataactaagagttgttcactttttaatgttctactccccctacagtccactttccacacagcaactaataagtgctgtttttgaaacagcaactcagatctcaattttcttgcccaagccctccaacagttttccaaagccaagaccttcatttaggggagatgccacagctaggcttatgaaagtctcaacccaggcctaacagaaaggaagtactggcatgtgcttggggcggagtgggcatgagtgtaaactttcaatcccagatactcaaaacatctcaatccgtttcaggtcctggagcttttgggggaaaatgtaccaaaagtacccagtcctcagaaaaaacacatgttcacacaaacttttccagtaagttctttttttggggggaggggggtccataaaccccctgatttaaaatctgctctccttccacagccttctccatctcaaaaatggcaattccatccttccagttacacacccccaaacccttggttatccttgactccgatcacacacccacatacaatctgttggttctgtcttcaaaagcatgtaaaactgtcagcatgtccactgctcccatcctggtccaccacaccatctcctagattacagcaacaagct

SEQ ID NO: 195533 - DNA, 1000 bp, Homo Sapiens
ggccagaggccctgattgtcccccttccactaaggtggtcctctagtcgaccaggcataggctgcatggtagctcttttccgggactctatagcctggagtaaaaagtcatgccaagctctctctgctatatcccgaagtccctgcgggtcagcccctgagggccatccagcttccatctcccaacactaagttcacttcgtgtctgtcacagcaaggaagagacttagcattccttagagacctgaagggatgcagtgagcttaagaattttcaagagcttatcaatcagtcagcccttgttcgtcccctagcagatgtatggtagtattgtggtggacctttactaggcactctgcctaataactagagtggcacttgtgctttagtccatttggctatccctttcaccctggcatttcatcaaccagaggaaaaacaaaaaataagacatcataaagcgagagaagccccttataggtctttcaactctcacatctatttagatgcaattagagccccgcaaggaataccagatcaatttaaagcttgaaatcaaatagaggattcaagtcaatattttagtagatgacagtcaataaaaatgtagattagataaactacatctattacaaccaacagcaatgagcttttcatgagttaaaaagaaaaactcatgtcggtcccagccctgaggctacctgacctgacaaaactctttacactctatgtgtcagaaagaaaaaaaaaatggcagttggagttttaacccagactttggggccctggccaaagccagtggcctatctctcaaaacaactagacagggtttccaaaggctggcccccatgtccaagggccctggtagcaacggccctgttagcacaagaagcagataagctaactcttagacaaaacctaaagtccccccatgctgtggtgattttaataaataccaaaggacaccattagctaatgaatgctagactaactagatacca

SEQ ID NO: 195534 - DNA, 1000 bp, Homo Sapiens
ttctagagattcccctcaaataactttccaaatcaaaccacgttcatctccctctttatcaccatactgggctaagcactctggacaaactgctaaaatagcttccttacggtctccctggtccacaattgcctctctacagtcttttcaaaacatcctttaaaaacatgttgtatgtgtgaacaagagggaactctgatggagagagggcaaaattgcttgtgggtagtgagaaaagagcaaggtatttgtatttgtcagtaggaaattctttttaagtttcagaatagttgatatagctgaagggtgcccccgccattctatttttttttttttttttttgagtcggcgtcttgctctgtcacccaggctggagtgcaatggcgtgatctcagctcactgcaacctccacttcccgggttcaagcgattctcctgcctcagccttccgagtagctgggactacaggcgcccgccaccacgcccagctaatttttatacttttaatagagacggggtttcaccatgttggccaggatggtctcgatctcttgaccttgtgatccgcccgcctcggcctcccaaagtgctgggattacaggcgtgagccaccgcgcccggcctgccccccacattctaaaacagtcatcaccaagtgaagctgccagaaagttagctctcgtaactaaaagtagctaataaaatgtagtatgactttttattccgtacttatcccttttaaataatatatttaaatattataaagataaaggaaatgatgttctctttatactggggaattatgttttttttagattctaagtccctatcaatcatccaagcaattagtgtatgagtttggaacaatctaataaatttcaggctggagacacacatgatgttgcattttgttagcatctaagttcctccaataaaccataattctaggctttggaatatttaaatcctgtgtatccagtaacttaaagaacaaagtttga

SEQ ID NO: 195535 - DNA, 1000 bp, Homo Sapiens
atccggttctggactatttcccgtctttatgaatgaggacactgtggtatgagtgtcctcatgagtgaatgagtgaagagggatgttcttgcattgaatgcctagattgcatacaattttgaaacggtgattaaaagtatgtatacagctacctataattattcatatgaaactgttaaaactcattatcattttctttatatttgcatgtgggggttaatttttactgcctaagaactttgttgcataactcccaacattattagtaaatgctcatggttaaattgccctgtctcctttaaaggatttctaagtgctgtttgttaaactttctgtgattaaagtaattcttgtgaagtataaggaaagatgataattttcatatctggtatttgtgaagtttggtaatttttagtctcgtaacggtttttctctaccatgagactaaaaattattggtgtttttgacaaaattattgtgtttttttgacatcttttgtcattcttttccagagaattcggtcaacagtggatgaaaaagaacaaaaacaacttcttatggatttggatgtagtaatgcggagtagtgattgcccatacattgttcagttttatggtgcactcttcagagaggtaggaataaactgggttttagctgactaatgaatatctaattgggacaaatgaagatggcaggattcgattctattcttaaatgccatacattagtaataagttaatatctcagtatcttagtgtttaaccatggtaatttacatattaacttctgactctttttgcggtggtgggtaaggggtgaatcacacgtgtgtttgtgtgtgtgtgtgtgtgtgtgtgtgtgtgtgtattttagtattggtggctgtcatttgtaaatctcatacaaatattttctgttctttaagaacctgaaaaatcagctgacttctaaatatcagcacttttgctatagttttagattttcattgggccttgagcaa

SEQ ID NO: 195536 - DNA, 1000 bp, Homo Sapiens
aatatttgctatgctttcatggtcattcatgggcatacacagaagaacaaaaaaattgagccacccaatatgcatactccagctgaggctgaacaaggcaatgctgttgtgccttcctgttaggctcccatattgtaaataaatgttctttacgcagtctactgtcacttcttaaaaaaaattttgtgcttttatgttggtgatttcacttccaagtgtagttctgaaatgttttctactgtgcatattctgtgttagatttcattcaagcataagttatactgtagttggctgtgggttcaatgttagtgatttaaaactgtggtacatccagaaaaaaaatgaagagaaaattcacctattttatatggaaggctactctggaaattgctaaagtaacatctatatagtgtttgatgaagttttgaaaaaggtggaaaagcagctacatttctgaatttatgaaatgatgactaatttttaaaaagtgtagtagacagcattgttgtgaggctggaagtcaaataaatttatggtgacattgcccagggtcaggaaagtgccaaaaccttatcagctagtgttttagtacaaagaaatgctgcatataattaactatttataagaattatatattaaattaggtattttaaaacagaaacacacataaaacaaggttgttattggtcagtttatgtaagtattgtcaccagaagtttgtaggaacctaattctgcatttgtcctaagagcaataacactgtattcattaattcaatgttcaaaatgactttatagaaaataactactgtgaataatgagacttgactctattatcaattcacatccttcaatgttgctataatcacttattcattccaggacatatttccatagattctttgagattttcaacctagatgatcatgctatatttttttctttctaatctatatatgttttatttctttttcttgccttatttcactatctaggaattc

SEQ ID NO: 195537 - DNA, 1000 bp, Homo Sapiens
ggttcaagcgattctcctgcctcagcctcctgagtagctgggattacaggtgcctgccaccacgcctagctaatttttatatttttagtacaggtggggtttcaccatattggtcaggctggtctcgaactcctgacctcaggtgatccacctgcctcggcctcccaaagtgctgggattataggcgtgagccaccaagcccagcctaatttttgtatattttattagagacagggtttcaccatgttgcccaggctggtctcaaactcctgagctcaagctatctacctgcctcaggcctcccaagtgctgggattacaggcgtgagccactacacctggctctccctgagcttttgagaatgtggtgggaagggagagggggtcttaaaggaaggcttaccactccctcccagccaagtctagtcgctgtggtaggggtacttctcctggtggaccgtgaggctgctagttggaggttttagtgtgtggggtggagtttctagtcaaaggctttcaggctgtcgggttcctcatgaggttgccatgttcacataaaccacctccacgctcaggtgggtttgggagaggacatgttacagtggaaagagcatgggctttggagccagaaagacctgggtttgggttttaccaaagttatcaaacctttcagagcctcagtgttcacttttccctcagtaaatatttaatgaagttgacctaaggaccgggcactgtgctagcactgggggattaaataaacaaaatataatctttccttgaggaagcatagacctaagtaaagaaatgcaaagctgctatcgcagaagtctgtgcaggcatacagtggggcaggaggaagttctgcctgggggaagtggggggcaatcaggagaggcctcctggtgaaggtgacctgtgatctctatgaaataggcctattctatcctcccagaggttgagaaggttaagttggagaaagatgcatacccagtgaattc

SEQ ID NO: 195538 - DNA, 1000 bp, Homo Sapiens
ataaagatgcaggcagggtttaaggacttaaggagggcttcataaagatgcaggcagggtttaaggacttaaggagggtttcataaagatgcaggcagggtttaaggacttaaggagggcttcataaagatgcaggcagggtttaaggacttaaggagggcttcataaagatgcaggcagggtttaaggacttaaggagggtttcataaagatgcaggcagggtttaaggacttaaggagggtttcataaagatgcaggcagggtttaaggacttaaggagggcttcataaagatgcaggcagggtttaaggacttaaggagggtttcataaagatgcaggcagggtttaaggacttaaggagggcttcataaagatgcaggcagggtttaaggacttaaggagggtttcataaagatgcaggcagggtttaaggaagccagcaagtacagtaccccagggtagcagctgtgtggatctgttaccggtaaaggctggaggaacaaagtgaggggcagcctcagagtcagagagcagctatgtggagagggccatggggcagacatgtggccttgggcagcaagaagcagccagtctacaccaaccctgtgtgctgcagttggggagcgaacgccccacctctctctcctcgggtccacccacggacgtcctgctagtgctgcccatgggccggcccaagcaggaagcaaggtcagcttcctggagcaccaggcctggggagagggaaggagagtgggtctgaggacagactctcaactgtccggcacctaggagtccccttaaaaccccatgatgatatgaagtgttattctagggagagggtgaaaccaaaacacagatccaggtttttacttaaaattctcaccgactccggagtcacaggagctcagaagaggagactcggtgggcaggagggtggtcctgggagctgccacagatgcgaactgggcctctgagaagggatgaaatttggatagatc

SEQ ID NO: 195539 - DNA, 1000 bp, Homo Sapiens
accatcaccaccatccctctccagaatgtttttatctttcccaactgaaactcagtatccgttaaacaataactctttatttcctccctcccacccagtccctggcagccatgattctactttctgtctctatgaatttgactactctaagtacctcatataagtggaatcgtatttgtccttttgcgacgggcttgtttcacttagcataatgtctacaaggttcatccatgttgtagcatgtgtcagaatttccttcctgtttaaggttgaatcatattccttgtatatgtataccacatctgacttagccattcatctgtcaacagacactggattgcttccaccttttggctattgctgctatgaatatgagcctaaaaatatctgttcaaatttctgctttcaattattttgaatacatagccggaggtagaatttctggtaattctctctttaattttttgaggaaccaccataccatttcccatggtggccgtaccattttagagacccaccaacaatgcacaaacattctaatttccccataccctcaccaacacttgttcttttttttttttgaaatggagtcttgctctgttgcttaggctggagtgcagtggcgagatcttggctcactgcaacctccgcctcccggttcaagcgattctcctgcctcagcctcccaaatagctgggattacaggtgcccgccactacgctcggctaatttttttgtatttttagtagagacggggtttcaccatgttgtccaggctggtttcgaactcctgaccttgtgatccacccaccgtggccttccaaagtgctgggattacaggcacgagccaccacgcccagcctcttttttttttttttaatatccatcctaacgggtgtgaagtggtatctcgttgtggtattgatttgcatttctctaatgattagtgatgttgaacaaaagataaatttctttactaaatattttttagattattaaa

SEQ ID NO: 195540 - DNA, 1000 bp, Homo Sapiens
ccttaactcaaagccccctccaggccccctacaggctccaaatccactcttttcacactcccacagcctgcaggtagaggggtgatgagcagccttctccagctgcaccatctcccaggggcgggatgtggaggattccacactccaagaagccaattaaggatcctcatcctggcagagctgctggacctggtgctacttgaacactccctgcctccctcgcccctgctcccaggagtctacctgggatgcctcagagctccccagccaggggccaggccgagtaggatggggagctgccctctccctttccaccagccagctccggcccctgcccaggctctgcccagactcccaacttccttccatgattaagcatcaattaaatactgactgagcatctggtaagcataaaacagtctactatgttctccacagcagaaagcatctcttttctgcagaagtgaggccagtggggatggcctctatgctggtccttgtgcacaccaagcatgcccctgcctgggcttttgcactggccggtcctggtccttcctccagaaacagccttctcccagtgtctgccatatctgcattgctcactccaacatcacctcctccaggccatcccagacaggcctgccttaagtaaccaccctgctcctatcccctgacctgtttcatttttcttcatagctcccttccttcctgacatttgcttaccggtctgttggtcagccttcccctgtttggaatgcaaactccacgagaaagagactcctaggtcttagtcatggctgactccttggggcttagaacagggatgggcacatgggttcccagtaaagatctcttcaatgaatgagacccagctggaaccagctctgtgaccccctgcagagccctccatcaacctcccagggctttggcctcccactcataatgtgaaaggattggtgctttctaactggggtcttaatcaggatccctaagagtgatc

SEQ ID NO: 195541 - DNA, 1000 bp, Homo Sapiens
agaactcctaggcccaagcaatcctcctgccttggcctcccaaagtgctgagattacaggcatgagccaccacatccagccagctgtaaaaattcttaacaaattatgacaaaaccaagtctagcaccacataaataggactatacaccctgaccaaatgggatttaccctagaaacacaaagttggttttacatccaaaaaccaactactagcagtaaaattagtagcatacagtacaaaaacaagatcatctcaacagacacacgaaggtgtttgacaagatccaatacccattcataataaaaattctcaacatactaggaagagaaggtaaattccttcatctgataaagggcatctatgaaaaaactacagctaacatcaaatttaatcatgaaaggccaggtgcagtggctcacacctgtaatcccagcactttgggaggctgaggcaggtggatcatttcaggtcagaagttcggaaccagcctgaccaacatggtgaaaccccatctctactaaaaaaaacaaaaattagccaggcatggtggcgagcgcctataatccccactactcggaaggctgaggcaggagaatcgcttgaactcaggaggcagaggttgcagtgagccaagatcacaccactgcactccagcctgggcaacagagtaagactttgtcttaaaaaaaaaaaattaatcatgaaagaatacatgcttttcccctaagactgggaaaaagacaaggatacgtactctcaccactttttttttttttgagacagattctcgctctatcacccaggctagagtgcagtggcgcgatctcgactcactgcaacctccacctcctgggtttaagcgattctcatgcctcagccacctgaatagctgggattacagtcatgagctaccacacctggataattttgtatttttagtagagatggggtttcaccacgttggccaggctggtctagaactcctggcctcaggtgatc

SEQ ID NO: 195542 - DNA, 1000 bp, Homo Sapiens
gagactgtcctgggcaacatagcgagactcctttctctataaaaaaattgaaaacacggctgggtgcggtggcttacgcctgtaatcccagcactttgagaggccgaggcaggcggatcacgagatcaggagatcgagaccatcctggctaacacggtgaaaccctgtctccctaaaaatacaaaaaattagctgggcgtggtggcgggcacctgtagtccctgctactcaggaggctgtggcaggagaatggcttgaacccaggaggtggagcttgcaatgagccgagatcatgccactgcactccatccagcctgagcgacagagcgagactccgtctcaaaaaaaaaaaatcgaaaacatgcaaaaattatctgggtgcagtggttcatgcctgaagtcccagccctctgggaggttgaggcaggaggattgcaggagtttaaggccgcagtgagctgtgattgctccactgcagcctgggtgacagagcaagaccttgtcaataaaattaaatttttttaaaaaccccaagtttttttggtatttagaaggaaagcattttaaagccacatttggtgggggaaagacaaatttgggaaaatgtaattatggggaacccctattccttcctttatacatgaaactatcattgtaatatttttatctttggcatgtttttcattttgatttaacatgtttgaagcagtagctatttttcagttgataacaagaaagggaaaatgtttttattctcttcccacagttaaaatccaatataaacggtgcccagtggcactgatcctagtggcagttactcttctgtaaatagtgcctcccacaatggatatgggtttggaggcagacagagcttatcacctcagattttcattctgatttttcattggggcaatatgaaccccctcctgaatgacagtatcttcttatctaaaggactttgattcttaatgaatgggcaagaaaagaccttctggtttgt

SEQ ID NO: 195543 - DNA, 1000 bp, Homo Sapiens
gagtttggtcatcgagctggacaaagatctttatggccctgacaaccacctcgttgaggtaagaccaagagcccctccgcccttgaattgccaccctcccacaggccagaatccctgaagaaccagcacagatttgggtcagggaccaccctagagtcctgggccccaccactccagatgggcctttgggagacacagctcttctctcctggacagtggcatcggacacccacgacccaggagacggacggcttccaggtgaaacggcctggggacctgagtgtgcgctgcacgctgctcctcatgctggactaccaggtctgcacctgccatgctgccccgtacacgccacacaaggccctcagggcagggctaggtcccaaagtggtgcatcttgagagacctccttcccctcccaaacctatccttccccaggggcatgtttcctcaatcaacacatccccctagtcctgaatggcctggccctgggctccttcctttctctccctttggtctaactttcacagtccccttttcccagcctccccagttcaaactggatccccgcctagcccggctgctggggctgcacacacagagccgctcagccattgtccaggccctgtggcagtatgtgaagaccaacaggctgcaggactcccatgacaaggaatacatcaatggggacaagtatttccagcaggtaacctctctcctgaaccctgggatctggggagcaggcggagttctccagcaggggaagtacctctaccaaggtaactaccacccctcccttctagattcctgagtagcagaagcagtacacagtcatggtcttggagccaagagaccgaccaggattctagttcaggccctactgtggattagctctgtgctgcagccaatccatgttagcccccccaagttaggaagacctggaaaccctacaaagccaaccgctttctggaatgtaatattcttggcacttggagttaggatc

SEQ ID NO: 195544 - DNA, 1000 bp, Homo Sapiens
tccacccacctcagcctcccaaagtgctgggattacagtcctgagccaccgcgcctggacttttttttttttttttgagaggggttggggagacatattctctgctagtgattctcctgcctggtctcgaactcctgctgggatcacaggcgtgagccaccatgcccagccacctttagagttttcttaccacctggttttcctctctcaatatctttctctcatttcctgctttaaaactctagcttggggtctgggcacagtagctcatgcctataatcccagcactttgggagactgaggcgggtggatcacttgaggtcaggagtttgagaccagcctggccaacatggtgaaaccttgtctctactatttttacaaaagttagtcagacgtacaggcggatgcctgtagtcccagctacttgggaggctgaggcaggagaatttgcttgaacgcggaggtgaaagttgcagggagccgaggttgtgccactgcactccagcctgggagacagagcgagactgtctccaaaacaaacaaacaaacaaacaaacaaaaaaaccctgtagcttgggatcagccttctcttctgttgtttttctttaaaaaataaaaattaaaaataggcttcaagtgatcctcccgccatgacctccaaaactgctgggattgtaggtgtgagcactgcacccagccgtatgtttttttctacataaaaaacagcacaggattatcttccaaagctaacaaatatgttcaaataaccacaaccccattaaggaaaaatgtcacttgacagcaaataatcaatccagaccacaatatgatcacactcactgtgaaggtgagaaaagttcatctttattatgtttccccaagagatgcactgcactgttctcttgaaaacacacagctcatgtcctcctttagaacacacatcctctttaaagtaacatacaaacatgccaaaacaagataaaaaattccatctgaattc

SEQ ID NO: 195545 - DNA, 1000 bp, Homo Sapiens
tattgtaaatggagttgtgttcttcatctggctcgcagcctgcccattattgagatagagaaatgttaagctatattttaaactatggaataaaagagcttatcctttgtgaaattattttcaggcataagaaaaacgaaggaaggcattttaaggaaggaatatattaaaacgttcctgattacacccaagtaggtggtctacatgaaagatcactttagtttcaagaaattattttaaaatggtggtaagttattgtttttaaaagtcacttatcatataaaatgattacatgtattaaataccagacacacttgctctattttctttaacaaattaataaccaaattatgcaataagtcaactgtcatgtttataacagattttaaataacattctatctataaatagcatgagtacaactaacgttaacttaccacagcaaggaactttacagtataaaaatataatccataatgaaatgccaataagcttcctagcatcaaaataagaatgataaaaaataaggggatatcaacaacagcttgtccaatccaatatgcagatggcaaaagacctgaaagtttaagttgagtataagctttgatctaaaaaaaatgaaaaacaatttattataattttagacactttagaaacacacaaataaattagtaaattattgtagatctcttaattttacatcagcaaaaccaaaaaggttacattccaggcttataggtaataaaagtccccctcacactaaatacaaattccatttagcctttaatttggctcattatttctgagatgtaacaatttcaacaaaatttttaagaatcagaatacagtagtgctgccaagaaactgagattaaaataaagcaaaaggtgtcatggcggttggggttacagctatacaaataataaatagccaaaacattactacttttgaaatactgtggaaacagatgggaagacatgtttacacagaaaaagaattc

SEQ ID NO: 195546 - DNA, 1000 bp, Homo Sapiens
attgctcctggaggacgtggaaagccacataaggtttttgacagattagggaaaaggctgtgccactctttctgaagatgacagtgtaggcagcctttccattttgtgccaaaaataaaattttaaatacataaatcacagtagtttctaggacaactgggtaactacatacaaaatattgaggttgagccccaacttcataccctatacaaaacttaactcaaaataaaaaacaccagccaggcatggtggcgcgtgcctgtagtcctgcctaatcgacaggctgaggctggagggtcacttgatcccaggagtttgagattacagtaagctatgattgtaccaacatgttccagcctgggtgacagagtgagactctgtctctaaaaaactttttaaaaaattaactcaaaatgggtcaaaaacctaaatttacaagctaaaactataaatatcttagaagaaagcagaggcgtacatcttcatgaccttggattaggcagtagtttcttagatatgatgccaaaaaagcacaagctacaaaaaacgtagataaatttgacttcatcaaaattaaaaacttgtacatcataggacactgtcataagagggaaaaacaacccatgggatgggagaaaatatttgcaaatcacatatcaggtaagggtttaatatccagaatacataaagaactcctacaactcaacaacaacaacaacaacaacaacaaaaagcaactaaaaaataggcaaaatacagccaggcgcggtggctcacacctgtaatcccagcactttgggaggccgaggtgggcagatcacgaggtcaggagattgagaccatcctggctaacatggtgaaaccctgtctctacttaaaatacaaaaaaaggaaaaaaaattagccaggcgtggtggtgggcgcctgtagtcccagctactcaggaggctgaggcaggagaatggcgtgaacccgggaggtggagcttgcagtgagccaa

SEQ ID NO: 195547 - DNA, 1000 bp, Homo Sapiens
ttcttcttcctcttcttttaaggacaccgatgctattggattaggaccccacccttatgaccccatgtaaccttactttcctcttggtagatgctttcttcaaatacagtcactttgggagttagggctcaacatatgaattggaggggcagggacacatttcagcctgtaacagatgggttgggttacctctgcggaagactaaaatctgagggttagtcactgaggtttcacttctccagtgaaactggctgagggtcagacagtcagtgttgtcccaaagtttctactaaccacattacaactgtaaaatgaaacaggtgaaatgaattttagcaataatattttatgtattcaaatatatccaaaatattaacattttaatatcagtgtaaaaattattgagatatttaatattcttttttattttggtactaagtcttcaaactctaatgtgtgttttatactcacagcacttcttaatatgaactagatgcatttcaggtactcaatactctcaaatggcgaaggctaggaagttggacagcaaagttctaggcaacagggagccactggcagcatttgagtaaagtggtgcaatgatgggtttatcatcgttgtgctggagggagaataatgtggcactggtgtttaggcatggcgcggaggaaacatgggatccaggaatgagtaaggctgttcttgcagtaatgtaaaattgagaggaagagaggccctaaatgttagggtggcagtagctgagaaagaaaaaatggtgggtagttgggaaagaaaggatgacttttctgatatagtttattcttatataaaaagcaaaactgttgtatttgatataatatgtatgtcaatgacaggatgtctatacaaaagagttaagtatgaatctttaggatctgaacttttaaatgtttgcctagaggttgtttattaatctccaactttgggaagtctcctttccttcaaagcaggaagaaagctt

SEQ ID NO: 195548 - DNA, 1000 bp, Homo Sapiens
tctgttaggatcaatggagaactcaattagattagacatgaaaaagtaacttccaagcattacaccttaataaatgttagtttcttcctcctttctcctaatcaggacaaaaaaagccattagttaagtaaagaatatgtttgggaaaaactattctctcaaatcaggtatcagctgaaatttgagctaatgcatggaggcaacacctaatatcttttgtatgaagacagcaaattacaatcttaaaatgtatttgatactctttaatagtgtgctgtatttgctccaaatagatcaactataaagttattgtgaaataataatagtgggataatatgcaatatctaaaaacacatagagaaagtaagaagtatgggcaaatgtagttgatggtgattattattgaagatgttagtactggtaaaaggcaaaacagtcaagaaggaatgaggtaaagcaggtttcaagctgtaaattatcctgactccataggcaggaaaacagcaggtgaaacgtacataatgtggtgacttggaatgggtaatcatcctactcataaccattggtcggggtaacctcctgagtctgtctttgctgaagtgattctgatgataataaaatgttccttgaggtacctgaggggcactctggtaaggctgttgggttggcagatagaaacaggtctgcagagtgcagaagagcctggtctaggccaaagatcaaggttcagacatatcagctacagtcatgaatggacaccatccttgaagacagtcactgcacacacctctcttgggattgcagtcagtatcataaagctgaaaacaactgctattgattactgtgcagagccccaggctggagaaggtctccatatctgcagaatggattgtaagcacatcgttctacatcctgaaagacaggaacaaatagggggcaatgctagaccccttgccatctagtctgaagtcaaacaattgttcacgaaaaaggaaagctt

SEQ ID NO: 195549 - DNA, 1000 bp, Homo Sapiens
acaagctgacatttcactctagcagtcctgtggagaggcccatgctggaggaacaactgaagcctcctggcagcagctgtaggtgtgagcttgaatacagattctgtgaccccttcaaagggctgaagccctggccaaaatctctgcaatctcatgagagatcctgaggcagaaccaccagccaagctgctcctgaattcctaacctaactatgacataacaaatgtttgtcgttttaagaggctaaattttggagtaatttttcatgcagcaatagataactaattcagggaggagggagttcagctcattcaagacattaaaaggaggtcaaaatggcctagcggaagcagtgacttcagcattcttatgaattgccttatgcacatgctagaagtgcagattcctggggctcactttcagagtctgattggtagatctgactggggcccagatatttgcattttaaacaagcatcttgggtaattcacaagcagctcacctgaagaggacactctgagaggaccctgtgtgggaggacttgtgggctgggtgacccacgttgtggctggaagataagcagaggtctaatgtgcatcacattaaaaagcaaaacaaaacaaaaagacaaacctttttcctgagaataatgaacagccatgtagggttttgggcaggacagcagctaaagctataagcagaggataaagcctgcttggttttcttctcttgttgacctggcaatgtgaatactggcttatcaacagcttgacacagaaccttaaatatggagaggtgaagacaagtaggatttaaggcctgcctttgaaggactcacagataattcttaaaagtatacataagaacttgcatccccaagtgagagctctctccttcaaagttaccggcgtgaaaggttgttctcattctaacaaagcggggctgcccagagctttttttgaaccccacttctggtaatcattttctgagtcagttcatg

SEQ ID NO: 195550 - DNA, 1000 bp, Homo Sapiens
gagcttcccattccttacctgccctgtgacaccacctctctgcaggtttctggtggaaattaaacagcgtgtgggaaatgcctgccacatagtgataactgaaacacactggcctgatgcttgatgaattctgtggacagatgtgcaacaagctttgctttctagcaaatgttctaggatacctttcacgtaaaaccctatcattttatctcccacctttgatatgtcttctcagcatttaggctcctttttctaggtggactgttggttctgacaaacccacaatattcctttgatccctctctcactcactttcctgaccgctcactttctagaagagactgctcctctcacatgggagtctggtcccaagctcttcagaagaccctgcgtcaaggtgccagcgaggactagagccctgccttatacttcagtcagggtgccaggtgcctgaaaaggggcccaaagtgacacccagggccaccagatttggagtcccaggacaaagtgagttgggagggccttccagtttgggaatgaccctgggtttctcttttcctttttttttttttttttttgagatggagtctcactctgccacccaggctggggtgcagtggcacgatcctggctcactgcaacctctgcctcccaggttccagcaattctcctgcctcagcctcctgagtagctgggattacaggcacccgccaccatgcccggcttatttttgtatttttagtagagacagggtgtcaccatgttggccaggctggtctcgaacccctgacctcaaggtgatccgccctccgaggcctcccaaagtgctgggattacaggtgtgagccaccacccctggacaagcctgggtttcttgatacatttctcctcagaggtatcagcagtgataccccagcagcaatcagaaagcccaggttggccaagcgcagtggctcatgcctgtaatcctagcacttttggaggccgagtcgggtggatc

SEQ ID NO: 195551 - DNA, 1000 bp, Homo Sapiens
ctgggactagttctgcagagggcatggaactgtgctgaagggaggcctttgagaagttggcagctctcggtctgtgaagaaagggcgtttcagtcctgtggctctgctggcctgccctccctggcagccacacctgttttgtccttctccctacacccggccagacgtctctcccagagtgacagcagcaactggggacatgtacagaggctccttctcaggcctgacaaaggcactcagaacctggcccaggcctgcagggcagggaggctggggagggggcaggtgggagggccagggacacagacagctgtgggctggtgtggcaagcatggccctgccccagaacaggtgaagtcaatgtgagcggaggaggagggtcccctggggttttttccaaggataaaagagaagacagtgcagagacatctcagcacacagtggcttaacttcatgactggggtggttgtgagctcgcggtttgctcagaaaagacctggcaaaaagggctgagaagacacagctggtggaggggtgttcctactcaggctgggaggacagccctgtggaaaagtgtggtggaaaggacacaaagaacaggctgggagagaagcgttggaggacacccctgatgagacattgagtcaatgccagaaaaagtctctctaggcagtgcccatgagagggttacctgaggcccatggggtcttttcagggaaaagaactaggtggtttttttttgttttgttttgttttttttttttttttttttttttgagacagggtctccctctgttgcccaggctagagtacagtggggcaatctgggctcactgcaacctccatcacctgggttcaagcaattctcatgtctcagcctcccgagtagctgggactacagacgtgcgccatcacacctggctaacttttgtatttttggtggagacagggttttaccatgttagccaggctggtctcgaactcctggactcagatgatc

SEQ ID NO: 195552 - DNA, 1000 bp, Homo Sapiens
ttccaaataaactcttgggcttcttaacctttggaagggtacctgtctttggagagagaaagcccattttggtgagtgggacccaggtacccagctttcctctgagcaggggtgtccgagttgggagtatgacagtgacagcagtggccagctgaacacgtaatgacagtagctgaagaggagtcactgatccacccccaacctgccgcaagctgagtatgaagagcagctgccgtgggcagggaagtgaggaatggctaagggagcgaggggaaggctttaaaaagccaggtttcttttgaagccgtagagatgatttacatttcttgagctgtctgaaaggaattactcatatgactctaaagctaccatatttaaaaaacccagatctgggaaacaaaatgcctatggtgctagttctttaagaatgtagaaatcagcttgaatttttgactgtttctatacagactgcttttgtagcaatctaacatgaagcagtgagcatgtctttgcagtggaggtgcagcatagtgagtagccatgcggataaccccatactcattggcagtatgttataatgtgagggcccgcctggcctgggtaggctaaagagcagtggtccccaacctttttggcaccagggacccgtttcatggaagacagtttttccatggactgggtggggtgaggggtaaggggatggtttggggatgaatcaagcacattgcatttattgtgcactttattattgctacattgtagtatgtaatgtaataattatacaactcaccgtaatgtaggatcagtgggagccctgagcttgttctacaattagatggtcccgtctgggggtgatgggagacagtgacagatcatcaggcattagattctcataaggaccatgcagcctacatcccttttgtgtgcagttcacagtagagttggcactcctttgagaatctaatgccaccgctgatctgacaggaggcggagctcaggt

SEQ ID NO: 195553 - DNA, 1000 bp, Homo Sapiens
gtctcctttcccaaagcatgctgggaaatgtggggatgtctccttagaacaacaaaatagttgcaacctttgaagtttaggagaagactagaaggttagtgttcagtgtgtgatctggaagcttgcatttgtaagaattaaagaaagaggaggccaggcacggtggctcatgcctgtaatcctagcactttgggaggccaaggtgggcagatcacctgaggttgggagtttgagaccagcctgaacaacatggagaaaccctgtctctactaaaaatacaaaattagccgggtgtggtggtgcatgcctgtaatcccagctacttgggaggctgaggcaggagaatcccttgaactaggaggtggaggttgtggtgagctgagattgtgtcattgcactccagcctgggcaacaagagtgaaactccatctcaaaaaaagaaaagaaaagaaaagaaaaaggaaaaggaaagaaacatgaaatgtggcttgacggtgaaggacaggtttattttagagaaaaccaacctgaggggggcttttggctgagttaggttagagagcccttttttttttttttttttacagactaaggatatttaagagttttggaagggggtgcttatctaggttcggaatgttttcatgtgaggaaaagtttattgtggggttggaaagtctctggtcggaagggaggctatctgggggttggcatgtttctggtcagagaggggtttatcttagggttggaatgtttctggttatgctgatggtagccattaggctgatgttttggggctggatttagctgatttttttttgagacagagtcttgctctgtcacccaggctggagtgcagtggtgcaatctcggctcactgcaagctccacctcccggattgacgccattctcctgcctcagcctcccgaatagctgggactacaggcacccgccaccacgtccggatttagccgatttttaatcaagaggaactaagaat

SEQ ID NO: 195554 - DNA, 1000 bp, Homo Sapiens
ttgaccactgggatttgccagagctccgcactcagggggctgggatggatgagaagtcagggttgctctgctccctgctcaacaaccttctgtggctccccagtgccttcagaatgaaatccaaatgccttccctgtggccaggcctcctgaacccagcagacagtgctgcatgaagcctagggccgggatgcgggagtgggcttctactcctggcttggccttaggtggaggcagatccttggcccctctcaatgtttcctcactgggaagttgcggggcctggatgaggagtctctgggtactgatctcagctcccctcgaagatccctctcctgaccacgcctgctttcttacttttctgccctcatatgacaaactcctctgagcccttttcacccttaggggcccaactcaagtgcccgtcacttccatacctctatcagccagaaaggatgtgtctgtgtctgtctgagctctctcacatttacactctgcctgatatcagctagccctggacacgttgggtgataaatcccctcctgtgttcaccaagtaatggttatgagtggggaccctggagctgagccatctgggctccatctttgctacatcacctactagctgtgtgacttctggctggttacttaacgtctctgggcctgagttttttcatctgtcaaataaggatagtgataatggtagctacttcactgggttgtcgtgagaactaaatacacgtggagcacttagggtgtacgtgtgggtttcctgggtggctggctaggccctccccagatggtgggaggggtccccccagaagcagccccttgaatgctcaccctttcttggcgagaaaggccatgcgcctggcttctgccttctctctcagcactgcagggtcctgaacaaaatggtcgggctgtggaaaggagaggagaccaaatctggagtcaggagctgccacattttcctaagcggcgatgaggccctgctcaagt

SEQ ID NO: 195555 - DNA, 1000 bp, Homo Sapiens
tgcatgaaaagaaaaaagatcttaaataaactaactttacaccccaaagaactagaaaaaagaacaaactatatgccaagttttcagaaggaaagaaaagattaaaacaaaaataaatgaaatagggactagataaaccatagaaaagatcaaaattaaaaatttattttttgagaagataaacaaaattggcaatagttaagaaaaaaagactcaaaataaaaaatgaaacaggacacattacaattgatgtcacagaaataaaaaggataaaagactactatgaacaattaagtgccaacaaattggataacctagaaaaaaatgaacaagttcctagaaacatacaacctacctgaatcatgaagaaatagaaaatctgaacagactaataatgagtaaggagattgtatcagcaatcaaaaatctcccaataaaaaagctcaggacaggatggcttcaactggtcaattctactaaacattaaaaaaaaaaaaaacaaaaaaaccaatccgccttaaactcttcaaaaatattaaagatgagggaacactttcaaacttattttatgaggccagcattacctttatatcaaagacagacaatgacactacaagaaaagaaaactacaggctaataaccctaatgaatatagatgcaaaaatcctcaatgaaatattagcaagccaaattcaacagaacattaaaagaatcatacagcatgttcaagatggatttatcctgaggatacaaagatgttgtaatacatgcaaatctataaatgtgatacatcacattaacagaatgaagaaaaccaaatgatcatctcaagaaatgcaggaaagacatttaaaaaaatttattattattttatgattaaaactctcaatgaattaggtatagaagaaatatacctcaaaataataaatgctatatatcacaagcttacagcgaacatcgtattcaatggcaaaatgattaaagcttttcctctaagatc

SEQ ID NO: 195556 - DNA, 1000 bp, Homo Sapiens
atcccaagagagaaggaggtgaatgctgtcctcaggggctttattggcatccagtgggggtggtctcactcctgggatgaggacactgggaccccactgcctggaaccccagtgcccagctcccctttgggttgcctttctcgagaggtgtgggggtctcaaagtgtcctctctcctagacagtgctggattggcagagtccacatttatctcttaccttttccttttacaaagtcaaccaagcttggagattcccaaattcatcctttacacacatcagaatgttctacaaagggacagtcaaacatggttagcatgggaagcattctccctccctctggtgacacgagtcaccatgcctggataagaaggccatcacctggctatggcagcccaggcgatcaaggacaggagaggctccagttgcccattgctctgaaggacagcctccctggcacggacagatgcgagctgtggccctggtcatgcctgtggctgagtcatcattttcaggttgttgtagctctcagtgaagaagcttactggagtccagttggccaaaagcaagcagcttgtgcattggagtggtcgccgcgcctgagcaggtccctgtcttcttcccggatgcacccctgagccacgcagacccccccccacccctctgttagaaatgggcctactcatgacctggtcacctggcctaggctgctcacaccagaagctggggcttagctccccaagatcccatcagaggccgggaatctattttgatggctactttatctcatttgaggatttagaattaaaaatgataatgttccaagcattcctctgagcgagtcctgctgcctccacagcggtccacgtttatatgactctgaaacatacatggaaccacttttggttctgcttttcaagggacaaagatcaccttttgtgggaaatattctaatatatcggctagcaacttcttaactttattttctaagattagatgatc

SEQ ID NO: 195557 - DNA, 1000 bp, Homo Sapiens
gccaactaagacaaccagcatccgtaccccttattttggaagcagctttccaattctaggaagtatttttttttttttagacagagtctcactttgtcacccaggctggagtgcacagtggcatgatcttggctcattggaaccttcgcctcccaggttcaagtgattctcctgcctcagcctctccagtagctgagattacaggtgcctgccaccgtgcccagctaatttttgtattcttagtaaagacggggtttcaccattttggccaggctggtgtgaaactcctgatctcaggtgatccacccatctaggcagtcttaataggaaagtcaaggcccggtgcggtggctcacacctgtaatcccagcactttgggaggccgaggcaggcagatcacgaggtcaggaattagagaccaacttggccaatatagtgaaaccctatctctactaaaaatacaaaaattagccgggcatgatggtgcgcgcctgtaatcccagctactcaggtggccgaggcaggagaatggcgtgaacccgggaggcggagcttgcagcgagccaaggtcgcgccactgcactccagcctgggtgacagagtgagactccgtctcaaaaaaaaaaaaaaagtcaagcacagggccctctaccaaaccaagccaatcagactctccagggagaatgacagagagactctaggtgggtgaaatggggttattctcatggcatgacctaaggaaagaaggtatgtatatttctgactaagattcggtagcttcctgctcctctttcttcccaagacctggctcatcagtgtttcctttaattctgtaagctataaagtgtccttccaataaattcctttttccatctaggtgagtcagagcttctttcagttttttgcagaactgattcagcaatggtagctgggagtgagcactgcaagcaacagaactgctgtggaaatagcagaattaggtgcaaggcaatgagaattc

SEQ ID NO: 195558 - DNA, 1000 bp, Homo Sapiens
tattttcctaatactctttagctttaaaccattttctatcataagactaaattaagagtatttcacaaaatcgtttttagttacctctttttgcctttttcctctatgatctctaatttttaattggcttgcacctccatactttatgaatggaatcaagtgcgatacttacaaaataactctgatgcattgattttaaatgagccattttattattaaatttattggcagatgtccttgttaacagtgtttttcacctgttataaagtataatacatgaatcaattcataaatatgttgtaaaaactataaaacattgcaatatagttacattaattttttaatagataatgttaaaactcagtgcctctatcaaattttcattcatacagtattcttcaaaggaatgtaaattctgtaacttgacaggcatatttacagaaaaattttataatttactttttttttttgagacgaagtcttgcttgtcgcccaggctggagtgcagttctgcctcccaggttcacgccattctcctgcctcagcctcccgagtagctgggactacaggcgcccgccactgtgcctggctaattttttttttttttttgtatttttagtagagacagggtttcaccatgttagccaggatggtctccatctcctgacctcatgatctgcctccctcagcctcccaaagtgctgggattacagacgtgagccaccgcgcccggcctaaatttgtataattttctggtaccagaatctgattacccttttcaaacaacccatatgggtttgttttttaaaaatcatttggtgagtggattagaaattttgataagtatatttcttccaatttggtttattttaaaaatgtttctactgtatttactacaaatgattatagctttttcaaaaataatacagtatctaataatgcttgtacagtgatcttcaaactgggataaatatatctttggattccatacttggaattc

SEQ ID NO: 195559 - DNA, 1000 bp, Homo Sapiens
ggggaagagggcaagtcgtggagggcggctgggccacagactcacgggggcgggcaaagcaggcctctgcctcagggggctcatggatgcccctggccagcccccctctctccccagaagccctcggggaccccgttcctatgcaggcacccagctggccttcccacggcaccctgactctcatgggccacaactgtgagctccaggagggtctgtttctacagagccaggccccaaggcaggcgcttctgttccagcagaagcttccacactccctgcctgcccacagacatcgccctggctgggctcgcctgttgggaggtctggaggccggaaacgcaatgctgtatcctaaaatacatacatgtatgtatatgcacacacaaacacatacacacacacgcacacacacatgtattttcttgagacagggtctcgctctgtcgcccaggctggagtgcaacggtgcgatcacagctcactgcagcctccacctccagggctcaaaccatcctcccacctcagcctccgaaagtgccaggactccaggcgtgagcccagcctctatgttggttatgctttgcctgtgttgaactgatcaactcagactttcactccaaatctgggtccccaggcgcagtgacgagtctgggtcctgctgtaccctgtagaccccaagcaggcactgggtgactcaggggcacccaagtgaagcaacagcgccccctgcccagagcctctcaatgacgaacccagtgggaagctgcccaggtgtcggggctgagacagacccacagggagaggagtgaggggcgcggactcaggcaccagcctgggcaggctaggtgaactccagcccctgggccgaatccggccaccacctatttttgtagggctgtgagctaagaatggtttttccatttttaaaaagtggaaagggcccagtgcgatggctcatgcctgtaatcctagcactgtgggaggccgaggcgggcggatc

SEQ ID NO: 195560 - DNA, 1000 bp, Homo Sapiens
gccgcacgctacggtggctgtgtgttgcccaacctttgcccaggtacgcacccaaggggaggttatgctgggacagagccccagccaggcagccccacagccactttctgctcctgagccatgccaccttgcgtaagtcactctgcctcacctgtcttgagcttccctggcttgcacagcataagaactgggcagcattgtggttctcagctccatggtggacgccttctgggcattgtgggtagggaaagcattactattaataaaggactggggctggcccctaaagcatatgccaggtcatcccattgataggatcgcttcccccacttatgttacatgtgctttcgctttttttttttttttaatggagtcttgctctattgcccaggctggggtgtagtggcgagctctcagctcagtgcaacctccgcctcccaggtttaagcaattctcctgtctcaggagtagctgggactacaggtgcctgccaccattctggctaacttttgtatttttagtagagttgggggtttcaccatattggtcagggtggtctcgaactcctgacctcaggtgatccacccgccttggcctcccaaagtgctaagattataggcgcgagccactgcacctggcctctgttttttttgtttgtttgtttttgtttttgtttttgagacagagtctcactctgtcacccaggctggagtgcggtggtgggatctcagctcactgcaacctctgcctcccacattcaagcaattctcctgcctcagcctcccgagtagctggaatgacaagcatgcaccactacgcccggctaatttttgtatttttagcggagacggggtttcaccatgttggccaggctggtcttgaactcctgacctcaggtgatccacctgccttggcctcccaaagtgctgggattacaggcgtgagtcaccgcgccaggccccatgtgctttctcgaagggaagtgaagtgactggaattc

SEQ ID NO: 195561 - DNA, 1000 bp, Homo Sapiens
caggccatttaaaccctagatacacaggaaaactccctggggtacttttttttttttttttttaatggagtcttgctctgtcaccaggctggagtgcagtggtacgatctcggctcactgcaacctccgcctctcggttcaagtgattcaagtgattctcctgcctcagcctcccgagtggctacgattacaggtacacaccaccacgcccagctaatttttgcatttttagcagagacaggatttcaccattttggccatgacggtctcgatctcttgacctcatgatccacctgtctcagcctaccaaagtgctgggattacaggcgtgagccaccatgcccggccttttttttttcttttattgagatagggtcttcctctattgcacaggctaaagtgcagtggcctaaccatggctaactgcagcctcaacctcccaggctcaagagattctcccacctcagtatttgggagtacagtaaatagctgggattacagggccatgccaccatattgggcgaatttttaaaattatatatatttatatatatttatttttgcatatatttatgtatatacttgtttacatatatatacatttatttacatatatgtttatttatatatatatatgtatcttttgagacagagttttgctcgtcgcccatgctggagtgcagtggtgtgatctcggctcactgtaacctccgcctcccgggttcaagcaattctcctgcctcagccttcccagtagctggggttacaagcaggtactaccacgcctggctaatttctatatttttagagggggtttagccatgttggccaggctggtcttgaactcctgacctcaagtaattcgccagcctcagcctcccaaagtgctgggatttacaggtgtgagctactgcacccgacctaacattttttacttttgtagagttggggtctcactatgttgcccaggctggtcttgaactcctggcctcaagtgatc

SEQ ID NO: 195562 - DNA, 1000 bp, Homo Sapiens
caggacagtcctcaatttccacatgacctcagtttttccagctttgcaaggggagtatgaaaccagccctgaagtcttgctaagaggattcggggagctcatagaagttgtgagttggttcctccattcgcctgggtgttgtaaggggcagggcctgtgtcttgcttgtggcctgccagggtagcagctcagtaagtgagatggtatctcactgtggttaggattcacatttccctgatgactagtaatgtttccgtgtaatttcttgaatgatcattcagtaacaataagtgtaggttgagtttgtagaatcaggttgacctcctcagcctcgatttccaaatggagaaagcagagatttggagctcctggtcagaggagcaggtcggtgctggagccaggactcaaccttaggttgtacctctgagcctttgaacacttgccgtttctattcctcacagcagccctttcagacggaacgggtgttaccagattaggaggagagtggccactgtattctcagtgcccagcccagggaggcagatctgagtggagttgctaatgaaacatggaaggtgcttgagagctaactggaagggagggaaggtgtgcattcctgcaccagggcctttgcatgtacttgttactttctcctgctggccagctggagtgtctggaaagatctgccttactcagggaagccttctcactcgcactctgcccagttaggaccactgccctctagagaccctatagaattacagaggaggccgggcgtgatagctcacacctggaatcccagcactccagcctgggcgacagagtgagactccatctcaaaaaaaaaaaagaaaaaagaataaaccccacacacctttgccttccctttgctttccctcaccacacccccattctccccgcctcccagcccctggcaaccactaatctgcctcctgtctgcgtggatttgcctgtcctggacatttcctataaatggatc

SEQ ID NO: 195563 - DNA, 1000 bp, Homo Sapiens
ctgtcatctcctcggtcagttgggatgctgccggggtgtctgcctcagcctcggacacagagtggtgaaacagatgatttcgatggatatagttaatggaggcctggggtcggtgaaagtgatttaattgaaacgaagtcaaggaaagttttacaaagggagaaattaggtgttttctcctgagacttatgatctggtgagaggattatggtactgaaaatcctagcaaaggcatcaaccagcaatacttgtgagttccattagttacaatcatctattactgggaatgggaagggagaatggaatcaaagaaagtaagttaaaggtgtttgtattgaaagccagaaaaaaaaaataaaaaaaattaaaaaaaaaaaggtcagccaggtgggaaaataaaagagaaaaagaaatattttgataaaactgatacattgagattattcaactgaaataaatgttaagtgtatatgggtgattttgcaagaagtcctgccaaaatcacatgaggttaattattttgatccccattttctgctcccacacttgactgaggacattccagactggaaatgacacctctgccctcagtaacatgtctgcagcaactaatgatctctctggagtgtagctcaagttcctggagtgcaactgtaactctagaagcaaattggctttgcactaatggcttcgacataattgctagtagtttctggtccattctggcaagaaacacaaagaatgcaatttttaagtactctttttcttttttttttcttttcttctttaagggcctatggttcatcctgcaatatcagagaatacacaactgttggaagctcatttgtgcagaagcactagttagaccaagtcccaggatggtggggacttgaactgcctcatgcacattgtacccaagagcctggcccatgaaggtgaatcagtggatacttgaataaaaagaagaatatgcgctgaagttttctttgaggacattttt

SEQ ID NO: 195564 - DNA, 1000 bp, Homo Sapiens
aacagctaaaaagcagagacaattcaagcatccagccacagtgagtggacacagcatgggccgtccacaccacggaacgtgactcagccacaaaaaggaatgacgggccggccgaagcggctcatgcccctaatcccagcagttagggagaccaaggcaggaggatcgcttgagcccaggagttcaacaccagcctgggcgacagagcgggacttcatctctataaagaaaaaactaataaaataaaaatttgtttcatttttgggccaggcgcggtggctcacgcctgtaatcccagcactttggaggccaaggcgggtggatcacgaggtcaggagatcgagaccatcctggctaacatggtgaaaccccgtctctactaaaaatacgaaaagatttgctgagcgtggtggcaggcgcctgtagtcccagctactctggaggctgaggcaggagaatagcatgaacctgggaagcagagcttgcagtgagccgagatcgcgcccactgcactccagcctgggcgacagagcgagacaccgtctcaaaaaaaaaaaagaagaaatgttggaaggtagcaggagatctctgaagaggtctggtgggccaggacaaggtatcagaggtagagggcactgggtgggttcagaggggtcttggcagagggactggacgtgggggttcagagaaagggggtcaggccggctcaggggctcaaggcccgggatggaagcgggtgagcaaagctggttgtcgccgttttgccaaatggggcgcagcaagtgtctgtccagattgtcgccctcgccttcctcatccctggggcatccttggccaagtggtcgccctggcaaccagagatggggagggtctgaggctgctccaggtcagggctggggcagggctgggcagggcttcccagggacccgagactggcagggagacaagcaggggcctggttacctcgatgacggggtccgaggaatactgcttcaggatc

SEQ ID NO: 195565 - DNA, 1000 bp, Homo Sapiens
tgggcgacagagcaagactccgtctcaaaacaaaacaaagaaaaggccgggagcagtggctcacgcctgtaatcccaacactttgggagatcaaggcaggcagatcacctgagtttgggagttcaagaccagcctgaccaacattgttagtagagcaaaacgtcgtctctactaaaaatacaaaaattaggcaggcttggtggcgtgtgactgtaatcctagctactcaggaggctgaggcaggagaattgcttgaacctggaaggtggagggtgcagtgagccgagatcgtaccactgcactccagcctgagcgacagagtgagtctccatctcaaaacataaataaataaaataaaataaaggaactctaggagtggtcaagtaaaagtatagagcagggatgggatggatgaggttatggactaaattgtatcttcccacctccctcccaaatgcagaggttgaagccctgactcccagcgtgagtgtttttggaggtaggcccttgagggaggtaattaaggttaaatgagatcttaagggtggggccccctactctgagaggactggtatcccaataagaagagagaggccggggcttgtggctcatgcctgtaatcccagcactttgggaggccaaggcaggaggatcgcttgaggccaggagctcaagaccagcctgggcaacatagtgagaccccatctctacaaaaaaaatcaaaaaagtagctgggcacaggagcacgcacctgtagccccagctactcaggaggctgaggcgggaggatcgcatgagcctgggaggttgagactgcaatgagccgggattgtgccactgcactccagcctgagcaagagagacagaccttgtctcagagaaaaaaaaaaaaaaaaaaaagagacagcagggatctgtctccctttatgcatgtctagagaagaggccctgtgaggttatagtgagaaggcggaagagaatttccacagaaactgaattc

SEQ ID NO: 195566 - DNA, 1000 bp, Homo Sapiens
gagacatcaactcatggatgtgttgtagcatagggaagtttgaagcagtggaaggagatgtgatcaccaacttatgtccaaggagaatctcaagcaataccagagggctctcctgagatttcgaggtggccagggcagccctgaggcttttgttacctctgggaaggacctgaactcgtggatccctgtgggtccctttgcacttgtgtcaggcgctctccatcaaggatgctgatcactttgtcctctttctccacccttgcctggtatccccatggctctgaactcagccctgggagtccttgaaggccaagctaggacaagtcccttccacatgaccagcatcatcagcagaagtctgaaaagaaaaggtagcatgaaggcatcactcaaagacagtagcaagctgatccctggaaaaccatagagaatgcaggcaatgagcacttgtggcccagagcagtccaaagacctgtaagatcacccacctggccttgatgctagtgtatgaggactgtactcaagagtctgatgtgggggttaagaacatggactctgaagtcttaccttctgcgcttagaatccctgtttcatgccttggtggctttggacaggttgtgtaacttctctgagcctcagatagtaaaaagagcaaaacaactgtgcttccttcagaggactgtggggaggattaactaaaataattcatgtaaaggaccccatgcataatgagcatcagtaaatggtggctgcgatgattatgaagcactctggtttcaccgtttgctcatgaggaaagaatgactggggaaagggagctggttgcagacagcctcacctgtgagagaagggctggagctgctaggaattgcttcaaataagcctctagattaattactgccagaccatttgcctagaaactggcaaactttagggcccctagagttttcttcctgcccagcacaaggcccttcatagcaagaacagaagccgatgagga

SEQ ID NO: 195567 - DNA, 1000 bp, Homo Sapiens
tggttttataaggggctcttccccctttagctgggcacttctccttgctgacaccatgtgaagaatgatgtgtttgcttccccttctgccatgactgtaagtttccggaggcctcgtagccaagctgaagtgtgagtcaattaacctctttcctttataaattacccagtcttgggcatgtctttattagcaatatgagaacagactaatactgtagaaatattctaacagcaaaacctgtcaagtctgcagccttcaaagcttgctttaagcaagatttaagactatcatggtttgttgtcacttaatcacgaagtctacatatcttccctttatcaggatgcaatgacaaaggtttatcttgggccaggtgcagtggctcatgcctgtaatcctagcgctttaggaggcagaggcaggtggattacatgaggttaggagttcgagaccagcctggaaaacatggtgaaaccccgactctaatacaaatacaaaaattagccaggcatggtggcatgtgcttataatctcagcttcttgggaggctgaggcaggagaatcgctggaacccgggaggccgaggctgcagtgagccgagatcgcgccaatgcactccagcctggacaacagagtgcagactggactccatctcaaaaaaataaaagttttttcttgaactcaaaacagattagataagcacactatctagatatttccttctcttctgcatctctcactacaatgtattatcaacttttgtctctctgacaaccagctccctccagactctgagctctttgagggcaatgattctatttcatttctagttgtgttcctaatacaaataagtgatcaagaaatatttgacattaaaagcaaaacatatcatattcatttctatttacagaaatcctaatatcaggggttcaccaagcctacgtaatggaaagtcacaaaagttcgagaatatagcaccttaaaactaacaatgtatatatat

SEQ ID NO: 195568 - DNA, 1000 bp, Homo Sapiens
gggagctgtgttcccgccactgcactccattctgggtgacagagcaaaaccctgtctcaataaatcaataaataaaatattaatagtaatttaaaaaatcaggccaggcacagtggcttacgcttgtaatcccagcactttgggaggcagaggtgggcggatcacttgaggtcaggaatttgagacctgcctggccaatatggtgaaaccccgtctctactaaaaatataaaaatcagctgggcgtggtggcgggcacctataatcccaactacttgggaggctgaggcaggagaatcgcttgaacccaggaggcggaagctacagtgagctaagattgcgctactgcactccaggataggtgacagagtgagactccatttcaaaaaaaaaaaaaaaaagccaggtgcaatggctcatgcctgtaatcccagcactttgggaggccaaggcgggcagatcatgaggtcaggagatcgagaccgtcgtggctaacacagtgaaacctcaattctactaaaaatacaaaaaattagctgggcatggtggcatgcacctgtagtcccagctactctggagggtgaggcaggagaatcgcttgaacccgggaggcagaagttgcagtgagccaagatcataccactgcactccagtctgggtgacagagcaagactctgtctcaaaaaaaaaaaaaaaaaagtcgtgggaagcagcagcagcttccccagctcctcagctcttccggcatctacattcggtcccactccctgctcttctgctctgcacatgttcagtagccgccccacgtggctgtgcccttggcctttcgaggctggtcacggcaggttactaccagtcaagtcccagccttgaccagggtgcacacaggtgtgagtctgagccaattgtgggcctaaacttttaaaagtatgggtcacctgccaggcgcggtggctcacgcctataatcccagcactttgggagtccgaggagggtggatc

SEQ ID NO: 195569 - DNA, 1000 bp, Homo Sapiens
tctcccgcagtcttcttcacctcaattagtggccactgaagccaaacttccgggagccatcctaaagatccctcttttccaccatcaagatttcctttggctctgtattgaaactaccatcccccagaacccactggcttctcccctccactcgcaatggccttgtctggattcctgaaatagcctcctaatccgtcgtactgcacctgcccttaaccctcacactgaaatctcaacacagtagctaaggtgatattttaaaaattcaagtcggccgggcgcagtggctcaagcctgtaatcccagcactttgggaggccgaggcgggcggatcacgaggtcaggaggtcaagaccatcctggctaacacggtgaaaccccgtctctagtaaaaatacaaaaaattagccgggtgtagtggcgggcgcctgtggtcccagctactcgggaggctgaggcaggagagtggcgtgaacccgggaggcagagcttgcagtgagccgagatcgcgccactgcactccagcctgggcgacagagcgagactccgtctcaaaaaaaaaaaaaaaaaaagtcagattctgtcatttcttgctcatttattctaataactaaatacctacatttagaaaaacatccaatcactttacagtggcctcaatgtaaccaacagccccacataatctaccccatttcctctgcgaagctccagccacccctcatccgctccagggcagccctgcagctccctggccccattgcacatgcgacatgcagagcactgcgagttcggtgtcaatggatccaccatgtaccctaacccatcacagtccccggaagtgaggccttatcacgtggagtaaagtggaggatcacccttcctttaggtgtctttccacttcccatcttttaaatatccatgtctcaggtatttcttctacatgcattgagcatcccatcagatggcatagtaacttttgcttcaaacatcaaatatcgct

SEQ ID NO: 195570 - DNA, 1000 bp, Homo Sapiens
tctaaatatactgaaagctctaaataaatttatttagaactaataaatgcagtaaaattgcaggatacaaaatcaacatacaaaaatcagttgcatttctatgtactaataattaactattcaatctcatttctaaacattgaaaataatgaaattcttagaaataaatttaactaagaaagtgaaagacttgtatatgaaaactataaaatattgggaaaagaagttaaggaagacgtataaacaaatggaaagacacctcatgttcatggactggaagacttaatattgttaaaatgttcctattacccaaaacaatctatagattcaatgtaatctttatcaaaaccccaatgacatttattacagaaatagaaaaaaaattaaattcataacaccccagataaccacgacaatcttgaaaaagaacaaagctgaagacatcaaagctcctgatttcaaaatatattaaaaatcttcagtaattaaaacagcatgttactggcataaaaacagatgtatagaccaatgaaaaagaatagggagcccaggctgggcacagtggctcacacctgtaatcccagcactttgagaggccaaggcaagcttgagctcagtagttcaagaccagcctggacaacatggcaaaatgccatctgtacaaaaatacaaaaattagccagtcatggtggcatgcagtgcctgtagtctcaactacttaggaggctgaggggattgcttaagcctgggaggcagaggtggcagtgagctgagatcacaccatcacactctagcctgggtgacagagtgagaccctatctcagaaaaaaaaaaagaatagagatctcagaaataaatcaataaatccaagcctatatggtcaaccgatcttcaaaaagggtgccaagaagaatacacaatggggaaataatagttgctccaacaaatgatgtcagaaagtggatatccatatgcagaaaaatgaacttgaactctgatc

SEQ ID NO: 195571 - DNA, 1000 bp, Homo Sapiens
tttttagtagagatggagtttcactgtgttagccaggatggtctcgatctcctgacctcgtgatccgcccacctctgcctcccaaagtgccaggattacaggcgtgagccaccgcgcccggctgacagaatttaaaataatggaatggatgactttacgtgaagggagtgtatatataaaaaagagggttcagaactaagacccaaagaggataacacttacaggtctggaagagaaagatccaacatagaagaatgagaaggagcagcagtaagacaagagaagaaaatgtctctaaaaagaaatgagtcaactgtgttgaatgatgctgaaaattcaagtgttcattagatttgtcaatatgggtatcttcacaagaacagtttcaatggagtaatgtgagtgaaagcctgaagcagtttccaaaagataaagggggcaaaatggaagtggtaaagcaaatgcagacaactcctctttttttgctgagatggggagcagagaggagatggaaagggacaattggttttcttttgttttaagatggaagatagtagagaattttgtatgcaacagaaacaacctaatagggatggtgaaaataagcacctactatgttccaagtgctaggaatacaatatgaacaagatgggtacaggccctgcccttaagaaactaaataacaaaaaagctattacagattgtcataagttatttcagggaatcaaacttttccttcaaatataaattggcttgaaatcctcatcttgaattctattataagtgcacaaaactatgacaaaaattatttcaaaaaatattttccaaacatttaatatgcttaatatgtatctgtgctagaatcgagcaatacaataaagaacaagacatagtttctgcatcaaggaccttacagtctagggagaaaaaaacaattgacaggctgggtgcagtggctcacgcttgttaatcccaacactttgggaggtcaaggcaggtg

SEQ ID NO: 195572 - DNA, 1000 bp, Homo Sapiens
accccagcaggtgcctggacccaaaggctctggtctgggctgtcccttagagccaggtggctctgggcaagcacagtccccggacccagggcttccccatgcttaaacagggctggcacggcgtttccagggtattgagagataggggacctgagccttcctcgtgtctaaatggggctggcacagcatctctggaggatcaaagggagaaacggcagcagggcctccagctctaccacttgagtgggtcaccagccccacatccccaagccgacttgtttgattggcatcaccccagcccacctaaggactctgcacgtctgagagtgcaaggagccactaaaacagcctggcggggccaggtgcggtggctcacacctgtaatcccagcaccttgagaggctgaggcaggtggatcacttgaggtcaggagttcgagaccagcctggggaacatggcaagaccccatctctacaaaacccacaattagttaggtgtggtggtgcatgcctgtagtcccagctactcaagaggctgaggcaagaggattgccttgagcctgggaagttgaggctgcagtgggtcatgattgcaccagtgtactccagcctagacgacagtgagaccctgtctcaaaaaacaagaacaaacaagcaaagcaaaaccccagcctggaaggaggtttcacgtgcatcactggcaaagccactcagactgatcacctaaaatctgccagaatgctactgtcaagaatgcaaaagaaggccgggtgtggtggctcacacctgtaatcccaacactttgggaggccgaggcgggcggatcacgaggtcaggagattgagaccgtcctggctaacacggtgaaaccccgtctctaataaaaaatacaaaaaattagccgggcatggtggtgggtgcctgtagtcccagctactcgggaggctgaggcaggagaatggcatgaacccgggaggcggagcttgcagtgagcagagatc

SEQ ID NO: 195573 - DNA, 1000 bp, Homo Sapiens
gctgagagactttcttctgaggaagccacatggtcttcatatgagcaagtgtgtgtagatggataatgatgataatgatgatggtaatggacgttggttatacacttactgtgtgccaaggactaaatggtaaacgtgtctcagcaaagtagctgtctctccagcactcattcttaccttcatctaaaggaatagcatttttaggtggttcatggctggacagaataaaactttcattttcttacctcttctctgactgataaagtcacatgactaatttctagtcaatgaggtattactacaggtgtcctatggctgctttctggaaacttccttaaaagacagtgcaaagttagttactcttcggttctttgtcatgcttttcctcccttccattacttggagcattggttagatgactggagagccatcttggaccacgaaaattaaaggatgatttttagtgataaggaaggcagccaggactctgaggatcctacagagcagagctgtcctacaggccccagacaactggcctttgggcttttacatgaaagagatgtaaacatctatcagatttaactaactgtgattgcagatttcctgccccttggagataagcctaggttttactaattcttattcagccctcacagcaacccagcaaaggaagttactgctgtaattcccattttacagatgagaaaagtgaagcacaaaaaagcttacagccaaagggagaaagagctggaatcctcacagtctagtccagaacaggagctccatgaaggccctgttctcattcttactcgttgtgtctcaaattggaactccacaaggcagtacaagctttagaaagtaataatactgatagcagctaattactgaatccttatggcaagctaggcacttactattttatgcttaggaaagctgaggactggagatgttaagcacactggcctaggtcacacaactcacaagagtcgcaatagaattc

SEQ ID NO: 195574 - DNA, 1000 bp, Homo Sapiens
gagctgtcctagtcctcagggacagtgagtgctcacgaggtcattcccaggatgaacacacgagcccttcacacagcactgcaaaaactgccttgttctgacgcctgcgacgagactcactcccagagggtgcaaccagcacagccagtgagagcaggggaggccctgccaccccgctgcgcccctcacctgagccccggccccagcctgtcttgacgaggatctcgtacttgaagcggccccgctgcccacagaaagggatggcgcggccccggctggcatccaactggtccagcttgtgcaggatggcggccatgaccatgtaggtcaccaggcacacagcacatgtcagcatgacgatgtagtttacatccgctgtcggctcctgtgaggacacagccgccgggcccaggaggtcacgtgcaagctgtgccttctcaggatagagccgagcccacccaggccctcctcgactctgcagaggctcccaggagcacagggtcactcacaggaaacacaaagcggacatggcttgggggcacgaagaggctggcgccgaaggcggtgaggtggcgggtgaggcagacggcctggcggggcgaggtctcctccaggggcagcagcccctctgtccgccacaccatgtcctcctcgctgaagtactggcacagggacgtgtacaggcccacggacacctgcagcgccgaccagcggaagtggctggagaggttcagatggtaactccccgctgggtctctgctcctgggcagggaaggggtagcggacgtgagcccaggctccgccaggttggatgtcgcagtctcagaacccatacccggtccagtcccctcgctgcctgccgtccccatggggccagtaacccaggcaatgctgacccatgatgccctgccctgccctgccaggctggcccgcagagctcaccccggggaaatgaagaaggtgtagggccggtggtcagcaccctggagtgactctgggc

SEQ ID NO: 195575 - DNA, 1000 bp, Homo Sapiens
aagtaagagattagagcaccttgctgtagcacagaaacaggaaaagatacattaaagaggctaagaaggagcgttttgcattacctagtccatcactctcccaagcccagcccagaaattatagtgtggtgagataccctccgtgttagaggatgaataaagtgaacaccaactttgctgtggaccctggcagcaggactactccactgaaacccaatgaccagctggcccccttgacccaaactccaaggtggcaccctcagctccaggcacaaagctggcacccacagatccaagctccaggataacccccatggatacaggctgtcagcctacccagcccctgtggctccagtctctaagctggctcccatggtcctacactctgacaaacccagggttcaaacccactccaccgcatccaatatccagacctggcccaggagaccccaagtgccaggccagctcctagagaccaaagctttagaaccacacctaaaaacacaggctccaggctggcctccatatccctaggacagcacccacagcctcaagcttcagactgacccctgtggaatccagacccaaatatgccccagaccagacccaagctccaggctggttcttgtgaccctatgctccagtggacccagggtccacgcctgcccaagcggatcctggaagcagggtgacccctatgagctcaagaccaaggcatattatgggcctatgtccagaccaccccagcaccaggtcaacctctgtggacccagacttcaggctggttcccatggacagtcctcaggcctatccatttgttgaccctggcaccagaccagcatgtctgataacttcagcagtaatcccacccacaaacttctctatacagcccacccaatatctctgatgaagggctttcactaccaaagctagtctgtaaagactagaagggatgcctacttcttcaaatgttcaacaccaaagcaagttcacaaagatc

SEQ ID NO: 195576 - DNA, 1000 bp, Homo Sapiens
tatataggggctcagtaagtttcattcaatgaaaggaaaaaaatgaagccatgagcaaatgaaggcagtgaatgaacgaacaacttgcacctagtcagaatttaacctgctttattttttatttttatttatttttttgagacagagtcttgctccgtcacccaggctggagtgcagtagtacaatctcagctcactgcaacctctgcctcttgggttcaagtaattctcccaactcagcctcctgtgtagctgggattacaggtgcatgccaccatgccccgctaatttttgtattttttgtagagacggggtttcaccatattggtcagtctggtcttgaactcctgacctcaagtgatccacctgcctcggcctcccaaagtgctggtattataggtgtgaaccactatgcctggcctaacctgcatttattggataatgaataaagaagggaataaatgaaagatgtgactttgtacctagtaagtgctcaagctatatttatgggataaaggaatgcaagcagcaaagaatgaataaggatttggcatatgatagatacacagcctgtaatctggatggatgcacagtgacagaggaattgacagatggaggtgtgaaggcaggaggaaatgaatgagtagacaacctgtggcacagtaggcgttcagtcagcatgaatgaatgagtgaatgaaggaatgaatgagggaaggcatgagattgcacccatttggtcctcaccgaaaacattgggtggaggaagaaattgggagttggcacagactaggcatggttggtagcacaactgcctgatctttggcttgcaggtggctctgtctggagaatgccccatgctatgacaatgttccccaaggcatctttgcccctgaattcttcttcaaggtgttggtgagcaataggtgagccaggcaagtggcccaggtgcgggtcaggggctgcccatggaatgcctggcttctcctctaatcctggatc

SEQ ID NO: 195577 - DNA, 1000 bp, Homo Sapiens
gacctattctcccacctactcacttggctgcctcatgaataaattcttcctgttttgcaaaacctgtcaccacagtgattgacttactgcacacaggcagcatgaacctggatgtgaatgataacaaatgtatgtgaacccctaggaaaacaaatccaatcattagtgacagaaaatagataggggtgtccttggcctaggtgtagaggaaaggtgtcgattaggaggagcacaagataactttctgctgtgatgaaaatgttctatatcttgattgtggtggtggatacacaaagatacaaatttgacagaactgatcaaaacatctacttgataaggttgcatttaattgtattgttataccagaagcatataataccacaagtatagggaaactctgaaggtgtgttaaagcaaaataagtaagcaggatgccattagcctgaagttgtctctgtaaccagagctcttacgtaagcaaactgggacttaacttagaaacatttcttctaactgacttaaaagaaaaacaagcctcagccaatcacaaacagccaaccagctgactggctatgtaattagagacttcgcatcagcccatactcaaataagacaaatgcctagctgtatagccaatcaggtgatttctctactttgagtcagtgatcacgctattaaaaacctgctgctcacattgctgggcagagctctctgaaccttttctggttctaagtgctgctcaattcatgaatcattctttgctcaaataaactctgttaaatgtcatatgtctgaagtttttcataacagttggaagtaaggactgcctatggaccttgggacttgaggaaagacatggtagcagtgagttacctgagtgttctttttcttttctttcttttttttttttttgagacaaggtctcactctgtcacacaggctggagtgcagtggcacgatcttggctcactgcagccttgcctcctgggctcaagtgatc

SEQ ID NO: 195578 - DNA, 1000 bp, Homo Sapiens
aaagtaacactattctgtggttattcttatggcatattaaagtgatattttaaggaatacttaacaaaattctatataaaatgtatctactctaagttagaaatcttggtgcccttactggtcttgtgatcttggaagtcacttaagatcccgagctctgtattaagacagtgctggttcaagttctggatctaccattgagtaattgaccatgactttctttatacttcagtttcctcaactgttgaataggaataatggttgttgtgatgagtccataaaaaatacagtcttactgactttatggtggccgaaatttcaagagtaacacagtaacagttaagtcatactgggactcaggctaatcttttctccgttgccctaggcattgatgtccacctggcaaatgagggtgagaagcggtgagggattgcatgggaggtttggggacaaggcctgggagtagtacagaggcatctttcacttttgcccacatttcattgtccagaccagtcatgtgaaagggaagctgggaaatgtagtttagccatatgccaggaggaaaaggaaacgctttggtaaatagccagtttttgccaccagtgctaagcacagttcctggaagatggttttcaagtcattaagcaagtcacttttcacctctccaggtccgtgtttctttctgtaaagtgggaagggggatgataatgaaaacttctatgaagcactgttttgggagaactatatgttataaccatcttaactcacttaattcttacaaaagtcctctgaagtaaagactactattgtccctttttttttttttttcttttttaacagctgaggaagctaaggctcagagtgagtcatggacacaggatttgaacccaggcagtcttttctgtagggtctgtgcttttatttatttttatttttattaattttttttttttgacggagtctcattctgtcactcgggctggagtgcagtggtatgatc

SEQ ID NO: 195579 - DNA, 1000 bp, Homo Sapiens
agaaaggaggttcactggaggcagacatattaaaaggtcaataatttcttgatgttcttaaatcttgaaaatcttcataagatccctgcatctttatagaaaaagcacaaacttgcttcctagacattaagtacttatttgtatcatatgtcctctcctcagtaagtcctccctcacctctcattgtgaagaggaattatgtgactccgcctccttatatcactatccctattcaacccaatcttccaacaaagatattttggttcttgggagctttatcagaagagctaaagaaggcttaaaagctggcccagtctgcaaaactactctacgaggtaagaagtcagaacaatggttccttttggaagaggcagtgactggatgggatcacaaggggtcttttggggactagtaatgtttcatttcctttttttcaaacaaggtcttgctatgttgctcaagctgttctcaaactcctgagctcaagcaatcctcccgcctcagcctcctaaagtgttgtgattatagacatgagccaccacacctagctgaaattatatatatatattttttgagacggagtctcattctgtcgcccaggctggagtgcagtggcacgatctcagctcactgcaccctctgtcccccgggttcaagcaattctcctgcctcagcctcccgagtagctgggaatacaggcacctgccactgcgcccggttaatttttgtatttttagtagagacgaggtttcaccatcttggccaggctggtcttgaacttctgacctcacgatccacccacctcggcctccccaagtgctgggattacaggcgtgagctaccgcgcctggcctgaaattacatctttgatgcatcctagaattcttatcagtcaaatactgtgattgacacaatcctccctttcatataggtaaaagatcccaaaaaggtgccaggttagcagggaggtagggtggaaaataagtaaataagagaattc

SEQ ID NO: 195580 - DNA, 1000 bp, Homo Sapiens
tatcagagtgtttcaaaattcctgtggacatcttattactcagcttttcctattaagcttttcgattaggctttttttccccaaactgttattcattgccgaatacagttgccatgttaaaacacttgtctgtaattgttttccaaaaacaccctctgtggagaggctttagcactagacagctttcattctggtcaaataaagacaaacctttcaaatgaggtcttccagggaaccaccagacagatgacatcatgacagttaactgagaataaggctttgaaggagctccagctccattctgctccctctgcttggggatgtgggctgtttttcaaggcaactactgagctagagagtgaggaatggtctaaggcaagttaacacaaatctcactgttcttacagaaatttttcttgaataaatgctcctcgggttgctgcaagactttggttacatttctagagttctgaaaaagtttattatggtcaatttttttttttgcccttttcttggtgtttgttgcttttatgaagggatgaatttttggatgtctctttttttttttttttttttttttgagacagagtctcactctgttgcccaggctggagtgtgcagtggcgcaatctcgtctcactgcaagctccacctcctgggttcacacaattctcctgcctcagcctcccgagtggctgggactacaggcgcctgccaccacgcccagctaatttttgtatatttagtacagacggggtttcgccttgttagccaggatggtctcgatcccctgacctcgtgatccacctgcctcagcctcccaaagtgctgggattacaggcgtgagccactgcgcccagcctcgatgtctttattccaccattttcactgatgtcacttacaacatggttttaaatctctgaaggctcactgggcacatgcctgtagtcccagatactcgggaggcaaaggaagaaggatccttcgagtccaggaattc

SEQ ID NO: 195581 - DNA, 1000 bp, Homo Sapiens
tgtacagacaggccacccctagaagccacacgggtcagaagagcgtgtggctgtggctgcagctggagccacctggctggcctggcctctggcatcatgggaacaggaaattcccccctagagccagcggctccggagccagctctttgagtcaaaggatattaatgtgtccgtcgtggctcccagagtaaatgtaggacttgccgccgtttttatgcaccgtcagacactggatcgatttactgtgaccctgtgaaggagacacactgggcgggtaagctgatgacacactgccctgccctctgccacccgctttccaccaacgaagcttctgggtaatggagggggcagacgcccctcaatccatggcagtgcaggtgctctgaggccccagtagccccagctgcccgaatgcacggcccacgagccctaagaaacctttccaaagctacccagtcacctacagaccctgcccttcattcccctccctccaaggtacctaacccagacctgggcccagacctgcgtctaaccaaggcccagcacgtcagcacctgagcacctaacgtgtgcagacacgtggcctgcaccccgccgaccagcacccgtcgcggggagccacaagggggtcggtccaggaggacttcgctggccacattcgcttcaggccctggtttgtgaggtttcttctctctccctgcccaggagtgctggccctgctgagggcaggggtctctctgatcactgtaaaagcccaaggctgtccgtgaacgctgacgctcctaccctaacctccctgactgctgcagtggagggcacacaaggctggtccacaaccagacagctgcttccagagggcggcgtttagccccctccatatctgagcctgagacaaaaataacagctagggtgcaggctcctcatgcctttctcctgcaaagggaggccagctcctggctggcccctctcctctgagctcagggcttttccgcaggaattc

SEQ ID NO: 195582 - DNA, 1000 bp, Homo Sapiens
aagacaaccagtttctacaattgtgtcatgttgcaaaagaaaagggattcttattgcactgatgcaaataactatattgccataagttaagaatactcacaactagtttctaaattctggagaagccaggcagagagagagagagagagagagagagagagagagagatgctccaaattttgttcacaggagtttaccttactcaattattaaaggccataaatagttcaaaataagcttccttgagtctgaaaaacaaaatgagaatcagcagtgttccaagcaaaagtaaaaaagattatttcagttttctattagttcagtccattccattaactcttgttttgcttgatattcacgaacatgtcagctcttcatgagtcctgtatgttttcctttattccagtgtcacaatcttcaaagatatcagaaacctgcatttgagagcacctgttaaagttctatagctgattacacaccatcttctgaagatgataaaaacaacaatcatctataaataacaaaatgtccagggtagttacagtcagaaacatgattgacaaagaaatttggtttatttctgtggtttacaataatttaaccaccttgtgattgatagcatatactcaggcattagaattttagaaatcccatacaattttggaacgtatattaatattcactaaacctatattaatataggttattaatattaattacatattaatattaattatctattaatattaataacctatattaatataggtaatataggttagtgaatattaatatatgaagattaaacaacattttggcaatcccatgtacctagacatgtccggtaattctgtttacctctcttctggatgttccaggggccctctatagcatccaaaaggcaggtgtcaggaaagacaattttgaaatagaagtttgattttgggaagcttgttaaatgttagaagtttaaaacacttgatgttatgaaatagaattc

SEQ ID NO: 195583 - DNA, 1000 bp, Homo Sapiens
tggtgcatgcctgtaatccagctactcgggaggctgaggcaggagaatcacttgaacccgggaggcggaggttgcagtgagccaagactgcatgatcgcactccagcctgggcaacaagagcaaaactcttgtctcaaaaaaaaaaaattttttttttctgaatatttacatacagacctacagaggcaaaaatctggaagaatactttcaagctgaaactgttataatctttgagagttggagttctggttagattattattcttatctatattccttgatttttctacaataaatatgtaatatttgtaaagcaatgttattttgtttctgtgaagtaatcataactagattaacattttactaaatttcattcctgtgtataggattagattctgctttgggtacatttataatcatacttaattaacctctggatctgaggaaaaggcttaatttaagggctattttttgttcaaccatagaattattatgataatgagaaataataattcataatgaaactgtctattttaaagccttagccaggcatggtggcacatatttgtagtctcagcactttgggaagcttaggcaggagggtgacttgaggccaggagtttcagaccagcctgtgcaacacagcaagacccatctctacaaaagaaaaaaaaacccacaaaaaagtagccaggcatggtggtgctggcctgtagtcccagctacttgaagtgggtgctgaggtgggatacagtgagctatgtgatgcactccagttggggcaacagagcaagaccccatctcaagaaaaaaataaaagtctatcactaggccagggggtatgtatcctcaccaattttgagtggaatagacacagccaattcaattggttctgggactttagggtgatttatcttctcagactttactggtacattgggagtgggtctcttgaccacccctcaggataggtgctggcttctaccattccagcaagatc

SEQ ID NO: 195584 - DNA, 1000 bp, Homo Sapiens
ctcaataaatgttaactgtgactctttttccatctgtgtagtgatttaaagtcgaataaaccaatgtatccagtcttccgaatagggtttctttccctggcagattcctccacttccaagcccactgagttttttaaaagctccacaagcttccagagcattgaggacgtgtgccacggtctcagatgtggagtgaagctgcctgtttagttgctcatgtgattgtcttctgctagtgggctttaagccctttgagggtagggaccagtctcttattcagctgtgcattctgaaggcctacacatagttaagtgcccaatacatatttgtttctgaaaggagaaaaagcagagtactttgtacgtggatccatgcattgctcttcggtggtttcctatctaccctgttttactgagaaagggattggcttttgctatggtgattggaaggaagccaaagagagatgcaaaaattcatttgtctgagcttcttcttttctgaaggagaggacggcatcaatcttccgtggctccttaattattcttgctgggactgagggttcattcctaaggcctgccagtgacaacaacttaatgttgtcataagcagagcaacttaatgggaagaagagaggcttgtggtatctctgccaggactcagtagtgggactattacatggggagtggcaattccccttctatctccccttccatctgacaggcagctgggatgcatcttgtcttcaacttctaattctctggaaaaacatggtgcttaagaattttgggataaatcaggtcctatactgagaatttgactgggatgtgattcctcctgtaaatatgacactctgtataaccttcttaattcactgtgagaggggccttcttctccccttggagattaacagtgattctgactgccttaaactgggccgcttccaaagtgttttctgcatgagcaggagaaacattcaacccaaaacaaacaaacagaattc

SEQ ID NO: 195585 - DNA, 1000 bp, Homo Sapiens
cttttgcattagagcttggtcagcactgttgagagatttgcaaatgcaactaacagggctttcttttagcatcctaccctttcaaaaatccaggaggcaaacaatgatcaatgttgtcataagtaatgcagaggatggcaataataataatacctgactttcaccataagccatgtgctgtgcgaaatgcttacctgtattgttttacttcatcctcatcatcccctataaggcagatgctattatgaccctcactctacagatgaggaagttgaggcttagagagaggatgccttactcaaggcctcagaaggggtacttcagcacccccccacttcccttcaagatcctctaaggccagtgctctcatttgacaaatgaaagacagatttggagagacctgagatcttttggacatcaggtttatgtgtcaagcatagttttatttattttattttattttgttattttttgagatggagttttgctcttgttgcccaggctgtagtgcaatggcatgatcttggctcactgcaacctccgcctcccgggttcaagcgattctcctgcctcagcctcccgaatagctgggattacaggcatgtaccaccacgcctggctgattttgtatttttagtagagacgggtttctccatttggtcaggctgctctcaaactctcaacttcaggtgatctgcccgcctaggcctcccaaaagtgctgggattacaggtgtgagccaccacgcccagccaagcatagttttaaaaactttgctggtcttatttaattaaatccctgtaagagtcctgcaagataaatactattattattcctgttttacagatgagaaagctgagacacaaaaatttccaaggccacatagctactatgtgaaagatgtaggataaaaccttaggcagcctgcctccagagccaggctcctaccctcactctacagctgccttgcagggagtactgttaaagcttggatcctata

SEQ ID NO: 195586 - DNA, 1000 bp, Homo Sapiens
cggtgggaggggtaaattacggagataagtagattattggggaaaaagtcacactcggaggccttatgaaatgattaaactctgggaaattcatccccctaaatccctggcccctgatagtacacattcattactggatcctgggtaatgtacaatgaagaacctcctttagaagcaataaatactcccactccgctgaattttcacttaactttttaaacagtgagttctgtagttttgatgagtgagagtcatcatatacgaagcaaattaaaggaaagggaaggggtcatgagacttgtaagatttttaaatactgtactgttttgctaaaataggaaaagtacaaatattaaaataaaaccaataacatataactctagaaaaatagggtcttactgacttccttggattaacttcataaactccatatcaacagaaaccatttcatatttgattaacagccttgttcaaatctattatgacaaaatatatactctctaagaagtatttcctatagcaaatatttgtcaatagtcaagttgactcttattagtcaagttgactcttattagtcaagttgacgaacagcctgaaatgatgtttcggaaagaaaaagtctaggaaagtaacttaaatgaatgtaaccatgagctggagacagaaaatgaaccctcatttttctggcaaaagggggaaaaaaaacaacatacaaacacacacacaaaaaaacaggcaccctgataaccaaaatcctaataagagaacttcgtggtggagactgttagtatcagcgttgactttctactcccagctactgaattgcagattcagattgcaacctcaggcattccaaaatacagcagtgcactcacttaaaatcgctcttggaaatacgcgaggaattgctaactctctaagtaaagctgagcctttttgatagaataaaacacatctgcttcttccttataaatagactattcactacctggaggaattc

SEQ ID NO: 195587 - DNA, 1000 bp, Homo Sapiens
gtccgcccacctaggcctcccaaagtgctgggattataggcgtgagccactgcgcctagcccagacccattatcttcctatcactttagtttttagatatatattgggctgggcatggtggctcacacctgtaatcccagcactttgggaggccgaggtgggtggatcacctgaggtcaggagttccagaccagcctggccaacatggtgaaaccccgtctctactaaaaatacaaaaattagctgagcgtgatggcacttgcctgtaatcccagatactcaggaggctgaagcaggagaatcacttgaacccaggaggtggaggttgcattgagccgagatcacaccattgcactccagcctgggggacagagtgagactctgtctcaaaaaaaaaaaaagaaagataattacattttttatcactttaatttttatgtgaactcccaatcctggcagtgactttctgacattccccgcctactaggacctgactaaacactccagggtatgtgtgtgtgtgtgtgtgtgtgtgtgtgtgtgtgtgtgtgtgtgtgtgtgtgatgtcagctgctcatcaagtcatttgttgccaggtatgtcagcatgggcagcctggccctggggctttctgaggctcccacgccagactcagggtgtgggaattacctgcctcggtttaccgtgtatctcttggtccgtctgctgaggtccgaagcaggcacagccctctcctagaacctctgacctctcttccctcaccaccttcattcctttttcctctgcgtttctggccaaaccattttgtctgcatcctgatctcctttttcttttgagacttaaccaaagtgtagcctgcgtccagctgcacccctcccatgaggcaatgagtactggctaaccatctgctccagtggagtgaattgaaaaggagggaaattctaggaggaaaaaagcattggcctctagctcaaaatattctcccggcacatgtgaattc

SEQ ID NO: 195588 - DNA, 1000 bp, Homo Sapiens
cacagatgaggaaaccgaggcttgaggaggtgaagtgacttgcccaacatcacacaggagtagtggagccagaattgtagcccaggctgtttggctgctgaacctcttcccttgaccttgacattgacagcctcccatcattctgctcattctcataatccaatgaatgaaggaggcattagaaacgtgctgtttacaatcaaagacaataaagatcagcgaggccacagccacacagagggcaagctacaggcagtgagtccagtcctggcctgcctgattctgcaagccctccttggtgctttgctcccatggtccagcttcccttccatgcctccactctgtttgtgtagctgcaggttctcccaagtatttcctccccaactgaagaccaggcccaaggagcagaccctgccagccgtcagctgagccttgccgggtctgggctacagtggggcctcctttcccacaggcccctacaggaactcccacagtcatcaagtaggggcccactcagcgtagaactgacatcgccagccccacaaggctggtgcctattggcagggcccaaggatggcttgatgtttctgctggggtgtcttgccgtgtccccgttttcatcatatttttaaccgggggtgtgggggcgccaggaagtctgtgatttgctggggtgagcacagcccggcctgtatccagcatccaacatctccttggtacccagctgggcagatacatcaggactctaccctctctcccctccctgagccttgtccctttgagaaagcccaggaaggcagctctgcacgctgagaaaacacttgctaacctaagggcttgtaatgaaccaaattctgctgaattaattggatgtcgctagcagtgtcaggaagggggttggggagcagtggcatccaccaagcctggggatgggaaaggcgggggcaggacagcccacaacacaaaatacttctgcacagcttgtgcaagagaagaattc

SEQ ID NO: 195589 - DNA, 1000 bp, Homo Sapiens
agttggaagtcatttaaataagaccatgtctgaaggtaaatatttgtcttacagagctataagattttatttacatatcattcaatacagtatgatgtttcaaaaagtacataatattaacttactttattagtcccttttatttttaaaagtgtccagtttgcacaataattatatggtcacatacattatgactttttttaaagaaataaatccagttggtttgcaaataaaagtgacacattgtaaaagctctaaatgaggcagaagtagaccgttagcatcaagggaaaggggtgcaattctgattcaatgatctagtcacaaatttggttttgagctttctaacagccatagcaaatatattatatggcctgtggtgtgctactcattcacaaaaacaaaagaagtatagatattaagttttgtctaaaagcaattttatacttgagaactcctgcaggagacagagaacaatgtatgatgaagagtggtaggttgagctgtgattagtatatttgagcatgctgttcccctctgctgctgatttttggcatgtgtgaaaatgtgtgataaatggaaggaatgggatgtgaaaatccatttctaacatgtttgctggtgagatatatagagatagatctatgtaaatatataggtatgtttaaaacatacattgaagtatcaaggaagttgttgcatggcctaatcaaagttaatttacaacactacagtaaagtgaagtttcatcctaagaaaaaaagtatatagaacagtaaactagatttagaagggcgaaccacaacaataacaaaaaccagccttaatcgcaagagaaccatgggtatctcagtatcacacagtgactgtcctctacacctgatctgtacaaatttctatcaagtatgttatgccaagtccttgaatgactcaggcaaaatttgaaaacccaacttaagcatccatcattgaaattcaattcagcaattaagatgaattc

SEQ ID NO: 195590 - DNA, 1000 bp, Homo Sapiens
agttgcccacacattcctcaccatgtgctcttgggctggctccattgtgtgtcacgtaagccacaatctcagggagataggggtcctgggagaatagtggcaccgacaagcaaagggatcatccctgtgtgatctatgtggtttggctggaagatgccagtggggggtcccctaccactttctttcttgattaggtgtcatggatattaggtaattcctaatcatggttgtggttttcagagccccagtgggaggagttgatcagtggaaagataagtgaaaaacaggggcacttactacatggggaatacaattctttcttgatctgggatggagaaaaccaaatgaaaatattatagagttagtggtttaagaaaattccattaaatagtgcctgcaattaaaatcactggactggaaagactagggatatcttagttgttctttggttatagaggatggtggtaccagaaaaactaaatagaagaggaaagtcatttccctcagagggaagatccacccccttcctccagagaaagcctgaatctaagaaatcaaataaggtgttctaaacttataggaagtgtgatgattagttctatacgtcagcttaactgggccatgaaatacccagatagccatttaaacactatttcagggtgtggcttgagggcatttgtagaagagattagcattcagattggtggactgattccttaaagatgacccttcccagtgtgggggagaaccatccaataaactgagggcctgaacagaaccagaaggaggaggaggaaagttgaattaactctgcctaacggcttcagctggaacattgatcttttcctgtcctcagcactccttgtgttcaggtcttcagattccaggcgggaattgacatcatggcctttggataacaccatcagcttttccagatcttcagcttgcagagggtggatcatgggacttctacaggaagataagattatatgtggaattc

SEQ ID NO: 195591 - DNA, 1000 bp, Homo Sapiens
gggattacaggcgtgagccaccacacccagccctacagacactattatttgaagttgttgatcaagtgccagctaaccacttgactaccctgcagagaagcttacacacacagaacttctgatcagcttttcagagttctactcttaaatatgaataatcaggccaggcgcagtggatgggttattgaggcctaggtggacagatcacttgaggtcaggagttcgagatcaggctgacaacatggcgaaaccctgtcactactaaaaatgcaaaaattagccaggcagggtggcacatgcctgttatcccagctacttgggtggctgaggcacaagaatcgcttgaacccaggaggtggaaattgcagtgagccgagactgtgccactgcactccagcctagacgacagagcaagactccaactcaaaaaaaaaaaaaaaaaagaataatcagtgaatgacaccagacatctaaagaaggcctctaacatggaacaaagtgactaaaactgactaaatcaaagtcaaagaaaacagaaagtcaaaaaagaacatgcgtaaaacaaaagaacatttcaaataattataattaaactctcagagaggctgggcgtggtggctcacacctgtaatcccagcactttgggatgccgaggtggacgttttgcctgaggtcaggagttcaagaccagtctggccaacatgatgaaacccgatatctgctaaaaatacaaaaattagccaggtgtggtagcgggcacctgtaatcccagctactcaggaggctgaggcaggagaatcgcttgaacgcaggaggcaggggttgcagtgagccaagatcgcaccactgcactcaaacctgcacgacagagtgagactcttgtctcaaaaaaataataataaacattaaaaaaaaataaaataaaactctcagaggggtaagagaagatattatactcattaaacaggttgctataaaacaaaaacaacagaaagaattc

SEQ ID NO: 195592 - DNA, 1000 bp, Homo Sapiens
acacacacacacacacatgcacgtctctcaatcagtgtcttcatttttatgtattcatgtattcaataaatagtcactgagagtctactctggggaagtcaactgagtaaaaagggggataataaaatttaccctccttatcttgcaacaggacagtgagaatcaaattagatcattgaaaggatgctatttaaaatagtcattaagttaatgtaggagtcgatagtgatataaggccaggacattatgccatggactatgaccaatgagagaaaaacaccttggtcatagacacatggaataaagccagagaacaacaaaaatgatgggttttacattcatagattggagttcatgtttatccttttttaaaagcctgcatctgtaaatgacagctaacattttatagaaaaaatctcaggtgctataaattaaagttcttatgcgaatatcaagcagaatgcccaaaagaaattccagggcaggggtggcctggagccatgatgacttcataggtgcattgccttctgttttcctctgtccttctagcagcacttctagcacctttgcacacctcctagagcccacaaccttctccgaactctgagttctcagtctcctggcattttcacagcaccttttgggcaaatgatggtgattaaatacttctttcgggaatgccctggttaggagatgtatcactcccttctccactccaaaggcttctgtgcctaatatctgttgactgggagctgagaaaccatcagatgaactcattcactctgaggcataaataagtagcataatttggcttcggtagaaggagttcattgccttgtttccttaactctcacatggctctactgtataatgtgccattgacttgataagaactcctcaagaaaaaggaattgattcatcaaatgtataatcaatcataggcatatcccaatttaaaaagttttaatatacaaaaacatatgtatttttatcaaagaaa

SEQ ID NO: 195593 - DNA, 1000 bp, Homo Sapiens
tgagtcatgcaacctgcaagctctaggcacctgcagctataacctcctagattaagtaattcatcagttacatgagctaatttgcaattggaagttcctggaatccatttcatattgctaactgtggtgtctacttagtatcatgtaaattattttatatgatcctgtctgccaattaagacaaatggctttgcatatccccatacttgagtcatccatgtgatatctggcaacatggcagggtacaaacaaaactctgtgacacactgtatagattgctggggttagttttcccaccgacaaaaatgggactcaaaaatacctcacagggttgaaagagaaaagtattaaatgaagcaaaatataagataatgcagccagacaggatggcttatgcctgtaatcccagcactttgggaggccaaggcaggtgggtcacttgagcctaggagttcaagatcagcctgggcaacgtgatgagaccccgattctacaaagaatacaaaaattagtcaggtgtggtggtatgcacctgtagccctagctacttagaaggctgagatgggcgggtcgattgagcctgggaggttgagggtgcagcgagccgtaatcacgccactgcactacagcctggatgacagagcaagaccctgtctcaattaaaaaaaaaaaaaaaaaaagacagcgacagagagaaagagaaaatgctttctgtaaaatatgaggcaccacacaaagttaaagtaatgtgactctgtagactacggcactagcctagaccagtggttcttgccagggcccaatttgacccccgggggacattggcaatgtctgaagatatttttggttgttacaacttatggacagtgctattgtcatccagtgagcagaggccagagatgctactaagtgtggacagaacagttcctgacaacagagaatgatctggcctcaaatgtcaatagtatcaaggcagagaatcctgattaagtcgaagctt

SEQ ID NO: 195594 - DNA, 1000 bp, Homo Sapiens
gatagcagctaaactatgctggtattggccaggcgcagtggctcacacctgtaatcccagcactttggaggccaaggtgggcagatcatgaagtcaggagatcgagaccatcctggctaacatggtgaaaccccgtctctactaaaagtaaaaaaaaaaattagccaggtgtggtggcgggcgcctgtagtcccagctacttgggaggctgaggcaggagaatggtgtgaacccaggaggcgaagattgcagtgagccgagatggcaccactgcactccagcctgggtgacagagcgagactctgtctcagaaaaaaaaaatatgctggtagttttgattcaagatggcctttggagcccatgatttaggtctcgtacccaccaaggtctactggaaaacatcaggctctcctgctatagacccatagggagagctgcagccgagagggggagctgaagagaagtgccccttctgtgtcctgtcagcctcatccttccgcaaggaccagttgctgtgccactccattcacttgctgcaagactggaggtttttcctcaggtgttgagcacctggtttacaagatgtcagcatcttgatgcctgagaccatcaaggcaagtctctgaacagggcttaccttagagtaaggcttagaagaggccgtaaagtcagtctcagctccgtggctctgcagagctttgggacatgtgaattcttaaaaacaagactattgtacagttactatatgcatgcagtataaaattataaccttggaaaatcctagctagctgttgagctaattccataaagtaatcagctcctgagttctgcagtggtaataataatcagcataatgagtaaacactgtgtgtgccaggcagcgtctcatttgatccttgtgataatcttgtaagtactgattttctcccttctttaaacaaagttttttttttttttttagagagggtctcactatgttgcccaggctagtcttgaattc

SEQ ID NO: 195595 - DNA, 1000 bp, Homo Sapiens
gcactccagcctgagcaacagagtgagactccatctccataaataaataaataaataaataaataaataaataaataaataaaatggctgggtgtggtggcttgcatctataatcttagcactttaggaggctgaggctggaggattgcctgaacccaggagttcgagaccagcctgggcaacatggtaagactccatctctattttaatacagttaaaatttgtattaaaaaaaaagttcctccatgtcttttcatgacttgataactttttagcactgaataatagtccattgaatttctttttagtactgaataatattccgttgtctggatatgccaaggtttaattatcccttcacctactgaagaacatcttgggtgtgtccaagttttaacaattatgaataacgctgctataaacatctatgtgcagatccttgtgttgactgaaattttcaactcatctgggtaaataagaaggagtgtgattgctggatcttatggtaagggtatgtttagctttgtaagaaactgcgacaccgttttgagatgtagtctcgttctgttgcccaggctggagtgcagtggcacgatctccgctcactgcaacctccgcctcccaggttcaagcagttctcttgcctcagcctccagagtagctgggactacaggcacgtgccaccatgcctggctaattttttgtatttttagtagagacggggttttcaccaccttagccaggatggtctcgatctcctgacctcgtgatcctcccacctcggcctcccaaagtgctgggattacaggcgtgagccaccgcacccagctcattgttgttttaatttgtatttccctaatgacatatgatacggagcatcttttcatatgcttatttgccatctgtatctcttctctggtgaggcgtctgtttagatcttctgcccattttttcaatccatctgttcattttcttattgttgagttttaagaattccgcg

SEQ ID NO: 195596 - DNA, 1000 bp, Homo Sapiens
ctgtgccccttcctcaggaggcagcaaagccagctaccaagcttttgctacctcttccccccactccacgctccatcccgcctggttccccaaatcggggtcccaccctcagtttgcatggggcagctccccgtttctctcggtcctttcatcgggggctgtccctaaggcttggtccctccttcctgctcctgtctcccctccgattcttgcactgcacagcctacccagtttctatggaaacaggctgggaaggcactgccaggaggccaaggccactacagctcttggggggaggggaagatagaaatggaaagagagacgcaggaggcgagttctggccattcccggaagcgggtggagatctgttgggagtgagccttcactgccagaggggtggggcagaaggagaggtgtgattaagtgatgtgactgagacagagttgaggggctcctcctcattcccccaattcccagtgctccagacatctagacaagcctcctcagaggggaaagtggtggatgaagaaggaaaagagacaggtagtaccaagagctctgcccatttctaacttatgtgaggctctatccttttacccctcctggggacatgcccacttgagaggaggtctccagggaactagaaggctcccaagaagtgggagggaaaattggagtgcggtgtgagtggtcagggatgttcaggaatctcccctaggaaggtgagctagaggtgggcagaggcctcggaatgtcagctacttttatggtacccctctctggcacctccactgaggagttggtagggggctggagactgtcagcttcctcccctctgttcatcccatcagaacgttgggctatgagaaaacaaaagtggcctagtgggggttgggtgcacagaaagggagataagcctaaggcaagaagggccagaagaggggtgggtgaatgagtgagtgcggatgcttgtggctagggcagggagggagcttcttag

SEQ ID NO: 195597 - DNA, 1000 bp, Homo Sapiens
taaatactgggtgctcatagcagtgagtcgttcaacacaattccaataagaactgcatgcctattatgggctaggccctgtcctacagcaaagtgtattcaatatattttaagaagcaagcataaaatccacttaacaaagatctccatacaaaagtttgaaatgtcttaattctttcttcaactatacaaaaaagaaaaactgttaatataatttaaatgtttcaaatattgccaatctttttagaccagctgggcttacctgaaaattaggtatcacaaaacaattatttcctgaattttttatagagaattttggacataacaagaatgtgaaaatgcatttgatagacactattatggtcagtggatattttaggaattttttaatttttagagctagggtcttgctatattgcccaggctggactcaaactcctgggctcaaatgatcctcccaccttagccccccaagcagctgggactctcgacaggcaccattacagcttgctcatgctgtatttttgaacacagaacagtatcaaattggaattagcagatgacaggggaaaagcaggcaatttacaaaagtataatcataaactgtattctgtagcggaaaacagtattgtttccatagcatatgtaaagaaaataggtcttctgaataatcaccaataacgaagccttccctaccttggttgtatccttttaaaacaggaataaatatcccctttaccactgtactacatcactaagattttaggtagaaaaaggagctgggagagtaaactgattacacgtgcatcaaatacaagacacctaagtatttctggattgtagggataatatgccctgggcttactactgcttcttgattccaagagatttaaggatctggtttcaattagacgctttaagcagtaaagcaacatccacagagacacacttatagaagaacttaaaactgagataattaagatgttgaggaaactgaattc

SEQ ID NO: 195598 - DNA, 1000 bp, Homo Sapiens
caaactgaggcctggagacagagcttggacaccgagtctccccagtacccacacagagccctctccttgccctctgcccaccctaaacctgggtgcagatgtcacccccatgactagagggctagcacatggtcagatggcacagcagaaccaaggccccattcaggaccactccccaagatgacctccacactgctggaaaaggtgaccctctccatcaggcccagctctcttctcctgaagcacaagctacttcccgtctgttagcagccaggcaaaccccacgaaaggaagggcccagggaggaaacatctgtgtatacacgaggggtgaagtcataagccctcttgactttcccttttggcaaatcctcttctgcctaattttttttcccctacatcattgagatgcaaagctccattcaaacaagggggcctggaagactccagcagcttctagaaaccaaaacttccattctgctacagagattctcaaaagaaggtatgtcttgttgcactggggtgtgggtggggctaagaacagaagatagatgccctgcaaaccactcagttgaccacagacatccatgtgcttacccctaaacccagcttctgcccttcagccaagcagagaggaagctcaaatgcaggttccacagcttctcagccatataaccctggccaaggcacttcacctctacaaacctcatcttttttctttcccacataggaaaatgcagatgccaccacctacttcatagaatttttgcagggattaaataagacagtagaaacaatggtaggtacatattagcttcatcccatacttttccatccccttgagaaaagccatcaactgaggtcaccaacgctgagtcactcatgttgcccggactttcccaacagcacggctaaactctccagaatgataccttctaaccattctgacataaactgagctgactgaaggaaagagcacgtgaatgacgagactagaattc

SEQ ID NO: 195599 - DNA, 1000 bp, Homo Sapiens
gggctgaagcagtttaaatatctgagagcattagtctccttttttctcaatatccttgtctttgttattgtttttttgtttgtttttttttttctctttacctgagttaagggaattttcctgttgaaatcttcaaggtcactttgggctgagctggactgggcatgcttctttcaaatctgtgttctccagtgacccagaactgtttgttttctgaaagcaaaccacattattttgcacccaacatgaagcttagtaatgccaaaaattactgctgaaattgattatttccatctgagggagaattttttttcacattaggttcatttgtcaaggttacagctgaagctatgattaatcacttgtagactgcgaagttaagctacgtaaaattagaaatagccattcctttatgctaaaaattattatcacaggtgattgtcactgtgctgttacagtgaacacatcttggcaatgttagtgagtgtcttctttattaaagcatgttaaacaaaacttctgttcaataaaagcttctatggatgagaagctaattaatgaagtaaagataatgaatttttgttgaagggatggccttgctgctgatgattgcttaagttacctgaacttgtttgaaaccaaaggagaatttacatactgtgtttagaaaatgagctctcagaaacaacaagccctgcaaaaggggatcatagatttactgaacagagactatacacatgctaaatatccagggtttttttttcttctcttttaagtgactgaccccaggaaaaatgctaagggcctccccagagtcactggcctaggctgggcttggccccataggaagtataaaggtatcatgcaggtgatcagcagcagtatcttttcagatgttcaacttggaaactcaggagtcaaacatgatccctttctcacccctcacattcagtcatccatcaaatgtattaattctgcttcttcaatgactgtggaattc

SEQ ID NO: 195600 - DNA, 1000 bp, Homo Sapiens
gtgctgcaggaggagcttgggaatgactgctcctggggacggggtttccttttggggtgacggaatgttctggaactggacagaggtgccagctgcacgttgtggatgtgctaagcgccacttgattgtgcgctttcacgtggaaatctctccctatgtgtgtgttaccacaataaacagaaaactctgggtggtgtgtccgaggcctcccctgcgtggcgggacgcccaaggacaacctccttccagagccagcggtgcgatggggactgtgaacttggacagagccccaaatccttcccagtgctgataaaacttgtggttttgatgttttgagacactgctgtgtcctggcacgggtgggcccgtttctgtggcttgttctttatcgagctgcagctctgtccgggcggcagagcagtgggacctgcgagtgtcctctctctgggctgctcagagcacaccgccctctccccacaggcccggccaagccccggccgtcccacccaggagggtcctcacctctcccatcacagcgatcggcgtctctccggtggcctccgcgacgcggtgctccaccaggtagaacatgtactcgtcgtagagcaggcggatgaggtggaaggagccgaagctggcagcgctgcgcagggtcaggtcccggatcaccatggagctggggacaagcggacagaggctggggaccctcaggggagcatggaacccgggccccaggccagacttcatggcagcaacacaccccctgctctacgttccctggggaacccagaggctgagtgatcctaagacgtgcaggcctacgcgggggctgacgggctgccgagaccctgggcccacgtgacggacaggtggggccggcctgcgcgctcagttccagagaccacctggggaacaggagagggagatgggcagtcagccccaaagcgacaggctgcgggaaacaactgtggctggtgctagcgcaggcgctagatgggatc

SEQ ID NO: 195601 - DNA, 1000 bp, Homo Sapiens
agcctcgccaacatggtgaaaccctgtctaccaaaaatacaaaaaattagctgggcgtggtggtgcgtgcctgtaatcccagctactcaggaggctgagacaggagaattgcctgaacccaggaggcggaggttgcagtgagccaagatggcaccactgcattccagcctgggcaacaagagcaaaactctgtctcaaaaaaaaaaaaatcttaacaataaagaacaaagcttacaccctgaaaactacaaaacctttgaaagaaattaattcatttactagatctcagtaaatgaaaagacatcccatattcatggattagaagacttaatagctatggtcaactgactttcaacaaagatgccaagatcattcaatggggggaaaacagtctctttcatttctttttcaaatggtgccggaacaacttaatatctagatgcaaaaaataaagttagaaccttacctcatacgatataaataaattaactcaaatggaacaaagacctaactgcaaaagctaaaaccataaaattcttagaagaaaacacaggggtaaatcttcgtgaccttggatttatcaatagattcttagttatgacacccaaagcataagcaataaaagaaaattggactttataaaaattaaaactattgtgctacaaaggacacatcaagaaggtgaaaaaacccacagaatgggtgaaaatatttgtaactcatatcaaatatgggactttacaaaaagaactctacaaaagacaacacaattaaaaaatgcacaaagaacttgaatagacatttctccaaagatacaaaaatggccaaccagcccatgaaaagatgccattagtcagttatcagggctacgcaaatcaaaaccacaatgagatactacttcccacccactaggatgactagatcaaaaagtcagaaaatgccgggcgcggtggctcatgcctgtaatcccaccactttaggaggccaagacagggggatc

SEQ ID NO: 195602 - DNA, 1000 bp, Homo Sapiens
tcgagcgcgaccccgcccagcacgagaagctcatcgtccgcatcaaggaaatcctggcccaggtcgccaggtgtgtgccgggcgaggcggggcggggccggggttcaaggcccggatgtgcccgccctggggttccccaggtccgcgagggctgctgggtgggactccgcagcttactagagatcacctcccggaggggcctacctgcggtcgcccctgatgcaccagtgctaggatggccatggagaaccccgggccggcgggacccactcgggggcaccagaacttccctaaagcttctcagggtggatcccagcgcccgggttagataggttcaacgcctgtcccccaaccctggcatctgttggagcagctgatgggccatggtctctggggttccccagggccggggtgggggccagagatgatgagggcctcatcccgggccctcctctctcgtttcagcgagcacctgtgaggagtgggcgggcccacgatgcagaggagaagctgtgggcgcggccctgccacaccccaccccgtggacgagaggctgggggtccaccctttggggcctggtcccatcctgcaccttgggggctccagcccccctaaaattaaatttctgcagcatccctttagctttcaatctccccagccccctgaacccggaaaaagcactcgctgcgcgatacacccagaagaacctcacagccgagggtgcccctcctcggaggacagccacgcgctacactggctctccgggccacccccaggacacagggcagacgaaacccacccccagcacacggcaggaccccccaaattactcactacggggggctgtgccataggccacacaggaagctgccttgtggggacttacctggggtgtcccccgcatgcctgtaccccagatgggtgggggccggctttgcccatcctgctctcctccagccgagggaccctggtgggggtggctccttctcactgctggatc

SEQ ID NO: 195603 - DNA, 1000 bp, Homo Sapiens
tctccagcccttccctcgaggccacctcaccccgcagctgggaggagggagtggtcagcgtggttgccgagacactgggtggcctttatgctgtcaacggtggcctcagaggccttctggcaggagcccgggggatccaggcagacatgcaaaccctcaggcaagaggctgcacggccctgtatcccctcggggaccctcgaggccagcttcccagcaccgctgtacaggtgagcccctccctacaggtgagcccctcccagcccctccctccctccctccctgggtgtcaggttacatggtgtttggtttggggtcttgcacgtgtcactcgttattcctaaaaggctcatgtgtgtgacgtcccctccagctcttcctgttcccctccggccagtggccgctcactgtggggtctacagacctggagacaggccaagaacaaatgtgtctgcggccgtctccaaggactgcaaacgcactgggagcttcggccacagaaatgttcgccctctgaaatccaggcctgtgcggggctgggcccttctgtggctgagagagtctgtcccacacctcttgcagcccgtggtggctctgggcaaccccaggcactccttggcccccggtctctgcttctgtcttcacccggccttcctgtctgcgtccaagtttccctctccttataagggtgccaggcactggattcggggccatcctaacacggggtgacctcatcttagctgcatctgctaaaaccatttccaaacaaggccatgtcctgaggctctgggcagatgtgattttgggggtataccagtcaccccgatacagtgtctattatcaattgtttaaacaattatggaatactatgcagccatgaaaaagaagagtgaaagccctttgctccatttccaaggaaagaaattaaaccaagatggtggctgggcatggtggcccacacctgtaatcccagcactttggaaggctaagacaggaggatc

SEQ ID NO: 195604 - DNA, 1000 bp, Homo Sapiens
gcaaaaggcttgaagcaacctgaatgtctatcgataggagattggttaagtaaagaacagtacaagggggccaggcacagtggctcacgcctgcaatcccagcactttgggaggctgaggcaggaagatcacctgaggtcaagaattcgagaccagcctggccaacatggcaaaactctgtctctactaaaaatacaaaaaaaattagccaggtgtggtggccggcacctgtaatcccagcaactcgggatgctgaggcaggagaattgcttgaactcaggaggcagaggctatagtgagctgagatcatgccattgcactctagcctggccaataaaagcgaaactccatttcaaaaatataaatacataaatgaatgaatgaataaataaataaaaataacagtacaagaggtcaaataatgatcgaagagattagtatcttagtgttatgagatcagtatctcttagtgttatgagatcagtatcacagctgtgaaaaggaatgagaataccagatgtacaattataaaattacttttaagatactatatttttaagtgggggggaagaaaacaaggtacagaacagcatgtagaagatgctgccatttggttaaacaagggaatataaatccagccgcctactaaatgttcacagaagatttctagataaactgcgctcttcaaaaccgtagccacgagccgtatgtggctgtttaaatttaaacggaataaaatggaataaaatttaaaattcagttcctcggttgcactggacacatttcaaacgctcaatagccacattcggctcagggcgactgtaccacggtgcgtagacggagaccatttttatcatcgccatatcgggggccaaatccggcccaccgtttgtttttataaataaagctttattggcacatagccacgcccaccagtttacgtgtttgtctatggctgctttcacgctccaatggcggggttgagtagtagacagagatc

SEQ ID NO: 195605 - DNA, 1000 bp, Homo Sapiens; identical to SEQ ID NO: 114897

SEQ ID NO: 195606 - DNA, 1000 bp, Homo Sapiens
gggacctgcaggactggatctgtgcaaaagaacaacaaagccatcatcagaaacatcccaaaatgtcaagattcccagaggcttcccaggaccaggccaagttgtaccggtaataactttctccctcctgttaacctacatgggctagtgcacgtgaaggttatatgcatttttgtatcaccgtgcatatcttttagaaaacatatccacaatgatgcaaatgtaagctcttggatagttactgaggctggatagagaactgagaccagaacagaactgctttcaagaaacttgcatataacttgggggatggatgcagaacgaagaaccagtcaccacacaccgtggacaaggggtcagagcatcactatctgacacctcaaagacttctaaaaccttaatcattaccttgtccgatgcctggagtagctctacatattcccattaggaaaagtaaaatgggtttaagaactaactttgattggccagtaaatggacacacctctttggagcggcaattctagagcctccaagtgttcattccctttggcccccccattgcatttttataaaatctaatttaaagacaatataaactatagaaaatggtttttgtacaaagatgtgtacgtagcagcattacaaatgacctacccaataatatggttaagttatagaatgtccacttggcaaaaaattaaggcttctaagagggctaataaaattttaagacatatacaaacctatgctattatgttcaggagaaaagataacattgtacatagagtattaatgcaactatggggaaaggcttcaatgtacctaattagatggaaagatcaaaaatgctaattgtaagttatccttgttggaaatgcaactccccccaaccttttctatatcttaaaatttctgcaagagcaggcattactttttaaattgagaacacgtttttttctctaagtcaattttacatttgcagcaattaatggcagaattc

SEQ ID NO: 195607 - DNA, 1000 bp, Homo Sapiens
gagcacaggggactttattgatagtacgtgacaagatggggctccctaggcccctccctcttcagaggatctgcatggaaattgtgaagaggggagattctcagtgcaatgggggactgagtgcagcagaaactccccagcagtgagggcctctctcttcctctcatgctgtcactggggctggtggtctgggggtcttactccttggaggccatgtgggccatgaagtccaccaccctgttgctgtagccaaattcattgtcataacaggaaataagcttgacaaagtggtcattgagggcaatgccagccccagtatcaaaggtggaggagtgggtgtcactgttgaagtcggaggagacagcctggtgctcagtgtaggccaggatgcccttgagggggccctctgatgctgcttcaccaccttcttgatgtcatcatatgtggcaggtttttccagacagcaggtcaggttcctggccaacacattgtcagtggggactcaaaaggccatgccagtgagcttcccattcagctcagggatgaccttgcccacaggcttggcagtgccggtagaggcaaggatgatgttctggagagccctgcggctgttatgacacagtttcctggaggggccatccacagttttctgggtggcagtgatggtgtggactgtggtcacgagtccctccacagtaccaaagttgtcatggatgatcttggcctggggtgctaagcagttgatggcacaggaagcattgctgactatcttggggctgttgtcctacttctcatggttcaagcccatcatgaacatgggggcatcagcagagggggcagagatgatgacccctttggctccccctgcaaatgagccccagccttctccatgatgaagatgtcagtggacttcacaacatacccagtgccagcatcaccccatttgattctggtggaatctagctcctggaagatggtgatgggatctctattgatgaca

SEQ ID NO: 195608 - DNA, 1000 bp, Homo Sapiens
tgtatagagtgtgtgtttgcttgtgtgtgtatgtgtgtgtgtgcacgtgtatatgtattctggagttttccttttcacatcagcgatttcagatttgaagaccataatggaatctgatcttcttggctgttagggggctttggaaggctcctgagagcagagattggtgttttctgagttgatggctaacaggctgtggaagatcgtcaattagagactgagttggcctgccacgctgattaccctttagacttcatttcaggtgaggtgaaaggcaagccatgctgtcctcaggccagtagaattcgaccgcttttaattcagctatgttttggaacagggagctgctaaaaagactttgcttcctttgaatatcagttgatacagaaactaaaaaggaaaaaatagcttcacttgagatccaacaccctcaatctagtcaagggaaacagttaataactgaataaattagtaaattgtatagtgagctagatggcactgagtgttatgacagaaaaataagcagaggtttggggagtgcttgggaagggtgagatataaaatagggtggtcagagcaagccacatttaagtctttggaaaaagagaatggtgagccatgtggctatctggggaaaggtgttctggagagagggccctgccagtgcaaaggcccttaggtgggagcatgtctggatttggggaacagcaaaaacagtggctggggcataaggagtgaagggggtaggacataaggtcagaaacttaatgttggggagggactcattgaataagatgggcaatccattggagggtttgagcagaggagtgcaacacccaggagaagctgaatgtgacacatggatttccgttcaggcctttgactactctggactttgcctcctagacacatcagtttgggggatagaactaagatcatcatttagcaataatgaaactatatttctctggttctgtcctgatgtgctttgtcagaattc

SEQ ID NO: 195609 - DNA, 1000 bp, Homo Sapiens
agatcatgacaggtgtggaaggaggaggaggattctaagtatatttatgagagatagaaagtgtgcagtcaatgacaggaagtttttaaaccacatacggctaaggcagtgcgtgtatatcatgattttattttgttcttgttcaagcaactactttgtggtttcagtgagtcagtgatgcaagtaggtttataaaagactttcttaaagctgcatgttgttatagaaggactttgtgaaaataccttctccatctttttctgtgcacgcctacatgtgtgttctgcatgtttacatcctgatatgcaattacttgtttattctaagacattccattatttttcttactatggttgttatattaacatcttcatatttctgtggtccatgataaaaagccaaaaatgtttatacacatttatatacatttaaaaaaaataaaactagccatcttcttactattactaaacaaggtattgccatgaaaacatggaaagggaaatggactatgaactgttctctctcgtttacttaacagagattctatttgttcatactccatgtgaacaagattagagtccttctttattgttccttataatctatgctacgattagacatctattcaaagcctatcaaatcacatggctctatattagaaacgataattcattaaatatggattctagcatcaaagccttctatctctctgactcttgatttataaaatatgtgcatttacaaagtacagtgttataaatcaatttatcaaagtcactggataaaaatattgttacttttattcagatctcttttaaaactataatattttgatatttgctatttacttgtttgaaggtctgttttcatgtgattttctgatgctaaaggccattccaaaatagattccaaaatagtttttaattggaataaatatgcaatctcttaaagatagctactttgaaggctaatattcagtttgcatttgtgagttctgatg

SEQ ID NO: 195610 - DNA, 1000 bp, Homo Sapiens
cttgaactcccaggctcaaacgatcctcccaccttagcttcctgcatatgtgccaccacacccagttaactttttttctctctttttggtagagacagggtctcacgatgtcgcctaggcttgtctcgaactcttgggctcaagcgatcggcccacctcggcctcccaaagtactgggattacaggcataagtcactattccctgctttgactggtatttaaaggaaagcttaaagtcaaacattgtgttcacagaaggagaaaagtacactgtaccaagcttgaggatttatacttatctacaaaattgtttgcaaatcggtttatacaaaaatgtggcattttctggattatcacatactgggtgggcacaaagaatagttctgtgttggcactggggaacagggaactagaggcctgaccccgacccccttcacatacacaaacacacacacacactcacacacacacactcacgcacacaccagcttcctcagaatctcaaggcaggttgggtgtggtggcttatgcctgtatcctagtattttgggaggccaaggcaaacggattccttgagctcaggagttcaagaccagtctgggcaacatggcaaaaccccatctctactaaaagtacaaaaattagccaggtgtggtggtgcgcatctatagtcctagctactcaggaggctgaggtggaaggatagcttgagcccaggagttcaagactgcagtgagccatgatcacggcgccactgtactccaagctgggtgacagagtaagaccctgtccccccagccccacctaaaaaaaaactcaaggcaaatagcacacccaaggtgatgcacgatatggtgtctacccttagctgagcgcgagggcaggaagaaacagggtctgcacgccctgccattttgcacagacacagcactcctgagcgtaggaggagatgaaagacaaactcttgacacagccaaccccaggcatgggtggagaattc
